United States Patent Application Publication US 2014/0057251 A1 - sequence listing, part 151

SEQ ID NO: 296661 - DNA, 3382 bp, Cannabis indica
ttattgttaaaaataaataaaacttatatatttatcaacacagaattaaacttaaacataattatttgcgcaaattactatataatattattttatcattacctctcaacatttccttatttctttgaggaagacagctattcacacaaatcaaaatctactcaatcacaataaacaaaattttagaaacacaatttcatcacaataattgcacgtgaaatcacgttaattaagactcagtctcctataacaaaaccattaaacaagaaacacaacacatgcaatacagcctcataatttaaaataaaacaatgtatggtcgtcacatgcattattcgattaaataaaataatttaaacataagctcgatccaataaaaatggcaaaaacactaataacggtattgtttcaattaagtaattagtttacaaaccatagagagcaccaacaaaagtaggttttcttgggcagagattgaataaggattatcatggcagagagtgtggtaacttttctacttaagaaactgtcgtcgttgttggaagatgaggtgaaactcatgaggggatttcggaatgacgttgcttttgtaaagaatgagttggatcgaataagagccttcttgcactctgctgatgctgcggaagatgaagatgaggaaatcaaagtgtgggttaagcaagttagagaggttgcttacgatgcagaagacatcatcgatgatttcttgtatagatttgagcattccaagcgacatactggattctatgcttatttatctaagacaactcaaggaataaaaaatttgaaagctcgtcgtagtattgcctcccaattgaattaaatcaaactcagagttactgatatttctgaggggcgaaagagatatgggttcaaagagctcgggcttggcccgagctctggaactaaaccttgttacttttctgagcttagaaatgatgcgcggttgttggaagatgatcagctggtgggaattgagtcacaaaagcaacatcttttgagttttcttatggagaatacttctcaactactagtggctgcagttgttggaatgggagggttgggcaaaaccactttggtgaatacagtttatggtgatttaaaagtaaagacccattttcatcaaatccaagcttgggttactgtttcgcaatcgttgaagctagatgaagttttgaagcaaatcatccagcaattatatgaagctattaaccaaccacttcctaatgaagttgacaagtccacagacacccacttcctaaagacaatcattgttcattttctttgtaacaaaaagtatttgattgtattggatgacatttgggatgtagatgcatgggaagcattgaaagttatatttaggaataacaacaacggtagccgaataattatcacagctcgtattgcactggtggcttcttcctctactaaagatcttggtggtgagagtttgacattaaatcctctgtcttctaaagattcttggactctgttttgtgctaaagcctttcaaggtagtccatgtccttctcatttggaggaaatttcaagaaacgtccttaaaagatgtgaaggattgtctcttgccattgtggcaataggaagcatgttggccacaaaagacatgaatcgagtcgatgaattcgagattgttgagcgttctctacaagctgaattgcatggcaataaaaaactgaaaggcatgcaagccatactttcacttagtttaaatgatttgccttaccacttgaagcattgcctcatgtatctaagcttattccctgaggattacttgattaaacacaatgttttgattcgattgtggatttctgaagggtttatagaagaaattgaaggaagatcgttagaagaagtgggacatggttgtttcaatgagcttattaatagaagcttactccaagtgactgaaagatacttagatggaagagttaatagttgtcgagtgcacgatattttaagagaaactatgcttcttaaatcaaaagatcaaagcttcgcaacaataactaataaagagagtagtagaaggctccccaaaagtgtcagaagactatgtgtccatgaaggaacaaaaatagatacattaggggagaatcaactatcccaactgcgttctttgctcgtgttcaccaaagaaattaatgtttcattttctccaaaggggtcaagacttgtcaaggtgttggattgtacaagtgtacccatgaccacatttccaaaagatatcacaaagctataccatttacgatacatgtgtttaagagacaccaatgtaagttcaattccaccttctattgctaatcttagacatcttgaaacactagacctcaaaaatacttttgtacaagagctgcctaaggagattttaagcttagagtgtttacggcatgtaatagtttatgattataaaaattcaccggtaatgcgaggttttaaggctttaaaaggaatggattctctttcttctttgagaaaactaaactgtgttgaggcaaaacttggtgataccgagtttctagtgtccataggaaaactaacacaactgactatgttaggcatcctaaaacttggagctgagcatgtagatgcactattttcttctattcatgaattaaagtttcttagttcattacgtttggattctaggacagaagatgaagtcctcaatttgaagtttaaatcattttcatctcttcgattacttcaaagactatatataactggacgtgtggaaaagtcactagaaggattacaaaaccttacaaacttgtctagattacgtttgactggttgtaggttgctagtagatcctctagagtcattaaaatatttgcccaatttagtattacttgcgtttttgaaatgggagtggctatgttttaaagctgggagtttcttaaagcttgaaaagctctatgttgtagaaatggacaacttaagaagggtgatagtggaagacaaagcattgtctcatctcaaagttatgagtttggagaattgcaaattgctgaacaaattaccatttggaattgaatacctaagaagccttgaatatctttatttggtagatttgtgtgtagaattgacagaaactatatatagtggaagtcaacatgagaactacttaaaagtaaaacacatttcaagtgttttcattggccaggggaatttggaaacaggagttcagggtcgatggctttaagagaagtttttctatgttttactctctggtttgtaaattatattttggcttgtttgcagtgttagaaatactgtaaatctgtatatagccctaattaattcaagagaatcaaacaataaaattaaggaatagcggaag

SEQ ID NO: 296662 - DNA, 2992 bp, Cannabis indica
tttgttgttattttatgttattttgatgtattttatgtaatttttgttgtttttgtattatttttatgagaaattataaaatgtaaaaaaaaaattcttgtaatctttttactgtgtcttatctaattgtctcctaaaaactgcccttatactttcacgaatcactcggcccctctgttgaagcccaattcttcagttaattgcctctccaaaccaaacccttcccagctcagccgtcgagttcccagtcgcccccaccgccttttaccctcgctcgttcgcactcacgcttcggcctcgctcagtcactcgcattaacaagtcaattgagtatgtgtttttattcattctcttgcgtgtttaattgtttatggcatctgtatataatttaatatacaaatgaagcttttctttttccttttctctgatcgtttggctatggaaaacaggagtcttaccacagtgcgtgagtatatgttgtggctatgtaagttttacacttgtacataatttgttttattgtgtacctagttattgggacagtctttttcttctaaatatattttagtttgatttgacagtcttatttgctgcacttgttttttcaatttggataaaatgtttaaactagggaagataggaaaacgagggtcaaacttaaaactcaaaatggtgtatttctttttaatctttcttaattctgttacttttgttttgtgccactggaaaaagtagaaaattttctcttttcatgtttgtttttttgatatgtttgggtttgaataggttaaggagatttagcattgccatagattagcataaagattatctaaacggatgttatcacactgtgtcaaatccctccggcactttaaaatcttgagaaagtcttcagaaactccatggaactttctgtttcattcttcttatgcggacacacccatcaagaaatcaaagcttgctcctcttcaggttgattgatattcttcctctttaagctgtgttgcaacttgaaatcagattgattggctaatgaatatcattatttgtttgtacttcatctattgcaggagaggagaatgatagacaggtttagcttgtatgctaaaggaggtgaaggtggcaatggttgctctagttttcgccgtagccgacatgagtctcgtggcaaacctgatggtgggttataaatgtctttgtgtaatcacgatgttgttgaatgttgtgctacatgtttctagtcaattcaattagtttcaaatcacaatatcttaatgattgttctctttgacgaatatatgaagcacctatagcattgttgatcttttcatttaactctggaacaattgcaggtgggaatggtggaagaggcggtgatgtgatattagaatgctcccccacagtttgggactttagtggtttgcaacatcacgttgtatgtggtatctttgtttccataaatcccaagcaatatatagctaatactccaaactcacaaatctgagttacagttacattgttttgcagaatgcgaatcgaggagggcatggatcctccaagaataagattggaaccagaggagctgataaggttgttatttctaaattgttctgtttgcataccatacacgagttttattattattttttttgtttggtcactcgacttaagccagattgtaacagctccatgtgaaaatattgtacttgttaggttgtccaagtacctgttggcactgtaattcatcttgtaaagggtgaaattccttacgttgttgaaaaagaatcttcaagagagttggatccttgggagattcctggcacactttctaaagatgcatctcaatcagaccagggaattgcccttagtgacccaagtatggcagagaacactagttgttcatctcatgctaaaagaagcatcaaggaattgccaaaagtggagcagagcactcatgttgtatcacctaaattgaattctatttctgcttctgaatcttgctctgaagaagaggatggggaagaaccagaaatgaaatgtaatgtcgcagaactaacagaacaaggtcaaagagtaattgttgcaagtggaggtgagggaggtttgggtaatgtgtctacattcagagtttcaaagaagcctaaaactaaagatcttgtgctccatggggataaagtcactgaagtggaagcatctgatgagagttcgtctctcaacattggcgcacctggttcagaggcagtacttgtattagaactcaaaagcattgctgatgtgagccttgtggggatgccaaatgctggtaaaagcacactattgggtgccatatcaagggcaaagccttctgtagggcactatgttttcactactctgagaccaaatttagggaatctgaattatgatgacatatcaatcaaagtagctgatattcctggactcattaagggtgctcatgaaaaccgaggacttggacatgcattccttcgccacatagagcgcactagggtcatagcttatgtgttggacttggctgttggattggatggaagaaaaggaattccaccatgggaacaactaagagacttagttttagagcttgagcaccatcaagaaggcttatctgatcgactttgtttaatagtggcaaacaaaatcgatgaagaagggacaaatggagtattagaagaactgaaaacaagggtgaaaggtgctcctatatatcctgtttgtgctgttttggaggaaggaatccctgaactcaaagcaggtcttaagcagctcgtggatggtcatatgtcatacaaactcaaaatagatgatatcatagctgactagtttctctggatatgtccttgttgccatttgcaggcaaggtgtagtttctttctcctataaaatcaacataattgatttttaaatggtacttgttttttatataaatttatttctctttcctattcgttttttttaaatagattatttatttatttat

SEQ ID NO: 296663 - DNA, 5263 bp, Cannabis indica
taatttaataaaaaaaattaataaatttatttaatttccaaagctgacgcgcgtatcttatctcatttttataaattaatattaatatattaattaaaaaaaatagtaacaaaatttagcagaaaatccgcaaactgaatgtgaaacgacagctcttcccgacttcacgcgcactcaaatcgcgtgccatttaatctcaagagttcaaacttcaaacgctacgttctatgtgtacagatttaggcacgtgcggaccccatggccccaccacagcgatataaactataatatctaatattaattattttcaaaactaattattattattattattattttcttttgctttcttcacttggaattttcacaagcccattaataaaaggtaccaccttagccgacaatatatatacctatatttatatagagagatacataagaaaaatacaacttagtatatagctatggcgattgacggagtagaagagaagatgatgaaggaggaggtgtttgattcaacaacggcgtcgtttttgctcaaagagttgaaacagagtttcgcctctggtaaaactcggagctatgaatggagagtttcgcagttgaagagtattttaaaatttgttaacgatcacgaacaagatgtggtcgatgctcttcgctctgacctttctaaacctgaattcgaatccgtcatctatgaggttcttactcgattattagttttttttttatgaaataaaaatatcttgataagaatttgaatttttgaagtgttgtttaatgtgtcggtggttataattgtattattttaaattgaatagttactatgaacactcagatactaatctgggtatttggatagttcatagaaatatttttgcaggaatttaagcctaatttaatgccaaatttaagtgtgtgtgcttatatatgaatattgatgacgcatattattggaaaaactttgcattgattgcgggagagaaaagtcatgtcgcaattggtgaaaagataccgaaatttaatattgtggcgtgtgggtgtttttttttatgatgtatagggtgtcttgtatatccacacttacattacatggttttaaaacagctatattttataatttatgtgatactcgatacttaattataacaataataatacgataaagtggtgttagacatcatgtatttttcaatatcaaaccttatttattttactttagtaataattataaaagacctgtaactaattataagatgtcacccttatagaggtgctaggcaccatggtgcctaataccatgctccttatataagtatataattttatcatttttcaagcttgactttaagcattttcagcttttggtatcatgtattgcaagcaagtttacatttttgcaacagtttgactgaatttcagctcttttaatatgctagacaacaaagtttacatatacaattggcataagagcattaattggttgaaactaactgcatagcctttcattacatggttaggaagctttagaactgcgcatttattgcaacaatgagaaacttgttccacctcacttttccaggaagtgatgtcttttatttatttgtttggccttgttaattaatgtctgaactgatattctgtggttggttaagaaaaacagttagactgttgtctgatgtcagagtaacaggaattcacaaataatttcgtactttaggattttttttttcttatttttttttcttttatggtcttaagataaaattaaactcgtttactttattgaattacttaactcgttggctttgtggtggacatgtttgttggcactgaaataagaatgatgtacttcctatattcagggtgccaatttactagagaatggacaattatttcagactttcacagttataatgtgaattcctgatgttatgagaaattcactttctagttcaattttttgttctcacttcagtttatttttcccataacaataaacccttcaacgtattaaatgacaaaaaagtagtagttatccaggaatttgtgagtagctctcatttagttgtggcttcacaatatggtagtctatattggatttctttcttggccttttgcttaatttccttcctatgactattacgcaggtatctatgttaaagaattcatgtaaaggggctcttaagaaactaaaacattggatggtaccggaaaaggtatgtactgtgtcacaggttctcctctgatatatgtgacatgtatttttgcttgtttaattcaatatcatctgttcttttgtaggctaaaacttcaatgaccactttcccttcttcagctgagatagtgtctgaaccattaggtgttgtcttaatcatttcagcatggaactatcctttctgtatgtctaaacatctaaagaactcatttattttgttgttgaaattatggtgtatatgtacttttaaataacttttctaattgtgcaatcttttgtttattagtgctgtccctggatcctgttgttggagctattgcagctggtaatgctgttgttctgaaaccatcagaaattgctccagccacgtcctcattgcttgctaaattactaagtgaatacatggatagatcttgcataagagttgtcgagggagctgttgccgaaacatctgcactgttggagcaaaaatgggaacaaatttgttacacaggttctattcttttccattttgtttcttctcatcttgtgtgatgttgaaatcttggatcaaatcaacttcaatagatacttgtcatttgttggtgcatctaatctaagatgaacattttgtattgataatataccaatgatatctcttcagatgcagctaaagtttctctgctaatctttttttcttaaaatttcacacttagtaataatacaaataattttttgaatattaggcaatgggaaggtaggtcgcattgtgatgcaggctgctgcaaaacaccttacgcctgtacttttggagctcggtggaaaatctccagttgttgttgattcagccgtcaatttacaagtactgaactcttctatattttcagtctttattctgccatatgtcttgctaagatttctatcattaatttcaactcatgctgaaactttttatgtcaaaggttgctgtgaggcggattattgctggcaaatggtgctgtaataatggacaagcttgcatttctcctgattatatcattacaacaaaagattttgctcccaagttggtatgtttcctgatatacagcgttgcaggtctcaatcgacactcagctttatttctttcaaactaaattccttatttttcttcaggtggacactttgaaagaggagttagagaaattttatgggaagaatccattacaatcaaaagatttgtctcgtattgtgaacttaaaccactttgctcgcttgtcaaagctcttggatgatgaaaaggtttctggtaaaatcgtcctaggaggcgaaagaaatgaaaccgaattgtaagttcaatagtttttggtacactatttcatagtagctagttatatcaaattgtttcagtcaattaatgtcccttcaatggcaggaggattgcccccacactcttgttagatgtgccccgagattctctgatcatgagtgaagaaatattcggtcctctgcttccaattattacagtaagaaacagaggacttttacaataatagtcacattgatacaatgacaattcattgtttgatcacaaagtgtttctccttgtttcaacaggttgacaaagtagaagatagttttgatattatcagctcgggaccaaagccccttgcagcatatttatttaccagcaacgaaaagcttaagaagcagtttgttacgacggtatctgctggcggtgtggttgtcaatgacactaccatacatgtaacttttcttctatatctctctcacataattcatgttcacatagtcatttgcaagcatatatgcatacacataaaaccaattaggaagagtgaaacacaagaataagaataagaataggaatctttcaatagcttaatctaagatcatcatcttcaaaagaatctataaaatctttagatatcctattgttcactattctgaagacatttttttttcttcatatggttggtgcagcttgcagttgactcactcccatttggaggagtaggagagagtggaataggttcttaccacgggaaattttctttcgatgcttttagccataaaaaggcagttgtctaccgaagctttcttggcgacgcagcaataaggtacccgccttacacgttaggtaagctaaggctgttaaaggcccttatgggtggtagcatagtacgcataatccgagccttgtttggatggtcttagcaactttgaatacatgtgagagtttgtaacgaagtttttttttccctctatttatggatcttttgttttgattttaaatttgaacacgtttaatttattctggaatcggaaataaaatttgctatttaattgtttgtacactacaacaaatatgttttttccccttgaatttatatatgtattatataactttgatgttgaatttaactttgtatatttatatacacaatttattcagtcttgcggtcttgcccaatctttctttcttttccttttctataagctctaaaaaaaagtggtcctcaaataaaatgaaagtatgactgtaatttaataattttatatgaattattagaataaataaaaatcaagataaataaattgcatatttcacttgcaaaaatttacataagtacgtgtttagagttttttgaaacaatacgtttagagtttacagtaacaagttcctattagttaactgtttttctcatatttattctttctaatttaagataattagatttttaacaagtttctcttatttttatactagggaattaagccgcgccttgcgcggatttgaccctagttttgtaaattttcttttactgattaagtaataccatgattaagtaataccgattaagtaatatattataaaatgtaatattttgatgtatatatatatactaggagaaagctacgtgcaaagtacgtatacttagttttatgataggtgttttataatataaatgagaatgattcaataaataatcatataatttaatttattattatagtctaattgaatttttttaataaagtaatttattcaagaaaaacttattt

SEQ ID NO: 296664 - DNA, 1180 bp, Cannabis indica
ttaaataacatacttgtgagtagatctaagatcctggtaaaataaattccaacaaagtgacttacagagaacatcaagccttcactttagttgagaagatctaaagatgagccataattgataagctcccaatcgtccttcacatagttacaaagtaacgactttctttggtaatgaaaccagagcaagcctttgctcccaaaacgcctgctttgtggggaaggggaagggtgggatcgagaagctatacctcaagaaactcagggttaaaggtaaccttacaaggatcttagatcacacgttttcctttatcttgagccgggttttcaacgaccttctttggggatgaggggacctcgacaataagaactgtcttagtggtagatggaggaggaggagaagttgccttggtatcaaccttctttttttttaggaacattaggctgcttggaagagccatccgtggaagaagatgctcgcttctttcctctttttacaggattagttggattgttgagtgctacctcaaagtctactttaagatccatatctgtaaatttaaaatagagaaaaatgtaaattctaaaaagcaaggataagaataatagtggcgaggacataactcccacctaaattatttttagagggtttaggcaagtggagattgctatgatagttactaaattctttagaaccagtgatcatgtaaagatcgaaggagttaagttgagataagttccaatcccaaatagtatctttatgagaatttgtactatactggtcggtaattccatagtaaaaattgttgctagtcaactaaacatgaaattttggatactaactgtcaaacctatgacatagaagatcgacaaaatttaatatgtcaaagttgtactgcctattaataatttgaagaagatacatttagctgcctaattttttacataagctaaacatccctgggttctaaaataagacacatttagttgcctatttttcaagatctcataaggtgaagtttcgctcttagatttaggaactctattcagaatataacaaacaattaataaaattttaccccaccagtgagatgcagcaccagaattcaacaaaatagccacaactaattcagtaaaggttctattttttttctttctgctttaccattcatttcaagtga

SEQ ID NO: 296665 - DNA, 2078 bp, Cannabis indica
taattgagttggcgcagaatgaagaggtttgtctattttgtctttatttaatttcttatatcaagtcattttagttatggttatagatttttattcacagttcctaaactgcaggttgaatccattgtattgaaaagatatgggagagatgcttacagaatgtttagattgctatcgaagtctggtcatctacttgagacagacaaggtattattaatttttctttcgattctacgtcttatgagtggcatctagcaacatggtagcactttcaacacatcgagtgttaataactatttctgcatcctcacatgtttatcatttatagaaaatgatagtacacttatatttgtttctcattctagattgcagatatgacttttgtcgaaaagaaggagacacccaagattcttaataagctttggcaggatgagtacttgcatatggaggtagatgacttcctttttattttatattttaaacaaatgaaaatgtaaattcgctctaggctatttttaagttggtcaccctttttcatctgcttcggtttctctttcaagtttccagctagtcatattcgttgccttattatatttcaaggaacaaagatttgttgattataaaatttacttgattcttaataactacaatttattggatttgcagaaattagttgtaacagctaccagacaagtatcattcttgttatggaaagtgaataagcctattctctgggatcatgtcctagacgagatgtatcatgcagccttgaatttgaaccaaagattgatttatgagcaagaacagaaagaggtcctaaagaaaaaggctaagctttttttaattttttaggttacttgcatacatatgtttctttctctttaccatttctccttgcattaactctgtttcgttgatgagtatggagttcagaccttcaagtggtcatttttctaatactattacactgcactcttttcagttattttctctccagtcagctacacgtacagggtcgaccaaaaagaccggctgagaaatgcaaagatatatctgcagtcatcacttataaaacttgacgatgctctcatgcttttccatgacttctgaacgcaaagtcccgttccaatcgccttttccatgtatgcttgttgagtgcttaatgttttaatgatttcattacaaatggaaaccccattatgcttttataggtcaccattagtgaatgttcaaatattatatataacttttgatacttcaaattttgaccagaattgggctggaattcctcagctggaatattataggtgccatgaatgggttttgtttgtcttctggtttgaaatggcgcaatatctggttcaagtgccaaagaagaagatatgctctgtttttgttataagaaaactacaacgagcggcaatgaaaggaaaggaaacgtagtcaaaattttaagtgatttttcatcaacctgttatcgcttttgaacctaaaccaactgctgctatattattattactagtttatgtttttatttttctaagaaaatattattagtttatgttatttatttatattttttaaccaagttatttaattcgttttttttttaagtaatatttaaaagagcattgctattaggcactaatggtgtctaacattatgtcacgttacgatcagttagtgatatttcttagaagttattataataaattatatgagatttaatatttagttagactaatagcgatattgatataagaggatattgacataggatattgacataggagggtgctctattcaaaatcatgttatttctgaaagaagatagttaaatttgttatttgtttccataacaaaacgttggaactcggctgagaaaagctggccaatggtttcagtctccattaggctaataggctgtagtttgcattttggtgctataagctgcgaagacattgaaagtccacaatgctcatgctgtgctgtgtgaagttggcatattcattcaattcaatgtgtgttggaatttattttaccaggatcttagatctactcacaagtatgttgattaa

SEQ ID NO: 296666 - DNA, 5000 bp, Cannabis indica
ttacctctttaagatgtgtcattttatttggactgtattaattggaattacaaggtcccttctggccaggtagttactgattgaaatgaaataccggtctggcagtgactcattactcataacttacataattctgtatacgtacatagatagttaagagtccattattattgatgcagaagatcaagaccattcctaaaagaaatagaggacttaaagcaagtgggtgatctggtcatgtataatttgaaatctgttttattaatccaatattaaaataaataatatgtgcatgataatattcttaaatatgagatcaatttgatgaccaaacacgtattaaatgacaagataaactttgtatctaaaaatttgtcttatttcacaaataaaataatccactctacatactacagctttgattttttttttttttccaatcttttctacactttcctctcaattcttaaaatgtgtacttacccaaatctttggttattgttaaggtacacatactaagtatattgagacatgaaaacataaaaaataatgaaaatattttaatacacatgcactcttaaaagaagcagaagggaactttgttaaaaaatgtctgagtggactgtcacaaataatgcatttgcattcatagaactaagcaccaaacttgggaactttagcggttgagatttgagcaaggaagtgttcggccacgattcgccgttgaatctttccggtagcagtcttgggtagggaatcagttatgaagactttcttcgggaccttaaaagttgcaaggtttttcttgcaaaaacgtaaaaccacatcttcgtctacctctgatccttcccttggaattacagcgcaattgatctgacaaaaattgaaacttatatgtaagtaataaaattatggtgtgaaatttaattggggagttttcttatgatatatagttatggggttgagattaatggaccaacctcttcaccatatttatcatcaggtactccaaaagccactgcctgagctatgtccggatgcgacaaaagcactgcatctacttcaattggtgatatcttttcccctgtaaccaaacaaaccaaaccaaatgaaacactatttaatgcattttctttcaaaataaagaaatattaaacttctttttagtgattgataggttatgacattgtatcacacgcaaaagctcataaagctcttattgtaaaagtcataacaaagaaaacaaaccacactcaaaatgtcaaaaggggtacctcatattttaaactttattctacagaaagctatgttgagttgtttacttgcataatttaaataaatataattaaaactcgaattattagacaaaaaaaatatatacctccacggttgataagctccttaatccggccaaccaggtgcaaataaccatcttcatcgaaataaccgacatcaccggtatgaaaccacccgaattgaaaagctgccttgttagcttcagggttgttcttgtaacccttggttacattgggccctctaatacagacctcgccactgaccccagctaattgggccgacccattttggtccaaaatcgccatctcttggcccacgggcttaccaactgagcctggtttgtggcccccatcttccggcaatgggtttgaagccattaaatgagcggcttccgtcattgcatacgcctccaaaaccggcgcgccaaatgactcctcaagccgagccattatggacggtgctaacgaagcgctgcagctccgaatgaaccgcaacttcgggtaagttggctcaggcttgttgaggtggcgttcgagaataatctggtgaatcgtagggaccgctgtgtaccacgtggcgttgcaagcgatcatgtccgaccaaaacgtcgaggcggagaatctcccggcggcaggcagagtcacggaggctccggcgatgagcgagctcagcaatccggcgatcattccgtgtacgtggaataaagggagaaccactacggtcgagtcggactcagtgagtttgtacaccgattttatgttttgaacagacgaagccaagttgagttgcgttaggggaactcccttcgggcgactcgtcgtgccagaggtgtggaggaagagtgccacgtcagacggatcgtttgtgatttccgccaccgagtcgaggcttgactcgttattggcagaagaagagagggctataaggccgtcgccgcttccgggtagggtggcagtcacgcgaataatgttgagtttcgaagccgcggcatgagccgcctcaattccttcaggccccgtaatgagtagttttgattctgagtcagagaggtagaactcgaactcctcagctgtgtaagccgcgttcaacggcgccgctacggctcggcatctaatcacagctaagaacatcacaatatactgccaaacaaacggaaatcgtacgttactcaaccctgtttggccgcctagaaaacgtcgaaaagaagaaagaaaaataaaaaatgaaagtttcaatttttacataatatatacctcgacggtgttaggaaaagtgagagcaaccacgtcgccatggccgatgccggaagcgagtaagagagaagccgcgtgatcaacaatctcttgtaatcgagcatgagtcaaatggtatttaccggataatgaaatagctcgtcgatcgggaaattctacggcggccttcttcaacaaaccagtcaaggttagattatttgccatttttattatcccttttttcaaatcgtaaatctgtattttcagaaataacttaagaaatttctatgaatatataaataaatattgagaaatagtaataatagttgtttcaaacttgaaaacagaggtgaaatcggtttgagtggagcggcatggaaggggttatggaggttttatatacatacgaggaacaggaaggaaaggaagtataggtgagttgtggttgcaatttgcaaattgaactgggagaggtaaaatacacgtggcaaaattgaacggtcagattgagtgtgcgaggcatagaaaagcgtgctttccacgaatctctgctgtgtcgtattatggagacacttgtactcactcaccactgtggcaaaacgacgacggtttcacccatcatcagtggttgtccatccatgctgatgcttgtcgtttctggaagaaaaaaggtgggaccctaactccccaaacctttagtagacggctcgtgacgatattgcttagaaaagattttcagattttctaaaaccacgtaaaatatctcataaatagtttttttttattatgtgaatatctcataaatagttagatgctacactccaccaaaaattttacataattttttttttttcgaaaaggaaattttacataatttaatccacaaaaatttgtaccataaatgctttatgtttttgatgtgatatactcatatattatacatttttttttaggaatgaaatattaaatattaatctctatttatttttgtcaatactattttgttaaagagcattgctattaggcacttgtggtgtctaacaccttctcgacatgtcatgttacgattggctagcgatactccctaaaagctattatattaaactatgtgagacccgatacttaattgaactaatagcgatactgacacataagaaggtgctaagtaccactgatgccctttagcatttctctttgttaaatgttgattgtgtttactaagtgatatctctcaacattattatactcgatttttgtgaaatcaataaagttacacataacaactttgaccaagactagcgagaactaaataaggttgggatatcaaaccaatcacttagcgtggggactcacacctaaggatatcaaacctatcatgggcccacacaaggattttcactctaaagaacttgactcatcaaggtacaaggaggctaatactcgaacatggagtaaaaattgcacaagaacttcctttcaaattaagaaagggaaggagatacttggccaaatgtgtctttccaatatcaaaagacataaaacaagtgagaaaagctaccaagtggtggagaaccatgataggcgatctgtgccatctttgtgacccaaaaaatggcacaactcgccaccattaaatggctaatgggaacttggtcatatgtgtttgtccaacatcaagatacataaatcaagaaagaaagaccaccaaatggtcctctatggtgataggcgacctgtgtgatctttttggcaaaaaagatggcataactcacaaactagggctttgagcaccaaactagggctagatcacttctccatgactaactccaaaggagctcgtatgccttctagacatggcattcttttattcaaggaacagtgtcctactgatcccaaagagatagaatacatgagaagaattctttattctagtctgttgactccccaaaattgctaagtataatttttggagatctctagattaatgagaggaaaaatttcaaagtacactttaaaagtgtatgagcaagaaaataagagcccaactaccaaggcgagacaccatttaagagggagagccaacatgaggagaggcccaagcataggtggagctccctgcataagaagctccccactccactccttctcccctgctctctctgcccgcttcctctctctctccttgttcccactctctccttctcccccgctctctatctctccatgttcctaatctctctctccctgctctctatctccatctcctcactcattcactcccctagtcaccaactaataccacttgctccatacaaaggagtaataatacttagagtatatatgttgcaatggagtgactgccagaagggattaaggaggaagttcctactaagtctaagcaacaaaactcacctctcatgggcctatcacttagttaaatttcctaagtgttatatgttgggttttatgccc

SEQ ID NO: 296667 - DNA, 1736 bp, Cannabis indica
atggacagctaactactttaattaatatacatgtgaacagtatattatttattggctcacaatgtatgagattatgatcatggatttgaatactttggcattaatttacttatattctcaacgtggatttatatgaatatcatgatcatattattatatatatataaataatatcatattattttaatacaattaatttcttgatctatacaattttattagtaatattcaattttatgaatttcactttaataaacaaataatgttaacaaaacttgtttttgaaaaataattaaacaaatgtaataactgctcgaaaaaattacatccgtaggtataataattatattttagtattattatatatatacacacattattgcatggaagtaaattttttcactaaatatatatgacaaaaatattgtatatattttttgttattgaaagttatatctatacataatatatatagctatggtgtatagttaataattttaataattgaagtaagatctaataattaacaatatgagattcaaattcacaattcttttcttatgttcatttcatacagtcacaatactctatatatatagtgacacacatttatgtgacaagtttttttatgtgtattactctatattatagttataaaatacatatgataattctatatattaactgttttttttattattattttgtatagtttgtgatggtgatattgaaagggtcagtgagcatatcatttggtgggaacaaagagccagcagcgtacgcagaggtagtgactatgggcggccttaactcggcagtgaagaagcggctcatctcaacactcggcgctattcttcattccaaattaaacgttccaccgcctcgatttttcctcaaggctttcgacactacagctgggcggacttctactacttctaactcctcaaaattatgactaacttatcgttcaatttcgagcaatatatagcattatcaatgtaataccttatatatttctttactttgctctaaaataaaatggtgccactaattagaaataagctaactgcattaagaaaaaaaaaacttatatatgaatcacctttgaaaaattatgtataaaattgtatgagctagctagcttttttcactagagcctaacaataatatattgttaagcattagtgttgtaccctttttaattaatataatatgtataataaggaaataaattataagctatatataattttggataatgttgtatttatatatatgcataatattgtattcataattattgggacaaaataaaattgttagaacatattgatagatatttttagaatataaaaaggttgtaatttttatataattacagggcttttataaatttttagaaaattctaaataatttaaaatgtcaatcaaaattaatattcaaaaaattatttattaccgcttcaaattaaatataagtatttatttgtaacaaaaaattaaatttaagtatttataccacaaattacttttaatttcaccaacaacaatatactattttagataatgacaaaaataagctttaaacaactacttaccacacgtataaaaataaaaagggtaaatactattttggatcctctattttacaaaagttaccaattacaccttgtcttttgttaaattacaaaatggaccttgtattttctaaaatagtacaaataggatcctgaatt

SEQ ID NO: 296668 - DNA, 5975 bp, Cannabis indica
gggggtatataactcagatggtagagctctgctcttgcaattgggtcgttgcgattacgggttagaagtagctaagcagtctcgcataaaataattagaatacacataggactttagtataaaaagactttaaagaatatggggttagatggaataactctaaaaacatgcatggttaatctacgtgggttcacaggttatagcgtcacaagtttgggtacagtcgagctccccttcacaatgagagactcacatttattagtgactttaatgcaagaattcttagtagttgacattccctcggtctataacttgattatgggtcacctaaaactgactgaactgggggcaattagttcaataaaacgttcccaactcagaatggggtacgaattgtaaaggcgaccagttgttagcacgagagtctacaacattaagttgagggatagagccaagtctcgtcaaatgatggttgtgataagtaaagaaattgagaaaggagaggagggtttgtaccctagaatgggtgaagagaaatctcagctcgagccgatagaagagttggaataagtattactcgatcctaatgaccctaccaaaattgtaaaaaatgataaaggtttaggggaagagttgaagtagcaagtaatacacttcctaatgccaaatcaggatcaattggtctggagccattcaaacatggtcgggattgaaccgaatgtcataagccatcaccttaatattgaccctcaccatcctctaaagcaactgaaaagatggcttctcgattcagagaggtagaatgcattgaaagaagaggttgacaagtcattaactaatgacttcatacaagaagcattttatccacaatgagtttcaaacccagtgttagtgccaaagccaaatgggacttggagaatttgcattgattttttcaacctaaacaaagcatgtccaaaggattgcttcccattactaagaattgatcaactcattgatgtcactgcaaggcatgagctcatgtcctttatggatgcttattacgaatataactagataaagacgaatgtcactgatcaggagcatacaagcttcattacaaacatgggattattgttactaggttatgccctttggtgtaaagaatgcaggagccacgtatcaatgcctcgtaaatgacatgtttgagaatcagataagttagaacaaggaggtatacatggacaatatactcatgaattcaatcaagagcggtgatcatgtgattgacctcgcaaaatgtttctcaatcttaaggaggtacaacatgaagttaaacccaaagaaatgctcttttggaatttcttttaaaaagtttcttggtttcatagtaaacgcgaggggaatcaaagccaatccaaaaaaataaagactttgcttaatatgccctcccctaagaaaccaaaagaagttcaatccttaactaggaaaatggcaacactgaattgattaatctcgaagtcaataaataaaggtttgccattcttcaatatattatgaggcaatgaacgatttaaaaggataaaagaatgcgagaaagcattccagaggataaaagaacatttttacactctatcagtgctctcaagaccaatagctggtgaagttttatatctgtatttatcaatcttaaagaatgcaataagtgcaatactagtgcgagaagagggaaaagccctgttaaccagaaactttccctggtgatgtggacatacatatttgacatgtggcatgaacgatgatgtcatggaatttagtagacctgagtcatagcagtcgacttgggaggggaccctagccctgcgctcaggatgacttcgggatctctaggttgacaatcaacctaggatgctgccttcaattgctcaaataccaaaattgatgcaaccattgaatccagaatgctcaaaaatagggtaggagacctcatcctcaagttcaaaatccttggaagtatcaaaaacaagatcctaggagcttgggagtaaaaacgcagcgtccaggttgacaagtggcctggtgcgctgggttctacttatccgattctgatgtcgtatcgaccgtccatctagtttttcgcaataacaaagatccatgaagttagagaagtaaaattcacaaatttgcatttctcatttccaactcactcggaaatgaagagttttgagtctatcatttccgcagaacagcaatatctccgagaattggtgaccaactttgccaaaacacagaaacaggctaagtgatgtcaaaatatcacttatgcatcttaaagtacatcccttggatttttttttacttacccaacgtccaagttgacgtcatatgtcaacctaggcattggaaagtcaacctgggcgctaaatgttaacctgggcgctgggtcgatgaactgctttcaataaagcagtcataactcactcaattttgaattcaacttgcgttttgaagctaattcagtgatctatgaagccatatctcacactccaatcgtaattttgaatctattatcgttaaatttcacctcaagggagttacaaaataagctttgggctactgtagcgggacccgtcgagctccaaaaaatggtcatcaccaccaagagataattttcacaattagatcatcatcaatggtcaaaaacatcttatttgtattttcttcctatttttgtgggcctcctcaactataaaaggagagcttcataagctcatttttcacattcagaaaaatacccacaaggtcagagcttctctctctagaaattagagcttctaacacttagtatttttctataaattaccatctcgtgagaaataaaaactcaaagtagacgtagctccattactatcatgataaaggaagtgaattactataaatttgttgtgtctctcttataattacttaactacttattcattctcagcaatctagcgagcgagtgtagcttagaagtctagtccaaatttttaagtcaatatcttggtgctttcattgagagccacaactcaagaaagttaataacacggtggttacaacatgttatacaagtgttgataaacaaagtttaacaactggcaaagcaactgggttgctaagatgagaactgagactacttttgcgctccaagtgccagaagcaagcctcagagccaactcaacaactcatcctccaaagccaccaaacctctcgagactaacaccaacgaccagatcccacctggtgagtctcatctggatattgatgaccctgaggggaggctaatcctcgggtcgcctaactcaaccaaattgtggctgacttgcaataacagctgcgagactctctcgataagcaacatgaacagtttcaacactggatcatggaaaactagaggaacattgaaagccaacacgttgggcaggaacaatggagagctaaccgatctcaatagattagagaagcttattgctctaatagtggaactacctcctgtaggggtttttttgagttggtgagaaagactccccgtcgaccaattggtcatgtgggaactagtgctcaaggtgaaacccttaacactcggaacaccactattagacttggtaaccgagcaagtactaagcaaacaccaggagtggagacctccaagagggaaattgtctttgaacaaaagcctgagagggcttaagctcgtgggcaccaaccaatgggccctccaccaagatgctatatcacacttgatgaggaggaggcactttcatttttcaaaatcataccctcagccaggtgtgattttggacacaacacttccacaattcctcagtggcatttaggggtgtcacagaggtgacagaagtacctttgaatgaccaaatgcagtgatccaatactatttgggtatggagggttgttacatgccatgttggaaggattaaggctacttatacttcgtcctgcacttcgaaagacaaaaacattgggtggctgttgaggtagacattgataattggcagattcgggtgtacgataatgatatgtcgtgcaccagcaatgaagaatttgaagccattatgctaccttggactgagctgtttccacatctgctgaggtcaactggctattacgatgtcaacagttacattctcaatgtagagttaggggagagtagccaactcagatcaatgcatgctaaacgcatgccaagtgaggtggttccccaaagtaaagcaaggtaatttttattaatatagtatattaatatttcccttgccattagtctctaaatgtatattagtatctaaatgtattgttttatatttttcagtggtgattgcgtggtatatgccattaaggacatcgaacacctcatgatgaatcgatcattggagaagattactgatgataacatgagaatgttcagaaatcggtggtgtgtagacttgttgttaccaaaacttgacgtggtaaatatttacaattatagagggttgtcttttttttttatatatatttttagaactctttaattacaattgtatagacatagttatttttatatctgtaaagtttcatgtcgataaactgttgctagaatgtcgtgaaacattgataacgaatcatgtttctctttgttatgttacatgtcgatgattgtcgctaaaatatcgtgaaatatcgaaaacaaatcatgtttctatctatttagtgtcatgtcgataaaatatcactaaaatgtcgtgaaatatcgataacaaatcatgtttacatttgtttagtgttatgtcgataaaatgttgcaaaaatgttgataacaaaacaagtttcgacatttattggtaattaatttcttacatttattatccccgcctaactaactacttcaatatgtcgataataatgtcgctaacatgtcagtataacaacatgtaaatcgagaacatgtcgcatggtgtcgcgacatatcgcaaaatgttgccagattgttttgtgtatgacaaacacgtgtagaactgtgtaattcattttttacatttattatcccaccttcacaactactagcaattttctactttataagttacatatttttcttattatttaaccctagaaggtaattctcttagaagttctaaatgtctactagaaggaacaagggcaaatacttaattctaactcctgaagagatcaagcaggagcctgattgtggcgaaattatgcctcaaatgcaaaaagttctagacaacatgaaacgttttcaaaatgaacaggttttgaacgagtggaggtacctacaacttgaaaaaaaattcacaaaataaatgtatgaccggctccaccaccagggttccccgaaggctgtcgtcgttgcaaattaggttattttaatggtaaacaggtgaagcctggatctttatgcaagtattgcaagtctcacccaaaaggcaacgaattttaattttaatttaatttatgtaatcgcgaaaagtcgctaatgtaatcgtgaaacgtcgcaatatatcgacatttttccaaaataaaataaatgttccatccatatcgcataatgtcgctacatatcacaaaatgtcgtgaaatatcaccattataaaaaatctaaaaaaaagtttttcttgttcttgccatgtcgacaagatcatcgacatatatcgtgaaaatgtcgttaaacatagacagagacaattattattcttcttgtggccatgtcgataatgttatcgatgtgtatcgagatatgtcgttaaacaaccacatacacagacacaaaatatcgaaacatgtcgataaatgtcgttaaaacatacgcaggcacaaaaaactacaaaatagatgtcataaaccataatattaatgcatgcaattaaaaaactaaaatgatgctcaaaccctgaccttgcatgtagctttgttgtgtcccaatgcgccacagtttgaac

SEQ ID NO: 296669 - DNA, 5819 bp, Cannabis indica
gtcttgccctagtctgagactggttgcatgcgcttgtcaagcaatgtgttatgtatatttatcggcaatctgttttgcaatgtcgctctaatgtaatgcttgtgtttaggttgatgagtttggtgcagtaatatgtgaagttgaagttcattaattaaggcaacatgggatttgacaacgagtgcatattgaacattcaatctcttgctggagagtacttctgtcccgtttgtcgtctgcttgtatatccaaatgaagcgttgcaatcgcaatgtacccatctatattgcaagccttgtttagcttatgttgtgaaaactactcaagcttgtccctatgacggctacttggtcacagaagcagattccaaggttccttctttttgttatttatttatgtcttatttgtgataattatcttttgggtagaattgcagacattaaccttaaattgtttgttgcagccacttagtgaatcaaataaggctcttgctgaaaccataggaaaaatatcagttcattgcctatatcataggagcggttgcacatggcagggatctttatctgattgtacatctcattgttttgaatgtgccttcggaaattctcctgttgtatgtaataggtgtgcaattcagattgtgcatcgtcaagtacaggagcatgcccaaaattgcccggtgagtgtccatttttaaaagtgaaagcttaagaactatttttctttcgaagaaataaacgacttttagcgctttttttgactcatttgcaacattgttcaacgacagggcgtgcaggctcaggcacagcaggtagtgggtgctgcagaaacttcagccgctggcacagcaagtactactgatcagccccaaactgctactcaggtagcagttgtgacttctcaggtccagccttctcaaactacagctgcgacggctcctgggaaggatctcaatcaacagtcaatttcaagctcccaaacccaagctgttgtgcctactactgaacaatggtatcatcaacagcagcagtatcaacaatattaccagcagtatcctgggtatgacttgtatcaacagcaatatcaacagttttatccataccaacaagccgcagctccacaataccagcagcagtatgcgcaggcccaagcaccacattcttctgttcaaaatcaatcccaggcgtacatgcaacctcaaccccaaccccaaccgctggctgcagtggctactcaacctcaaaatcaaccccaaattatgcttccgcagcaagggcaacatgcagtcctaccacaatctcaaactcaaccacagacttatccactggcccatggaaatcctcagcctcagccatattcccaaaaccagctacatccacatcctcattctcaacatgtgcaaatgccgcaatatatgcagcctccttctcagctgcaaagtaagcaacagacccaatcacaagtccagcctctgtatcatcccccttctcagcctcatttgctttcacaaagtcagcaacctgggcaacttcagcataatcttcagcagaaccagcctcttaatactaatttgcagtctcagacacagcttgcatcaacccatgcagtgacaagtcatcaatcatatcttcagcctaacattgaccctcaagtgcagagtggaacatcacaacaatatgcagtgcatgggcagtcacaaaatcctgctcagatgcagagtcagtaccctcaacaacttccagtgatgcgtcctctactttcttatgctacaattccaggccagcagcagccagctttggtaccttcaccaggtcaagtccagaacatcccttctgcagaacaacagttaatccaatcacattttcaacaaccagggcaaccagtccaccaacgtcctgttgtgcagccagctcaaccaactttttctcagcaacattatcaacaacaactacctatgtcatcccagttgcgtcctcagggacaatctcatctttttcccactcaaacttatccttattcacagctatcacaaaatgttgccctatcacatggcatgcaacatgctaaaccctcaaactcagttgtaaggccttccatgcctaatcagggagtacaatctcaattgtattcgcagcatgctggtggtcttgttaggccagtgtatcctggagtaaatcaacaatccgcaagtcataatagtatgcttatagcaaataaccagatgcaacccccttcggaacaacattccgctatgaactcaaaattaacaatggctgaaaaaaaagtggatcacacatctgataaaggaacgacccagaatgaagctgaagtttccttgcaagtaagtgtagaaattggtgggaatgatacagcagctagagtcagcgagatggcgattgaaaagcctgaaactgatattaagtcattggacgctaatcaagtgggtacaacttctaaggaattttcagagtctacaaagctgctggaatcagagaatggagaacctaaatctaagccaataatgaaagaaggtagcctagaaaacactacagggcatttgaataaaggcgatcaaagtgaagtggttgctgaggacacaaaagatggtaataaggtagggcctgggaaattgaatcactcaattgtagaagataagatgactgtggatggctctccaaacaagccaagtaacttgcaaggagaatcaactcaaaatgttactttaagtcgtccacaagttggagttgatgaaaacaggcaatctagtcaggtgctacctggtggttttgtagaaccttctcattcttttcctgaccagggaaagcatcagctgttaccatcacattttggcccttctattccacaaaggcctggcggtccttctttattacaagtacctccagggctaggcccccctcaaacttattttaggcctcaaagacctagacatgcacctgaactccggccaccaagtagtataagagggcctcacctctccaatactggttcttacaagacatctcaaggtgaacctattggagctccaacatctggtgtattgccgcatcgcccatttgatttacatggtgggacgatggctagaacaatgcctcatgcttctgactttccaaatcaaaggcccaattacatggatggtagggggcttaatccccacattcctgggtcattggagcagagaacatttactcagccgtccaatgctaatatggtgaggataaatggcaatgtgggttttgattcctcatcagcaattgggttacctgttcaagatgaacggtttgattcctttcctccaggtccaaaacatcgtgtttctgatcaaacggagtttgagcatgatcttaagcacttccctaggccttctctggatgctgaaactatgccaaagtttgggagtctatcttctaggccctttaataggacagtccatgatctgaattttgataatggattaaatgtggatcctgcggtgggccctgttccttcaagatttatttcttcctacaatgatggtggttctaatgatgtaggagagagaccaggtggccatcatgaagatgtttttggaagaagagagcccactcgtggtcatcttgatttttatgggccaggtcctgcacatggttggcatcatatggacagtttggctatgcgaagtccgggtagagaacaacctggtgtctctgtgcatggatttagaggcacaagttctgatgacattcgtggcagggaagtacatcgatttggtgaaccatttagaaattcatttcgtgatagtaggttgtcgatgttgcctagccatttgcgcaggagtgagtttgagggtctgggtaacattggaatgggcaatcgcttaaggcatggtttgattgggcaaggtggttttccaaatcctcttcacaggggggaacctatggataagtttcatggtgcttcatattttggagagccagatggtattggaacccatccacgtcatgcaaggataagggaaatgggacctgggagttttgactcatttggtggtgatgataggtcaaatcatccacactttggtgagcctggattcaggagcagctttgcatttcatgggtttccaaacgacggtgacatttatacagttgagtgtttttctcctgcaaccatttgtcttataaattttctcatttagcttagcctctttaggataatgttattttattttaacttaaagttcccagtatagtattagttctctttttgtgcataaattgctttctagtatctatttttacaaattgcttgtcaatacacatgcacacacacaaacacatttatatacttaaataatgagtttgtgacagggagacctagcgattgacaaatcaagaaagagaaaaccaccaagcatgggatggtgtcggatatgtaaagttgactgtgaaacagttgaaggtttggatttgcattcacaaacaagagagcaccagaaaatggctatggacatggtattaactatcaagcagaatgctaaaaagcaaaaaatgtatgtatcatgtattttttgatgtttgcatgtttatcttttaccctttatattataggtttagagaacttattatactttctcctgtccattgttgtcagcacttctggtgatcagtcctcacttggagatgcaagcaagtcaaaggatactaaatctgaggccgtggaggaaaaagctactttatgatggctcttcaattggatttactcactcgtctcttcctgtgggtggtttatggtagttgtcatttcaggttgctgccatattaatcgaggtggtttttggaacagaagttcaatggcagttaagtttacattttttttaatatatactagcccctagatattataggtttttttcccgatctatagtttgtgacagtagcattatcatgatgaatgtagtataatgatatcacttcatttgttcatttgttgctggtcaccaatagaattttgctggtattttttttacttttcaattagttttttagcattttgctcacatacaatatatgatataacagaatttatgttacccaacatgtagtcctatcctttccttcctcactcctctcatttggtgcttcttgtaattgtgccactttttgtgtaaccaaccttgcttttcaaacttctctgcaggctatcctgtggtccaatagatttctcatgtcccatggttttgtattgcaatgcaatttctactctttccctagccttttttttgctgcatcctgtgccatttatgaagttgttgaaggtgcaactactcgttctactgacatagcaaaaccttttacgtatttaagaaaaccggttgattatatatgtgaggatgtgacttttctatatcataaacaactttccaagtttggattgtttaggagggggtatattttggtcctctttgaacattgtgtatatatatatatttgataaatctttcaacaatatatttacttatccaaagattccaaacaacaatatgatatatatggttgtagtgccaaatagatgaaaatgtatattaatcaatgcacaatagaaaggagaaaaagggatgtcgtgcactgcaaaactggaaggtataattatgtcattagagcataacattataagaactacaatgacttgacttagtattaattaccgaaaatgaaaaatatacaaattgttgctgatgatggcggtgagcagcagccctgatatctcctttttttttccttcttgtccttttcttttttctcttttttatttttttgtttttt

SEQ ID NO: 296670 - DNA, 8424 bp, Cannabis indica
attgaaaaagcactgtagcgtgccttagtattagggtgttgcattcgtattgttggatgtaactgtgttttcttagatacaattttagccattgatctgaggtcacgcgaatcactgtctttgttgtataaataaagtaaaaaatttccatttaacacttttgcccaaattttattctgagttggaattttattctggtgaatgaaacactatttcaatgagtgtcttcatcttcttctttcagtccgtgcacgagaatacccaggagcatcgcccctagtcgtactcattgaatctttgactccattggaacacctggatcttcaagcagagatcaaagtgctcattaataaagcttgttcccttcaaactaggcatgtgcaccttgaccaaccttcctcggcagaagttctttaagactgtcgtacgatatttgaattcactctctaaatcctcagcctttctcgagttcttctgtaatgccctaatatctagggacgtcacgtgtgtaattttataaactagtttagtactaatagatttaataataaaatctatgataatattaaaaactttactaaaagaaaatactcaaaacggatatcataacgacactaaaagtaatccccatcccatttaatattcagggacaaaaagtaattatcgttccccatttagacaggaaatccctgcctcattaggagtaggtccctgcaaggcctattcccgtgggagaaatttacctgtaaaagttccaatggccactacgaataacttgtaatgaagccaaaagaaaatttactaattttgactcaacagctccaatttgatacctcgtcattgttttcacccatgctactctcaaaaaagctttcaacccatgcttcatattactgttataacttgttttcttttcatatgtataattaggaggaaaatgagagggagaaattaattagttaccatggaaacctaacaggtgcattcgtttttgagaattagatcatctctaagccaagaatttcttgatttagagttaagaagacctaagtccttaacaaaatcccagtagagctgatagattgtagccaccacatgagtgaccaagactattgaaaaccataagggatcatagtgaggctaccttgaataagtgtaactagctctagcaaccactattgaagacacatacttgcccatgttagccaaatgtgtgggatcacactcgtcaaaccatcgtcttgcacacccacatgcacaactaattagttataattgatcattgtcttcttcgcatgaacaggttgcatccatatataaacatttgcaaattcagcaatgcaaatgcactgtatatgtgcataattaattagttataatagttttagtttagatttgtagttactaattatcatatattattatatttagtttttgattcttaaatcttcacaaatttctttgagtgcttacacgaaatgaagaggaagcatctcccattgtcgatctacttcttcttcctccacgtcagtgtgtttcatgtttgtcttcatcaggttcgttggtgagttagttgtcgctttgtctgcttcatcgtcaacctcatctctctcctcatcgatgggttggtcctcgtctctgtctggtttagttttataggactacttttttcttttcattttttttgagttcagatttgtagagaagatgaaggtgctacgattgggagagaatgaatcgactgggtttaagtttcccttttttaatttattaaatttattttaggaatattaattttaattgattagagatatattatgaatattaagttttaagttttttatttttacaaaatatttaacaaacaaaaaaatgggatttaataagggcctcacacgtgtacaatatttcacacctaatagaagtagtgacgaaaaggtgtaaaatacaatgttttgtatttattttttttttttttggagaaaaaggtaatctttattcaaactaaatccgccaaaataatgtcaagcagtaatgtcgaagtattactagcaataatctgacaacctgacaaagaatgagagttgtgagcaatgaaacgggcagctctattcgcagatcttggaataaaaaaatatataacattaacaagagagtttaataagagcttgcaatcctcgacaattaaaccaaatggagatggcatttcaactgaaccattaagtgcctggattgaatttattcgtctccacaataacattgatccaatgcttaatcgtcgcccaacttaaggcctccttgatacacataattttagcaagaaccggttgaggagaaccgatcctatgcagagcgaaaccttcaaggatgtgaccatcactgtcaagggcaagagcaccaccaccaaaagcaccctcaacaacaaatagcgcaccgtctacatttattttaataaaatcagttgctggtttataccaaatcacaacaccattggctgggccaaagggtacccaaagaggatcaaagcatcgttcacgggcatgtttccattgctggagcactgacttagcaacatagacggtggcagcagcaaagttggacttgaatcgccataacaaattatttctccccttccaaactgcccaagcagttgcaacaggatcttcaacaacagatacgggttgagtgtccaccaaaccagcaaaccaacttgagaactcagctgtacggagattatgagaagccacaccagtgaggttccaacaagacattgtgaaagtgaaattaacgaacacataggagatggatttctcagcaacatcacaaaacacacaattgatttccactggcaaatgttttgtttaagttgagtgcgtgtggggaggcagcctgttaacgccttccacaagaagtggtgaattttgggtggaagattcaacttccatagcttgctccaacaaaatgaatttggtgtagaaacaatatttgtaaaaagttatacgcactcttaacaaagtataaacccgtgttctccaaagaccaaaaccagcagtccattgcaaccaaatcactaagaggaataccaagaatcaactcttgatctctctctataaacaagtcttgaacaacctccacatctcattctctcctaccaatctgcatcagactatcaacaatagtaaaattgtcaagactaggtacaattgtcatgacaaaaggatgggtatcatgtgaaagccaaggatcacccacaatacaaactaaaatgctagcccctatactaacacgcgccccagcagtaatcaaatcgttagtctcatgaatgttgcaccaaataaagctcgaattattgcaagatcagtagacaagaaattaccatagggaaagtacctagctttatacacccgtcttacaagggagttatcatttgtcaatagcttccaaccttgtttaccaagaagagaaagattataatcatgtaggttatgaaagccaaaaccaccattattcttgctaacacagaggcgcttccagctcatccaagaaacccctctataattctttgaattagaatgccaccagtacttagccatcaatttttttaactcaccacaggtttcaaggggtaaaaagaagacgaacatggcataactaggaagagcttgtgtcgctgtcttaatgagcacctccttacccacttgtgataaaaatcttccttcccaactattgatatttttctacatttcttccttaaggaaattcaaaattattgtcttcttctgactcataatacaagggagaccaagatagagattatttttatccgcctcagtcatagcaagcaagccacaaactcattgcctcgttcccaaagaagtatttgagctaaagaagatggaagatttcccatagttaactttttgtccagaagcttcctcaaacagcccaagtaagcaaattgcattcgaagcttcacgctcagtagcccaacaatagatataactatcataggcaaaaaccatgtgggaaataatggggccccgttagccactttacagcctttaatatcaccattcagctcaaaatgttttattaaagaagagaagccttcaacatagagtaagaataaatgcggggataatggatctccttgtctaatgcccctatgagggataattggccccaactcccgaccatcatgagtcaccttatagtggaccgagtaaaccgtagccaaaattaggtcaaccaaatgattagcaaagcccatctttaacatcatggcatgaagaaaaccccattcaatacgatcataggccttgctaagatccaacttgatggccatgaaaccctctttcccttgcctcttcctcttaagataatgcataacctcgaaagataccataatgttatcagaaattaatcttcctagtacgaaagcactttaagtgtcggagataaccatagggagaacaaccttaagactgttagtgaggacttttgaaataacgttatacaaaacattacatagtgaaattggtctcagatcacccatattaacaagtcatttcttcttcgggatcaacactatgtttgtattattaagcccatcaggaagcgtaccaaataaaagaaattctttactagctgaatcacattgttgccaacaatactccaacacttttaatagaatcccggggggaccaggggatttatcagggtgcatttgaaaaagaaccttctaaacttcctcatccgagacaagggccaataaattagcattattctcctaagaaatcttggggtgaatacaatccacaaaatgttgccaatgagaagaacttgagaaaaatagatcattaaaatgttcagacacaaccttagtcagacccaaatcccagtcaacccaaacacccgaggaattctaaagcttaattatagtattattcttcttgcgagaagtagctttggcataaaaaaactttacaattttgattgccttcacagagccataattgcttagagcgctggtgccaaaagacttctttttgagtgtaaatttcaaccaaattcttctttgctttagcataatgtaaagtagagtttgtgtcacaaagcgacttattcgctccttaaaatttccagtgtaatcacgatcccaactaaatagcttatcgccacaagcttttattttcaccataatgtcacaattagcacacatttcccacatgtcttgaacaacttagacgcaaagaggctatcggagccaagcattttcaaaacgaaattgcttaaccttggagacaaattttatggctgaaggattaggagaattgggcaatggtcaaaaactgacacctccaagctaaacagttaagcagagttaaaaatagccaaccaactatcactaaccaaagctcgattcaatcgtaactcagtccagcttgcaccgcctttacctctttcccatgtgtatggataacctgtaagaggcaaatcatgtagagaacaatccaacaaagtctgattaaaaccatcaatcagccaactaggatatggatcaccaccctttttatccccattacaagtgatattgtttaagtcaccaattatacaccaaggaagaggacaaccatcctttaagttgcgaaaataggtccaggttttgtgtctaaaagttttattcggttccccatacaacccagtaaagcgccaactcaaatagcttccaatttgaacaatgacatcaatatggttatgagagtagctcaacaagttaacctcttccttatgacgtcaaaataaagccacaccaccgctacgatcccctaggctcaacaccaaaaacgcctttgaaacccaattgaacccataatcgttctaacacctccttcctactaattgtttcacaaagaaaaataaaattgggcttcttatagacagcaacgcctaaaaggaattgtgaagtctatcgattcccaagcccacaacaattccagcttaaaagattcataatgtttggtgagcctagataccagtacccaccatggacccatttttttaaaactgaatctccattttgaacagctgccaagtcttccatttgacactcaccatcaccaaccccatcacaatgggcctcatacccaacaaactcagatggcccattaataatcagaccactaacagccccacccaaagtacacctccttttactatccaacacaattaattgtccatcaatatgaacattatccatgtcaacagctgccttttaagataaatcagaatcaaatcccccaatatgatcctccacaatattagcactaataggctgactcaccacaccagctgccatattagtttccttccttttttggacaagatttggatgactagcattcgtgattgtagggatttcaccattcagttgttggtctgatgaattgtcaacattgaatgcttcatcgttcacccctgttctcagccacctaggcccgatcaagtaatttttctgacaaggttgagctctcataccagtcctatatggcttcaccactgattccaacgggagaccataagcctttggacaaaattttttggagtgttctataataccacaaatgaagcaaaaagtcgggacgtattcatatttaaatgtagcccagaactaatcactctcgttctttcgaattttcatttttcgtttcagcggagtagtgatatctactgtcacacgaacatgtagatagtccctccataatccttggaaatttttagggtctgtttccacaaaggaaccaatataattctctaagtccttaagcaccatatccgacttaaaatcaaactgcaaaccatgaacttgtacccacatatcaagatgattgataatcatagctcgaggatcaacacctggtactagtttcgcaaagacaaactgggttttgttaaaagtccacggactaccgtcattgacaagtttcaaatccaaatcatggtaaaattggaagatataacgattatgttcaagttctttaacgtacatacctttagttggctggaataaggaagtcattatatgtctcatcacatcgaaatcaattatctgagagggtaaaaatcgtcccacaatacacaaactttcatcctcctccctattttgattctcgacaacatcataagacaaaacgaactcatctgtccctttgatttctatcccttgatattgtgcctcaagatcactaacctaactgctacttgacgccataccaaacatacaaaacaaaaccacgaaactcaaaagagaggactaacacaacatatcaaaagacatgacttttctaactactctttacaatattttgtatttaatccattaaaaaatataatattaaatatataaaaattaaaacaaatagtatttaatatttggattaacccatcaaaaagaaagatagagtttttatttttatcataggtggattagtttggttcatatttaagtatagtaactcaaatttatttatatgtgatatattttaatgaaataataatattagaatcttaattattcagatatgcatttagattcagaagtctgcatcttacaaaaagcaaatgtacccttagatgaaatctgttggtgctggtcgagtttgacgcatttggttctgataaaatttgattagaacaaataattacataaatgtaggattaaggaaggaaggagcttccaaatatcccatgaccacgtgcggctagggcgaatcgaatccaaatccaatgaaaaattgtaaagaaacacaaaacaaacaaaggataacaaacgttggaagctaagcataacttgttactcttaactccaaaaccacacccaacccaaccaaacccactttgcttcgggggactttaactccaaaacacactcttaaaagttaaaactgaatcattgctcttcattcattgcctcgttctcacttctcacccttgatttccattgatttttaatggtttatgattcacttttcctcgtaacgggatgggagctcagaagagcatccatgctggtaaaggtcagttctttttattttttaaaggaaaaaaataattaatattttgaaaacccatttgagaattgtgccattattgttgttgttcttggttattttgagagtaatgtgtgttatttgtgtttaattttgccacagccaaaattgatgttaatgttgatttcactcacaagctttgtgcttctttgatggttcctcctttcaggtttattttacttttttttattatttcttttgtttgaattaactttcaatttattgttattgttatttattggtattgagtcttttactttctgtgtttttcataggagtggtaatgacagccctttatctctgataataggaaggt

SEQ ID NO: 296671 - DNA, 4858 bp, Cannabis indica
tttgacatttagtgtaaaaattcctttaataattagccgtgaaataaaataaaagttgaaattatttgatcactttgagaaacttcgaagttgacctcctatgagatcaaagaaactgtccaaagaaattcaggaaaaaagaaaaagcaaaagtccaacgacaggactaaaatgaacgtcatattagaaagcaaaatttatttttgtttcgtaaatagacttgttacattttatatatatattcgttttcacttttttcacaatgccttatatattcacatttccacttttttttttttaaataagcgtattcatttaataaaataagtaattgttagactttatggtcgttacatagtagttcctccggtacggaggataacaaaatgtaaccgttagtaggtaaatgctcacttagccacattatggccaataaaattacaattcttactaacattagaaaagttacaactagaatgaaagggagatgatttaatacaagagtagacattccacattccacatcaaacaatggttgattagtctgacgtttatatatcacctaaacacatacatttttcaattcaaatctcacgtgtataacagtaactataatttaaatataaaatataaaggaaattttttctataagaataatactccattttaatataactcatattaaagagaaaaaaacattaatcaactcctttcttcaatatgggtttacataaaaaatcaagtatattaatatatatgcaactgatgatacatgcaattatgtttggccaagcattttgcataacaacaacagcagctccatagcaacccacaaaaatagctgcctcaactcgtgtggtgatttcgaaattccgtacccatttggccttgacgacagttgttacttggaacccaagtatcaattccagatctattgtaaaaattcaaagccttacctattcaacaccagttacaacgtcatgaacatatcagtcccagatggcaagctaacaataacagggcctgttgtcagagattgttacagtagcgacaatggtagtcgaaactcaactcctacccgagacatcactcgagccttgaatgaatatttcagtgtttcattcatagaaaacaagttttactccataggttgcgacaatttggcaaccatcaatggcttccgcaatggtaacagctacacaactggttgcatatcttcatgtagtttcgcagacgaagttgacttgaagtcttgctctggcgtaggctgttgcaaaacttccatccctgaagaacttgttaactacaatttgaagttggggagctacaataatcatagcagcattttgagttttaacccatgtagctatggttttgttatgcaagaaaaagagttcaatttttcaaggttggaagatttcagcaatgtcacaaatgttccggtggttctggactgggctgttgggttcaattcctgcgaaacagccaagaggaatatggagacttactcttgcaaggagaatagtgtgtgtataaactcggcttcgagatcaggttacctttgccagtgctccgagggctaccaaggaaacccatacctttcaaatggttgcataggtagggaactctctgtaccctgcaatcttttttgttttgaaatataagtcttacaactgtttgcatagctaaagtaacaaaaaacccatgacttaattagtagtcctaattgtaaatttgatgagttgaaaaatgagtgtgtgtatatatatttgattgtaaatatgtttgtgtttttcagatattgatgagtgcaaacagaaaccgaatttgtgcggaaatggaacttgtgtaaatacagatgggagttataagtgctcatgtctaaaggggtacacaccaatacagaatgaaaccttaagcagtactcaatctcttatgaataatgattctcattcaagaaacctcataattatttactctgttttgggtaagttttatcttctctgttttcactatatacatattgttgtgtttgatcaacaatctcaacatgaaatttataaatctgcaaacaattataagctagaaaataaagaacaaaaatatgcaaaactggttaactaaaagacataaggaattatagcggttaacacttcactctaatttgaagctacacctcttgaggaatccattctttgactatatcaataccaagttgcagagtcattaagacaactagaactcgagtgtacatagttaattttccttgaacataatcttttttcttgaggaagaaacaccttggaagtctctttgaagaatctgttggaactttagtgaaattttacttacgacgcgcattgctgccgttatccaactgtgctgagttgtcaggtgtggtttcattttattttttaatttttcaaatatatttaattaattagtaagtagagacaatttctctccgatcatattatttacagttctatacaattatattacaaatgtattctgagcaatggtacgactatattaggtgtgatatttcgacggttttctattgtacaatagaactccgctacagtgttttgactaggctgttttattcttgagacgacgagactaatagtctgcttgcgcagttttggacagtgttgtcttaaagagaacaacctaatccgtgactcaacccagactttaatttagtaaattcgttctttttctttgctgcagcaactattttcaacatttttcaacagaatcacccttttcccttctactacacactatttttctttctctcaactctgaaactttctctatgctacaagtatttcaattttcaccaattaaagtgattactccaaagctttgtgtactaattaaaatgcaacttgttaatttcagtttaaagaaaagaaagctggcttgtataacaagtaagccaactcaactaactaacaagtttagttacaagtcaaagagccaactgttaatgtcatgtcgtcaaagataaaaaaaccaggttttacttaggactcataaatacatatacatatgctccactcctttgaaaattatgaagcaagttaagatatagatagattaaattcttaaatccatcatgtagtttaaaccaagaatatattatcttatttgttacatgcttaaacaatctttaaaatcgacttctctaaggaatcctattagatgtagcttattacattatcttgtgattattttatgtgtttatatacattattttgatggttttttttattattatatacaggttctacttttggcacatttttttttaaattggtttatggcacttaatgaagttcattataaaaagaagtaacattaagcgcaaagagatacattttcaaaggaacggtggtttattattacaacaacaattatctacacatgaatatagtcttgagaaaacaaaattatttagcccagaagaactagagaaggcaacaaacaactttgacatggatagaatccttggccaaggaggtcaaggaactgttcacaaaggtatgctcacagatggaagaattgttgcagttaagaaatcgaaaatagaaggagaagcgaaaatcgcagagttcatcaatgaagttgtcatcctttcacaaatcaatcatagaaatattgtcaaattattgggttgttgtttggagaccgaagttcctcttctagtttatgagttcatacccaatggtactctagctcattatctccatgaccacgacagagagtttcaaatgacatggaacatgcggttgcgaattgcttcagaaattgcaggagcacttttttacttacactcagcaacttcatctccgatttaccatagagatatcaagtccacaaatatattgttagatgaaaaatacagagcaaaagttgcagattttgggacttcgaggacagtttctattgaccaaactcatgtcacaacacttatttatggcacgtttggttatttagatccggagtactttcaatcaagccaatttactgataaaagtgatgtttatagttttggagttgttttagttgagttgttgacaggtgagaaagcaatttctattacaaggtccaaagaaggcaaaagtctagccacatattttctcatttcaatggaagaggatcgactttttgaaattcttgatactcgacttattaaagaatctcaaaaccatgatcgtgatcaaattatcgcagtttctaacttagcgaagaaatgcttgaatttaaatggaaggatgagaccaacgatgaaagaagtttcaggtgagttggagagaattcgaatgatcaacaaccttgatggtgattataatgatcccaaaattgatgaagagatagaatacgtaagaggtgaacaaattgagccttgggatttttctaatgtcacaactagttcagctagtataaattatgcttctccttcaactgagattgaacaatctatattgtcttctagaagtcgttgatggaataaggaaattaataagtttttgtatctttattattaattagctcacaataaatccagtgatttcaatcaagttatggtcaactaattttaatactaggagaagttaacatatgttttgttttgttttttttttttttttgtaaggtgaagttaacacatatgttgatggtaaacaatgtgaaaatcttgtccatatgctaaaataaatgatgtatctttcctttatgaaaatgagaaatttttaatccatcaagaaaaagaatgagtaatttttgttcatttttttaagggctatttacaaaaatatgggaaaatgaatatatgttttgatatatatgg

SEQ ID NO: 296672 - DNA, 1568 bp, Cannabis indica
gagattacataccctgaaaagaatcttaaaatgttatcctagcaatcacaagtctttcacttaaagagtgcacatcaggtaaattttgccgcaaattttgggtttttgaggttcgggttttgggctttgagtgtgtagagttttgtaccaaacctgcccgagtacaggttttttggttgccggtgttgggacaggttcggtggggttggggtgggatttttgggttcgggttggtctccggtttcttgggtgggtaaattttttggttacaaatgttccaccttacatccactaaaattataccaaacataggtctgattttacattctccttcctaagaatcctgactctcaaaacaaactggcactttattataggtaatgaccagtttcttatattatttgttaaattaaaatatgtatgatcgaccagatattatataatttgatgttcaatctaatccaattaaacttgttcaactatttaattcatccaataaattatttaattgaatcgattctatctatttgatgcatccctataacatctgttggattggattagaccatcgatccaatatatttataaaaaattactttgtaataaaatgtttttaattattatttattggtactttgaatagatttggtacactactataaaacaagtttcaattttattttacatgatattgtgtataatatacttaattattagttatacaaagcctctcatataaatgcttaattagtctctatctcagttgcatgcttaattaattaattattattttaattctttatattatacttttgaaattattaaaaaaaaaagaagatataacagaaaggaaaggaaaaatttataataagaatatagacattaatcgaaaagaaacatcattagagtagttaagataattagtagttaataattatagaaataataattaaggtctttctggattatctattttgccaataattaatataatgtgatcctactctgaatatatacttattttaatttataattgaacgaatgacacgacatgacatgaattcattatatattattattattattacataattattttaattaatttaaactttataaaaattagtacaagtacttaagttagtgtggctccatccatatatataatgcaattattatcatcatcactatataaatcatgtgtattgctttgttaagttataattggattaataatggaatagctaagctatatatatatataagtcaagagtggacaatgatgatatatgtttatatatatttatatatagtttaaataatgaaatttttacaccaaaaaatctgttttgcacattttattactgttttactcctacacgcctacatcaacatttttacttaccatctttattttattacaataataccacttacacaccattctcatgcacagacacatgtgtcatccccatcacacatcaatcaacttccactctcttctttctctttttttcttttctatcacacatcaatcaacttcctctctcttctttctcttttttcct

SEQ ID NO: 296673 - DNA, 8785 bp, Cannabis indica
ttatttatttttatttataatttcactcaaaactatatatatcactccattgaatacagtatgggcaaataaggctctttctgcagcttgagctggccaagatggtcgcccaactacagaagagaggtcaaaagttagctagaagctacacacacagagatatatatatatgtatttatatatatatgtgaaatatataatggtactgtagaggtctaatactacaatacactacactaccgaccatcaatcttttaaattaattatcctttgttacatattacacttcttttttcttccttccaaataaacatttcactttcatgcatggttcattccaacatttccatgtgtctgcatcaacttgataaaaaaaaaaagtcaaatacctcaacttttcgtggaaattttgtgaagaaaatcaagaatatatggtaacaaaaagaccatcctgtacatattaatcaaatcttttttttcttttaattaatgattactactgtcactgtaccaacaactacttaataaaattattggcttccttttttttttttaaggttagtcttaattaaagaaaaagaagtataaccaacaaaagaatggaagtgataattgtaaattacgcttaaaatgaaattcaaaaacagaatgcgagtgaaatcatgatgttttgggtgctctaatttaataatttcactaaaaccctaatagaagaagcaagcatgttatgttgttataacttgagtgtcgctttacatgtcagcaaagaaagctagaactttgcttgcgtggaaaagctatccacggttttgatatgctgacaaactaaatgattttgtctcttttactatatattaaattaatcagagtgttgggttttgctatagctaggtagctagctcttgcttatgatgatgttattatgattgacatgattttggaaagtgtaatttgttcaatccagataaatctatgacgaaaaccaactttaataaggaatgcgaaaaaaaatacagctgggaacaggtgttgggggattgatcagttgagtttgcttgattttatggttgagtccttgtagttgtagaattagatatactatggtttggtgaaagtgaaattttcaagcttttccaaactgggttatgatgtcatatatatatatatagttgtagttgatatataaatgtcaggtagcaatttatgatggaggaggattcaccatatcaaaccttacctgatgattattgctgaacagtgacgtggtgagactgaaaaatacttcaaattattttcttttcaagtcattcagaaatgctttagaaactgttcttcttataatattatgtacagtaccaaaaaaataaataaataaaatagaacaaatacttatttatggtttgcaggggaatacattcaagcctgctgctgctgttggtttggtatgagtaatggtgtaagttaaatcgtttcccagatttgagtgttgaaatcccggtatatatatgtccaactgatcaatcggcatgttcttgactaaagatactatataatagtttgaaaagtcatgttatctaaaaacattataccatcatctatcaaagaaacttattttcatgctcttctttctcgaagtattttgtcttgcctacttggactctctctttctctttttcactatgttacaaaaacaataaaaacgtacatatgcagaatttttaattaatagtacgtataagaaaaaaaataactgcatataaactacagtcaagccaagtgaatttctcatttatggttccccttattggactataattaaaggaaggagtgtgaggaactgctcagattcagacagaatttgcagaaacaaagtatgaaaaaaaattaggtttaattaaagggctgggaaaagcttatccaagttaaatggcaatgcgtagaattcatcgttcctgacatctgaaccatataaactgaacttctcccaccaatgcaagccactgtcttttctggttgaatcattttctcgaaaaagtgtgcaatccaagatcaaaacaaccaaagcagccaccgtggtatgagacataaagacaaccatcactaagtcattgaactggaaatgcagaaagtttcgttaacaaggtcatggtggaaatatttgcttatgaaaggaaaaaaaattacattggaatataaaggactacattatgttatatttcagaaagctcacccatccagcaggtttgtgctctttccaaaaatatgattctgtgtgataatattccctaaaatattgtggtattgaaattcccatgaagaaagagaaacccaatataaattttgtcctgaaactattcaagttgcaaaactggagaaaaccaagtccagcggaagctgcaaccaaaataacagatcatgagtatgaaattatgtcatctgtatggaaacagaagattaatagcaaatgccaagggttgaagaaacttagtacataccgacatagctaaataaaacacaatatgatgctgctataataggcagaggaattgaagcgaaaagggctccaaactttcctgttttagaagcatataaattgagcattatgagtatcaacttaaagaaatataaagtggaatggtatagtaatagccattacagaaaagaaatagttcgttaactatgcagtagcttcaatttcaacctttctagtttctgtagaattgcacaatcttgtggcagagaatataaaaatgaacacaaactcttgcggattaagttattctaaaccaaagatgaactgtgtcataccaaatatggagaagaaaatcatgaagccagctgagatctggattactcttcggcttccaacttttgtcagtgctaatagaccagcattttcactacacacgaaagttgcatatttatgaagccaacttagtgaaacaaaatggttataagatgtaacaaccacctattccctactgcattttagtagaggtagtcaaatttaatctcacttttcaagtggtttgaatattgttaaaaagaaaatttaagtttcttagatttcagcagaggtttgaaggcattacactgatgcagtagtaccagttagacaaccgaacatgccatttagtaaaacacctataccctgaaaattgaaatcatgaaaacaaattcaggatggagagaaaatcattagaaaatatatgaacaatgcataccctaccagccagccaacacctcggctaattacagatggtggaacaggtgtggcacttccatatcttgctgtagcgaaaaaaataccagtggactgcaaataattaaaccataatctcagcaccggtattgttctcaaaactattttacagcaaacaaactcaaccataaactccatttaatctttacaagcttaaagttcaacactaacctcaaagagagaaacaaacgaagctgccatcattgcaaaagcttctccagcattgaaggtagggctaccccattgaaagggataaggcatgtacaccctgcaaaaaacaagtcctcaaatacttacttccagcaaaagaatagttctgaaatagttgcaactctccgctaatggcataatagttgtatataaaatatatagagagagcgaaaagcattatttaacagaatatcaggacaacaggttatagacccttttattttctcaccaaggagctctttcaatgagcccggctttatcagtacggcaactaagttgagtatggattggtttattgttgtacagacaacttgatgtcaatactagtgcgtaaagccatccaattaaaaccgagaagagcaatgaaaatctatcacatttttgtgtctttgactgtatataacgaggaagatactgcaagaccattgatcacaagaacacactcattaacatgtggaacataaataagtgactatcagatcatcagtataacaggaggaaaaaaataataataaggcaagtgttcgattccatggaagaaaaagtaatgaacatggagtttttattatttaataaaaatgtaatataagccctgttttaagctgccacctgcctgtgagacaaatacaaagacgatcaacactggaagcccgacctcaacacacttcgccagctacaagaggagaaacagtcagcgcaacagaagttgaagaacgaaaaagcatagcagacaagctatctaataaaattgtacagagagcttaaaaatttgcagtctatgaagaaaacttctaaaactatgattatgactgcacttgaaccataagtattaaaattgttaagtatgagggaaagagtagcagaggatcaagaaatatttaccatggggaaaccaagacgatataggctaagtccagcaaaagttacaagtgggacaacagaaaggggactaagaaacctaaaccagtaaattagaaaacaatgattacaaagatcagatatattcagtagcaacaattttgaaaagttgaataagccactcaaagctttgatacaaagttacctcacaacatttctccacaggcccaggaaacccatgactatctgaaaacatgaggttatgattagagcaccctgtatacctctcattgtttgtacaaacctctgtaagaaaagaaaataaataaaaattaacccaagaaagtcaatgataaggaagtcaaaaccagattagaaaagttcagtagcaattctagcttcaataacctgcattaaaatacctcttttgggtctgggattatgttgtatctggtggataaaaggatagaagttgtgggaataacatacgtataagaacccactaccatagttggtaatcgagtaccaaataatgactgaaaaagcgtgctgaagcctgaaacaaacagacaggtttgaatcaccttagccttttcaacctgtgaccaaaagacaagaaaataaattagtgtaatatgtcaaaatcatacactattaaataaattaatttaaacagctaaaatccttacatctccacctcccatctgaggaacaattatacttggaatcaaaactgtaattccaagactcaaaagataatgctgtattcccaacactacagcttcagctgcacggattaagataagttttaaaaagatttagaagcacgtgccccatggaaaacataaagaacaacatccactaaagtaaagcatgcacttgtatataataagagtgtatgtatatactaacaccatggaggaggactgttaacacagtactgaacaccaggcaactgctccttcaatgggtgtggttcaacctcgtttgccatcttctctccactgcttccacccccgccactgctgtaaacagtgttattgttgcagcaactacagactgattgggtcatgtctagctcatcaaacactagagaatatggtatatatgttcaaacttcactactgcaacgtttgcctaattaattaaaaaaaaactacctggaaatgaaaacgttacaattgcagatttcctataatataattaaatggccgttattattggaggttagcaacaagattaggtgaagatttgtattaaattagataatgattcattgccgaagtcagcttcaatatatttttttccctcctttgctttctcttttatcggctcagttgctattgatatgaattctcaactcatagagtaattgttcaagaataataaaaaataaaaaacaatcccaggtagataggattggatttctgattaatttggttcgtcaaatgaaattagttaaataaactaacacaatatcctttcactaaaactcaaaccaatcattaacaaggacggatcatctctagctattgtttcttctttgtcttttttgtttcttgttagatttaaattacaaatattgttgagttttgcaagaaacaactaaaacgtaaatgatttagttgaaggccgtaatgaactaatgattaatttgttaaaccattagaaagttacaactgaaagataaacctactacaactcaatttttaaaaaaagaaaatcacaaaaaaaaattacaaaatagataatatttgaatgtatatttttttattttgtgtacaaaatattttatataaatataattttatgttaaaaaccataccatatatattatgattttttttggaggtttttttcacttttacacttcataatatatttttttttttttcatttttacagaatttcacatagaaactcatattgcaactaacagagcaacttaaattgtaaccaaaatccgtataggaactcatatagaaactatcggaaaaatcatttgaggaacccgaaccgtaaatttgaaaaaaaaaaccaaaaaaagagtaattttttttttacatttataaatataatttgaaaagactataaaatatttttaaattattttcaaaaggatataaattcaaacttatgtaaaaaagtaataaataaagacatttagaatgtgaaaattatgtataagtttatatatttgttgttataatgaattagattataatctctttataattaaaattttcatacaattttttaaatttataatttagtaatttatcttttttacttatggagctatagcgtgtttgtttctcacagcatagtcaccaatttggccctacgtgcctatgcctgtttttggcacaagggttgaaaccaaggtgatgggaaatagtaataataacctatatatatacgtgcaaatttaatgtgatgaaatagtttaaagctaattgtatgctggcgtgaaagtaaacaactttaataaactttgtaaaacctaattaatttcttaatacttaattctatatgtttaaatatatgataacaagcaaataaacaaaaacctacaatattatattattctcatatctcattcataaactcaaagatgctcactagcctatttattgtgaactaaaaatggggcgagaaagagaatatataatctctaatctataaatagtatacgttacagcaccatcaatacaaaattaaaaccttatatataaatataaattcaccattattaagctactaagaaagtgtactgtgtaaccgaatatttatatatagagctaaagcaaaactatactatatatatataataatgttctaacgttgatttttacatctgtatctttcacaaaatgtccttaatcctagaataagatcctttgtaatttcagaaatagtatcctatgtacaaaagcatgccaccttcgtcagatattctctgcataaaaaaggaaagaaaaaatgccaaaagaaacatattcattattcaaccttgaaattgcaaagtaataatattgaacgaaacagttctttggtgtctttttttttcaagaataataaagagtagtaaccttgcactgtttcttttgaacaatcattatatgcgtaatactagaccgggattctcatctctttttaaagtagggtataaagaaagagttcgaaacagaccaacttttggtaaatctagtaaaagtgtgaagatttacgcgttgaaagagggacaatcaagtgtcatacgcattgttatttgaaagtaaggttacaaaagtcaatagatgcatatagtagatttgattggaatttttcatataaaaaaacattgaatggaattttttttttttttttgaatgaacattgaatggaattaaatattagataaatatgagaagaaaaaaaatggttggccaacgttaataaacatttattaaaaatactacattttattattatatcgaattgggtacgacactgtgcaaaatcaaaaaatttagacatgtccaatgcaaaatcaagaaatgtagacatgtccaatgcaaaatcaaaaaatagtgtgtaaattttgtgttgaattaggattagaaaatgaattaatactatattttgcccatagtttattataattgtgctccaaatgcacacgggtcaaaaaattaagaggaactgctcctctgtctccatctctgttaaatattttaatgttcatccctgcttatttctcatcgaggataaagagagaaatctcttaatgggataggaagttgcttaatataagaataaaatttattttaaaaatttaaatgtataaaaaatattcaaatattacacattattcattatttattattatttaatatactagttattatccaaaacacaatttacaaatttataaaaagaatacaaagtcataatcccatgataaagttttggaattggataaatatatttggtgtgattttatacaaaaaaaaataaaaataccaaaaactaaatatgaataataaaataaaataatagtccccgataacggcaccaaaaatttgatgtgtgtcgtaagccacaaaaaatttactaatattttaattccaatacctccaattattttagtataatcgtaaataagggttgatcccacgaggactatatttattttattattcacaatttagtaacaaaaattagaaaaagggaggggggttgatgattagaataaaatagcgataataaaaattaaagaaaagaacaaatttcaagtgagactacgatatgagagactagttaaaggttattctccaccctcaacaatcattcctaatttctatcaaagaatgtaattttcagtttccaatcaaactataatccagcagataaagctgaagcagtcaattatcccaatctcctattgtatgtaatcaaggcgaagcgctcaat

SEQ ID NO: 296674 - DNA, 2245 bp, Cannabis indica
aaatcaattcagggtcctatttgtactattttaaaaaatacagggttcattttgtcatttaacaaaacataaggtccaattggtaacttttgtaaaacatagggtccaaaatagtatttacccaaacaaaaataacaaaaacaaaaaaaaaaaaagttagagattcaaagtttaaagtcgagccttctcaaccaaatggagtgaagcaccatatgaatcatatcaaatggttgggctggccggttcaacacaaaatgtctcttaaccttagatactctcttgtataattttaggtactgctcatttggaacagcttgtaagattttcttaatgtctggtatctttgagattgggatttcaatggaaaattggctccaatcaagaacatcactaaatggtaatgagtaactctgagatagaatcactgggacacaccctgcatttatagcctccaccactcttgggcttgccacttcgtgtccactggggcacaagcaaaacttactttggcccattaatttgtgatagttttgggacccgatgagcatctcgtggacttggacatcattgtctttgtccttccagtgtttgagcaagatctttcttatacctccatgcaccctgcctgcaaagaaggctagaattgggcggttgtttgggccttggcctgcttttggtgggcctagttttccaactggaagtttgatttcaggcagtgaaacatctctgctgggcttaaatccttctgaagtgttggcattgcataaaactctcatgaagtttttgtataggtcaggcttgccacctgaaatttgtggtccctaaatataggaataaagtagacaatacattattaagattggaatctttttctgaactaccccaataatctcactactgaagtacacaaaaagtaaaaaaaaaagacagaaattagaaaaactcacccaatcatggcaagaaaccatgaaatgatcagcaccactgcttctattccaataagaatacttattggctagaacaccaacatagtcattcacaagtctatgtagacgatctggtttgtaatcatcttcagtaattcttggcttgtaaacgtagtgaatgatgttagccacactaaatggcagaaaaaatgtgtgagcctcctctggatttcttgcccaaaatgggctctttttactctctatttcatctatgaattgtccttcaatcccatatatgttgttcactggtcccatgtggaatattgggttctctccttccttgtagctccatactttgaatcttttcaccatctctatgtgactcctatttttcttccataaataattatcaattttaatataaaaaaaaacagctctaaattttaacactgatttatgtttctgaaatgattaagaagagagtactatgtatatacttactgatgaaaagcatatgggtttctgtaaatggaacctcttggcacaaagctctcatttttataagacttaaaacttttagacacagtagctttatgaatagctagtcgagcctgacccaaatcatattcaattctctccaaccttctcttctttttgctcttgataatctgctcaaaaagcacacaacaaaagatggtgtgttaaccaaagatcaaaccataaatgaaacaaaatatattcacaaaaagtaattctccaataatgcttactttttcaccacccaaagtaccatgactataagtagtactattgagtggagtagtagtactactagtactggtactaagagtattattaattgaataactataattgagaggagcatataaagagtgaatgattagctgggtttggtttaaagataatgatttagaaaaagaagaagaaaaagaagaaaaggtgaaactaatagtaacaaaattgaggagatgcttaagggtgaggtgcccatggtgtgtgtcggccggagtaagtagttggctaaatggttaattcatttttttcttagtgttgagatctcaccatcaaagaaagaaagactgacaagaaattgatcaaaccacatggtttattgtgggggtttgcaataaatgataacgtatttagcccacatttttacttatattagtttttaaataattttggcattattttaattctaagtttgtccatatctcttttcatggggagttctttttatgatgtcagttttttttttaataataatattaattaattaataaatacactttgtttta

SEQ ID NO: 296675 - DNA, 3864 bp, Cannabis indica
gtaaagaattatttttgtatttttgagcaaaatctaaagaccaacaaatcattgcaacaacttcattctacactcattctgagtcatatgatacaaattaacattatataaatattgaattcttcaatggcaataaactataaaaatctttaagaaaaaacataaaatgatcaaaattattataaatcgaaattaaatctaaaatttaaaaattatattattaattgtttcttcatttgagatttaaggagtgttgaacaaaaataacaaaaaaaaaaaaaaaaaaacagaaactaaagtataaatgtatatgctcgatagcacaatactttctatcctaaattttaatataggataaataaacccaaaattttatatacaatataaataaacacaatacttattgaattgttgttactattagtttaatagcacaatatatagtgccaaaatcaagtcccacattagtttttttgagaaaaacacaaatataatactatataaaaattagaaggaaacccataaaaaatactaaaatttaaaccaaaattgttttcctaaaatattgaaccaaaattccaaaattaatccaaaaattcaaaattcaaaattcaattcagaaaaaacaccaaactaaaaactaaataagttaactacaaaaaaactaaataaattattttgttgcggcttgttcatcattgtaatatttcttccaataccaatgcttcttccatactctgtcaaccatttcatcaattggaattcctttcgtttccggcagaagaaaaatggcaaacaagaacataacgagaacccaagcggcaaaaaagaagaatattcccgattgcatatggcacaacatagttaagaaagcttgagcgataagaaaagtaaacagcatgttcgtggacaccgcaaagaagaatcctgcatttcgaacctccaatgggaatatttcacttggaatcaaccatccaagaggaccccatgaccatgcaaatccagatacaaaaatacaaattaagattaatactatccatgcgtatttatccggcattgtacttgtagctgtgagatattttgcgagtataccacccattatagactgcaaatatataaataattttagttaatatttttcatattatatattaaattaaaataaataaatgttatctaatttacctgtgcaatgaacatttgaacagctgcttcaatcagtaaactctttcttccggccttatcaacaataatatttgcaacaaaagttgatgctacattcacactacctgtgaccgccgatgacaaaagggatgcatcactcccgaaaccgatggtttgaaatagtacaggagcataaaacataattacgttaattcctgtgaattgttgaaaaatttgtagtgccacggttaccaaaagttgaggtctgttggaacgatgcataagttttctataagaatgcttctcttgagaagctaattcagtggcatgtgtgatcatttcatattctttttgaacatcttccactcctcgaatttttcttaaaatttttaaaccttcttcaatgtgacctcgctcgataagactggttggagtctctacaatcagtaaagatcccaccagtaatattagagcggggactccagctcctcccaatgagattctccatccgtatggatggattcgtgatgtaccataatttacgaaattggccaacaaaattccaactgtaattaataattgaaaacagatgttgagagctcctcgatatcttgttggtgcaatttcagatataaatagtggaactgcctgaaaaatattataaaaaaatgtaaaataagactcatattatgttgaaccaaaaaaattataaaaaaaaaattattatgaagaatatgagcctaatatcatattataattcacacaaaatatgaatatataacaacattaataagttccatttactgaagaatatatataaattgaaaagtataatatacgtatatatttttaattaaaaaataaataaaaataaaaaacaacattaaacggattcactatataacaaaatatcccaattaaaattattataaatataacaaaattataataagatataataaataaacatatatataacaacgaagtaaaaatatattatcaataatgtattatttagagtaatgtataatttatatcattattatttattaattaatccatgaagaaaaatttgtcatattccaaatcagattaattagtatgaacacattaattttaaacgtaatatcatattatagttcacacaaaaatatgaatgtataattctatttaccgaagaattaaattaaaaatcatattatataaataaaattatttttaatttaaaaaataaatataaacaaccgggttcactatatataagatccgatcctgaaatttaatgaattataaaaaaatattttttgaatctcatccaaaaaaaatatgatttttttttccgacctaaccatatataatataacaaaatatcattataataaataaaatatataacaacattaatgaatatctttattgatatgaaaaattaaatggtataataaattacctgattgccaaatccaacaccgattccgagacaaatccttccagcaatcaacattccgagatctttggcagccgcattcaaaaccgaaccggtgacgaagaacaccgacgcagcttgaatggtcacctttcgcccgaaagccttacaagttatcgaagctataaaagaagccaaaatggccgctaaataaagcgacgaagtgaacaattgcaaatactgattatcgtatttgcaatagttattttctttcacttcgtgctttttagcatacacaattggaaaaaacttaattaaaaaatcgtccatcgatgtcaccccacctaataaatcaaacaaaaataaattatatttaaatttcgaatacaatcaggataaccagaccacttaatcaatgatattaataattttaatacccgaaatgccgatgtcatagccgaacatcaggccgccgcatgcagcgattatgctgcacacgatcacttgtttcgtaagttttgcgggaaagtcaccgccgctgctaccgccggactcaaccatcactgcccccgtcatacttacagtaagaaaaaaatgaatgaatggtttcgattattaactcagtaaaaaaaaaatgaaactaaactgtgaatgaatgaatgcgatgaggatgggatttggtataggcctatatttatcctaagaaaatactgttatttgggagagaaaattcctctattctgttattaattatatttatccttatttaataaaaatcgtatataaattatctgtttagtttaaatttattcgattttttaggtgatgattattccataggtttttattaatgaaattcggttatagggtgaaaaatatatgtctattttttagatataaaatatatgtagaataagaaagttgtggttggagcttatttcatatttaataaataattgaaatatcatatcttataataaataataataaataataaaattggcaaaattgaatgcggagaaagatagtgaaaaatgaaacagagtgaggattcaagtcattatatatgctaactaccaactaattagatttaattaatattcatatttgttgataaaaaaaaaaaactatttttgtgaaaaaattataataaatttctaggtattaataaaaaaagggatttttacactatatgtcaaatttggtactttttttacatttttatttatgtttggttttttaaacttttttataaaatctgtttttcaatttta

SEQ ID NO: 296676 - DNA, 2260 bp, Cannabis indica
aatagacacccaaaaatatgtgttgtcattggttctaaatgtcttagtggggccagattttagtggtctttgatgtactagacttttcctctatcaaataagggtgcattggtgtaagttttatttgattggtcaacatagggctagagctctcttatgtcttttttttattaatggaatgcagtttttatttgtcttctccgactacggcaagcatattggttggcctaaatcaagctgatcttcaccattggtggtggtatccgaaaaagttgatctccgaaagattttagactgctcgtttcatcgtttgtgaataaatcttttaagaaccatggtggtggtgagacactctactttgggtgtaaaccctatttttatattagtatgatattgtctgtttctggtttaagtgtagtgagtttgtttttgaattctagtcaaatggcctcataacaatggagacattgtctattattaaatgctgatacgatcttttcatttttaaccaacgtaagactttaattggacacccactcatcataacgaaaaagattcaaaaaccaacttatatatatatcataaaatgcagctgaaaactctaattcttttaaacccgaaagatataatataacaaggttgtgattatcataatcttgtgtaatgttcttttttacgttatcactcttaaattagtaaaagatgttatgaattatgtttgaataaagaacacttataatgaagattaaataatattacaacttatttcaaaaaatacatataaagtataaaggaaataaaaaagagaatcacaactcatggcaatgtgcaacaagtacacaaagtaaattgcacaaaatataaaatgatgtgagagcaagacttaaatttgaacaagactacctttgttgaaaaatttatttcctcctaccacaaacacttatggaagaaaagaagagaaaataactttatagatttatcaaacttaaaatatttttaacaagatactctttgatagattactaagttgtcaaaaaattaccccataagtctatattttatagtgtttatagttaaatgagtgttatccgcacataaatgagtgttttaaaggttatgaatgttgagaataaaactaagattgaaactgattaaaggtatgtttggtaggaaggttggagagtataatggatggatagattaaaaatgataaagaggggaaggagaggcttcccttaatattgtttggtattagatatgaagtgagaaggatggaaagaaagataagtagtaaagtacaatattatactttggaataacaacctatattaccttttaagggataattttttaatttgcacattttatttttgtctttttcttcaatcctctcaaaattgtaggaatttaattttagaagtttggagagagaaggtatccctccatctctcctctccttcactctctctcttgttaaacaagttattcaacaaggaaaatttcatttaatatacataaaaaaaattcctatttcaaaaaatatccaattaaatattttatacaatactattttactaacttcccactttacccaaaatacccttattatttatttttatttttttgacgtagtgattagaatcacacataaatttacgatgcagatatccgcaaaccgcgcaaatataaaaataacttaaaattaaaatattacactttaattattattcaataaactaattattatccaaaacataacttaaaattcataaaaaaaaaatactagtaatatactaaaaaatgcaaatataaattataaattataaatattactagaaatataaaataaaatactaaacgggtccctgtcggggcagggagtgtgatccccatccctcccctttttaatattcggggacaaaaagtaatttccgtccccatggaggaaatgtgcatccttagttattaatcttttatgttaattttgggaatttttttttttttttgaaaaatgtcatttttccttattcccaaatttatcatatatccaataattaattaagtccatggcccaccaattaaaatttaacctaagcccaaaatgaaaaaaaaatctcctcaaagtgcttatgttcctactttattcaaaattatggcgtttttgaaaaagttgagctttggacccaaaaattcattgaaatttttttaataatatacttaaatataaactatttgcaaaaatactttaataaatctcaat

SEQ ID NO: 296677 - DNA, 2138 bp, Cannabis indica
gctgatgaattacattgaatcatattaaacacagtattagtagacaaggaggtagtgaagtaaggaagcatggtttgattcctatttttcactgtgacacgtacagtacaaatgaatgagttaaactttattagtgggaaagctatgcatcattgttttagatcaaggaatgtattttgacataagctttccaactagtatgcactaactttatttgtttttgactactgttctagaactaaaaaaaaaaaaaaaaaaggaacaactaaatattaactagtgctgtctttgggggtttccaagagaatcgccaacagtaacctgttccaggtatctggtactccaggcaaacaccagtggctacaatcagcaaaagtttcaggctttttatgctgagactccatcaatttcattcccggctttgctttgtaaatacttggatgtgcatcttttctggtcccagacaagttggtgatgttcaaataagttactggagtcttcattgtcagaatggctctttccacaatctcgacaattcgtttcggatacggagggaggtaagaatcgtccatgatgggttgtgtttgattgtagcaaaatacttttcctttgtgttctggtgaaatgctacggaagaagactcttgttttggtcgcatccacgtttgtatcaacccaacgagaccaagtctccatggccatctgtaattcgaactcaccctcctcctccatttgtttccaggttttggacatgtttttcctgcacatttttattaccttaaagacaacttcttcaaccataatttttcaaaaggaaaaccgtctaaattttggtaacaagtagctcatttcaagaaaattcaagggcatctatggtaatatcttataaatctcaagactgaaacagagaaagcagaggataatccaaagagcaaaaagagaagacgtgaacaatactcacactctgtgtttgcctccatgatcccaccagtgaccggtgttgaataccatgacatctgctcctttccacttagtggagtcagaaagtttatcaagtctcagagaacgttctccactagttttgttcacttcagtatacactaggtatgggctccaataaaactccacagtacatttatactcctataaataatgaaatagcatgaaacataacatgtcaacaaacacaccgtttcaaaaagcaatttattgcatttaaagcaatgatcaaactataatacctttgctctaaagactttgtaggagctactaccgtggctaacataggcttgagaaggaggtaaagaactgtaaagaagacaagccaatgattcccagtggtttctgttaagtgagtctccaacaatgataactctctttcctcttagcttctccaatacttgtgtgccattaaatcttcaaagaaaccaaacaaccttgttaatcttttttcaagacactaaaacaaatccattcaaaaaacacaagaaacaaagaaagaagttcttgtacaacttagatagatataattacgtactttgggagtttacacccttttggttgccaactccatttctcatattcatggtcagaccggccatttctcctgcagctaacttgctcgctaaggaaccgacaccgcgaattatcatagagagggcttcccaggggatcataaatccattttccctcaaacatgttacaatgttctcgttcgtcactactactgaattgctcattattattattaccaatggatcttgataaatgttcttctcttttgtcactactgctgccttgctcattattattaccaacggatcttgatatctccaataatggcagggtactagtgttagtgtgtgacgatgcattgggcgctaatggtggtgataagctcatttcttgaacatcaaaaaaagcttgagttgtagggattactgttgaaaaagaaacaaaagatgatacagcatatgatgcaaaaaatagttgcaccatttccacccttctttgatgatagatgtagtctccatggctaaagttgaccgagctcgagagtttcagttaatatgttggttgaaaataaaagtcaagttaaaagtacagagagcgagagtgatcactcaaaaaaagaaaaat

SEQ ID NO: 296678 - DNA, 2629 bp, Cannabis indica
ataagtgatgatgaagaaaaatattattattcccttagaataaatgtttgtaagttgtaactatttccaaagaaaaataatgaaaaaatcgatgaataaaaatatatatatatatatatatatatatgaatacttgcaacaatttaagtgtgggagaatagtaagttttatgaagaaaaaaaagatgcaatattgaattgttgaggagagtaattggggaatacaaatgaaaattatttgagagaatattgtatatgttatggtgtgatttgaacctaaattaactttatttatttacctttcatcctagacttatattataagcctataaagtcctattgatctttagattgtgtgtaattacattaatggagaatggtttgataattaagcttatagagtgaatttttgttgaaatacacatttcttttgcgatgagcattgattgttggcatgcatgaattaatttgaatgttagtaatatgatgagttgattgaacacacacacataaaaaattgactttaaaaagtaattatcttcagttgaaattctaatgattgagtttgaggaccgatgagaataatagtttttgtagtcgggaattcaatcgggacatctctcccgttataaacacaactagattagaatcaaaagaacgggccaactaattggtcgtctgattcccaaatcattttacaaaagaaactaaaataaagacaaataaaatattatagcatcacaattaatcttaaaaacacatatattcagtttactccaccactcaaaggacacaacacaataaatcaattgcagcaagtttataccagggttattcatccaatccaatccgcactattttgtttatagtgcatccgattcgcactaagtgcagatttctttttttggatccaatccaatccgcacaatggctcaaatccaatccaattgcggattggatttgttactttttaatattaaattatttaatatttatgaaaataaatattttttttcacataactggtaacaaaataaaacaaattataattattttatgtctccaacaacacattaaaataaataacaaataataaactcaaacgaagaaaaaaattatatgtataaagaaacgtttacttttattttgaattgtaggtagaaaaaaaaattacatataataatagaatatacattttatctattaagttttgaaatataattgtattatatatattaaacttttaaattattattttctttacatcaaaatattatttgtatatataattttttaatttttttataaagatgtgtggatttgattagatcagttacttttacatgtcaatcaatattcaatccgcacaagtgcgaattttgaatttttctaatccaatccaatctgcacaagtgcggatatccgcactttgcgaattagattggattggattggatcggttattttatgaacacccatagtttatacttgagcattcaactattgtgcaaggtacgtaattgtactactaacaacctcttcaaccgtagagaactagttacaaagatgaaacaaaacaaaactacgtcacaggaataagactaatcgtagtaacctaaacaaaagacactcaaaaacatatcacaaagaccagactttgcagtaacctaaataaaaacactaaaaattaagtcacaaagatataataatcctaatagtaaaattctgactaagccacacttaagtccaataaaagtcgatgagcctgattagagaaaaaaaacaacctcatgaagaatttaggagagacgccctaacagataatttctattttatttatttatttttaaataaaggttagcctaactaaatttgaataggatgtaggtgaaactagtcctaaacttagtttcagaaaaaaaaaatgaataggatgactagcgactgttcaaaaatcaagaccttactctaaataaaaaaaaaataataattttaatatttaattatgatcacagccatagtcatagatgactatgagggcttttaccctctgaatgaatgaatgagtcaccatctgtaggcccaccaccttaccgacctcactttgacaaaacaaacaaaagaaatcctaaaatttcgaaaagaaaaaaaaaagaaaatagtcaattcttgttgtatataataaaaataaaaatacaatggaataatggtacgcgttactgtttggcaaaaacagaactgttacgcgtacctactaactattgttttgtcacattctaaaacaagcatgtgctcctaagttatcaaaaacaaaaaaaacactgccatttcttattctctttctttttcccatctttgaaacttaaatttgcaagtcatgtcgcataaaatgaagtcaatcattttttcagtgtttatattacatttaatagctactaagtattaacctaattatagagtttttaatgattaaattaatattatacttggtggatttttatcaaaaatcaaatatcaaacaaataattataatttatagcaatattgataactatatgctagattttttttttttaaataaagcaataaataattagaattatttcacaaatacacaaaataataaaaaa

SEQ ID NO: 296679 - DNA, 1035 bp, Cannabis indica
tgtttctttattgatgttaaataaaatcgattacattgaaatggagttttatttagggcataaaacccaacaagatcttcaacagaaggagtcactatattctgctgcaaccaatgtaaggttttcttaaacccttatgtgtttaatttcatttttttagagaattcacatttaggatgttaatcaacatacttgttagtaaatctaaatcctagtaaaatattcccaacacatatcacggcaatggcggctggggggtttcgttccatggaacttaattacaagaaaattagtcctgatgatgtgtacaaattgggcaagggtccctagccatgcatccaacttgacttcgaggctccaaaatgttatttggatcccataaagttgtttccaagttaccatcctttagtattctgagtaatgaagtcatgacaaatccatgtttgaatcccaaaaattgaaaggagtcgaaacagaccccaagacttaggtgcctaggttttcacccagcccccaagttgacaacctagctagggtttcagtgtttgggaccatcttagtgtagatgaccaaagctttacacttacacatgaattataaatgtcacaaacatatttgaggcaacagaatcaggttggaatactttcagttttgagaacctacaacactaggtgccccgagtacccgtcgcccaggttgacatattctcatatgtcaacctggggcatttcaaccatcaaaataaagaactatcctgagcatttctttttctttgtccaaagtgaggaaactagtgctttcagataagaaacaaatcaacctggaggccaaaatggggacccatgacctaagttgacctacgctatgagcttagcgcccaggttgatacattgtcaacttgggccattttcaagaaaattttctaagaattcctccaagcatattctctgtttttgtcaaagattaagatacaactatttttggggatcaaatagagccatttggttacagccaagaaagttttgagatatttgc

SEQ ID NO: 296680 - DNA, 8896 bp, Cannabis indica
aatataaattaaattaattaatgtgtcaaacttcgattagtttaacacagtaaaagacaccaatttttaacaagtgatcttgattaaacaacaaagtaatttttagtcacaatttatttttaattatttttaactattcataaaatttgttaagactaattaaattcaacattttacttcttggaacaacaaattagcctacaatccatatagaaatgtatatgtataagacacttaaatatatttatatatataaatttaaacctttgtatagttctgacattgttagtaatattcatttaccctttggttggcatttgtgtgaaaacacataatatatatatatataaaatatcatttgaatataatgtttgttgaatttgtgactgaataattttgcttgggtctcatcgtaattgggatgtttgaaaatgtatatatagatagatagttggaagtgtgtattgttgaaaataggtcaatgaagatggtaattaatgggaagtgatagagtaaagttaaatgcatggaacgagagatatgtatatatatatattaaaagacaagccacgaaatgacaagcaatcaccttcaccaccgcatgccatatagaggaccacctgacccatcattatcatgttcggataaatttgttgaagccgcaatataattatatcatatataaaaggttagttctctattagctagaccactttatcatatgcttcgatttgatccacctatggcgcatatatatgtatacactatcacttggtatatatgcggtaatatattcctttttgagatgagaagtaatggggtgtggtatatattctttgacattgatattatagatatataaatatgttttactttagattaaaagcaaatcaagattactcaatgattaattatatattagattactaagcaccataaatctttacagtagtgaaagaattgggattcaaagggactaatccctccccaataacataacattcaaaagagaggtgacctttctagcctcaagtactattcaccaacaaaattttctcttttaaataaaaggaaactacaagactcaaaggactcacataaacttaagcacttgtagaaaagactatgcagtttcgagtcacgaatttgtttagaactatatttttttgctcattattaggccaactccatcacctttgttggagtatctccacatttgttttgagggatctttctaaaatatctaataccaatagaaatagtgtctattcctatatactaattactatttttttcatttctaaccaataacagtattaattaattctttttaagggaagtattaattaattttattgttttaatttatcctatatattttaagtaagaagaatgctaattacaacttcctattacaatctcttagtcaacttctacgtccgaaattacatgccgaaatattttttttttcaaatttattttaatagcggtattcgttatagttacagtatcatccctgtaaatttttgaaaaattccgaatagttcatagtaacgaaaacacaattcctcatattccagtttaccacgcgagtttaaaaaatttcaaacgtattttcggcactgtaaactattcatattttttcaaaattttacaggaatgatgttgtaagcataacgaacacacccgtaaaaaaattgaaaaaaaatattacctacatgtgttttcgagtgtggaaattaactaagagattgtaaattaacggtagcattcctctttaattagtacatatttgagctgatcatcatatgaaatattgtctaaagagaagaccaaacatgtatatctgaattacaagttaccactctcaggatataattaatgctactacatatgtgttcacccaaaaaaaacaattgaagtgatgaccagaaaatagaaatttggacaaacaagtaagtataactcgaggaattcccagcaaaaaaagaaaaaacttaataacccatttttttatcttaattcttgttaatttgagataaggtaaatgattcatctacaaaattaatttacaatgagagaaatagttcatttttatcttataatacataataatttattttcatatattaaactctaataattttatcaaaaaattgttgattcaaagccaaagagatggatctagattgcttatggtctttgtatacgtatgtgtcatgtgtattgtgcatgtgtatggtgatatattcatatagctatagtacatgtaataaataaatgacaatcataccgtataggcatatatttgatacctgaagtagataacatgtatagtaaaaataataaataacccacacacacaatccatagaaaaaaatgcataattttttcacagtttatgatctcttcaaatcattatgatacgatctgtactgtacatattcatcctccatgtgtctgcatctatctatctataattatatatatttattcaccccaattatatatattttcagaaagtgaaattaatcttaatgaaagcatgtacaccctgctcaactttcttcttataaaattggcacgcatgcggataaagggaaaggttgtaaaatttcttataattaaatagaaagatttattcttgctacacatcataaaataatacattcatacatgaactgtggtattcgtaagttaaaaatttaatgtggttcagaaagaacaagaataatattgcatatgcatgagtaaacttaggattaaaggatataacttcctttgaaacaactatacataaaaataaaagcttttctctaatttattggaaattaaatctcttttcctggctaagaatctgccctgttcatagcagaagtgtattattatgactaatctttcatacacaacttttttcttacaactatatatattatatataatattgaatgtgtgaaggttccattacattttaagtcattatcatgcattgatggtggcagtgtgttttcaatcgatcgatataattatttatatacataattacatatacatcttccttatttatatatatttataaaaatatattatgtttgtttgtattaaataaatttacaaaccaaatgttaaatgttatgataaagagctatctatgtcctttttttgaataaagattcttctaacctatagacagcgatagtttcctctacttacgtgcgtacaattctacttgaaaaatgataagcagggccggtctgtttaaacctctgattactaacctatgtatatgtctggtaacataattctcgaagcttaattaatttatataatcgacttattcaattagaaaggaacgtgaaaatgaaagtcttatagctatgagaaagttcttatgtgaatctaattagtcattcttccattcagcataatttgctttactttcttatatgatttgtatataaatatcgtaatttatcgtgtgtgtttatgtaaatatgcaacaacatataaatatttatatgatacataaatattttttatctaatgatagaatgctcttcatgaagtacatattattatgcctaaagatatgatgcaagtctaccctctttatagaacacacacaattaaagatcactttctcaaagcataatccccatttctttcaagtataccaagacatataatacaaaatatatattatctctatacatattttgtaccaaaataatatttacatccgacaatatcctgcaactcacatcaaattttttattaattagctatattgtttactacttaaatgcaacaaacattaatagtaccttcttttgtctgtaaatgtaatgattattcgtaattgttacatttcatgccaaataaacaaacttattaattaatttatttatttatttttgatgaaaaagctaagcagtattgctcaatcaaaaaacaatccaatttacaatcagaccacagagaaggccccagtcccaaccaatacaaaaaacccttgttagctatttgccattgtctaggcaaatatgcaaaagccaatctctatcaactactgctgttttacgaggcatagttccagctattctaattttacaatcagtttgaataatttgtacagtaacaaatttatttaatacgtcttattaattagtgaatagaatgttatttcaataaatatttatcttgttttacatcccactaattattaattttacatggtatatatataactggaaattggtttgtatttcaatttaggtttattcgtaaatgcctgatagttatgttggaattttaatgctttgatgtcagtggacttttgaaatcatgcatatatatggttcagaagtggatggtggatcactcaagtgtccattcaagagtcatctcttaaaaagataaattaataaggtcatcagttcactaaaacataaggttgctagtctaagcacacacacaatcgtcattcagaagtgaccctttagcttttaggagaataattaatcatatacatgtaaatatcagtatatttattaagagataaaattcaaaatgaaataactatttgcctgtaaaagtaccccaaaagcattaaaaaaaaaaaatcagcctttaaagtattgtatgatattaataaactacttataggaagagccaaggatcaatatatagttgatttaattttttaccttcacaacaatatctatatcagaagttaaattatgactagctagtataaataagagaacactgatgatttgaatcattaattgtagttcacaagtagaaaattggtcataaaaatatccagaaaccatatagctagctagctgaataagcctagcctcccgtataaatattacatgcgcaaaacacaaattaagaaaatgaaatatgtgcacaacataatatagtttgtcaaataatattctgcagttcatgacataccataatcatcatcaagagagagcaagtaattagcatagctggttgttgttgtgggatgcctccctcccactgcttagctaaagaattgaaagtcttgaaactgatgctgtgtgaaatcaatcaatatatattaaagtacaacatataattagtattatgttactatatatatatatatatatcttgcattaattagttaaaataattaatacatgcatgtacataatcaataatataattaaatttagtaagtttgtacctcagattattactctatcaagatctaattaaacaaaacgatgaaactagctatagctaagtgttgtgaaacttacttcttgggggattgatccggtggattcagaagtagcagtggtctgcaaataattgaatatgggagatgagctccaatagcactttcccacatttaagaaagaacactcgtccgctaaattaggtagtgcagctggagtacaagtattgcggtattgttcttggtggccattatggtgccaagtcgttaatggttcctcaaattcatgataattagcttgtagtactaaaccttcgaaggagttaatattttggccactatgggttccagattcttcttccccagtttccaaactccatgacgtcctcaatccatggcttattaggtcttggttgttaccatgttggcaatgatggtcaactacagcagctaacagtgcccttttaccccgcatgtgcttttgtttagtcctttctcttgccctctccctcgccttgtccctcgactccctcggtcgcttcaatccccatcttggtctggatactatctgtctcttcttcgtctctttattaaccaaagatttagaggtatctccatgatcaactactgcaacctcgtccaagccggaaaccacttcgcagtctgagttagtccctgaattagtactagaatttgcgatcttctctaaacccgcagcaagagtagtagtagtgctcgttttcctggccagtttttttatctctggtctagcctggatgagaagccactcgacggtcttgctagccctctcgtaccccaacatgtcttgcaagtcaaagaactgacgagcaacatctagggataatctcattcttctgtgccttggtcgtttccctgtgctcatcataattttgctgtgccgatctttcttggccgtcatcttttcctcgggatcagtttttgctgatcaccatcattattatcatcatcatcaccatcaccatcgtatctggtgatgtgatttttcctcaattctgagagatcttccttctggtgattgtggtggtggtgcaggtcgttggtgagattcatgggatcttcattattattgttgttaggctcggctgacacccctacatgggcggctttgtctgtactactagtacttaagatattagtagtagtggtggtagtagtagtagtattgttcaagtgaggaagaagaaggaggccgtcatagttgttttggttattgtggaggaataggttttcatcttcaaacaaaggagaagatgggaagtagaaaaatggttgtttggaattgggggtacttgtgtttgtgttaacaacaatatcgctaagtaaacaaggcttagaagtgttaggaataagagactggtcatgagaaaaagagatgaggtcattcccaatattccaagtgtttgatggaaacatttctatataaatataaaaatataaatttatgtatacttttctggggtgtcttgaaattgcaccggacaatatactagctacaggaagatcgaagcgatgtaatagggtactcgtcgaagttgctagatgatgatgttcatgatcagtggtgtgggagatttagcagcattgtatgtggtaagggccacttgaaccatctttgtcaattggtcattatttttctagtttaatttcttctttatctctgcaaaatgaaaaataccaaaaagatcaggacaatgagaaagacagccatgtgttatagtgtctgtgtgtatgttttactgttttttgtgtttcgtacgcagccttgagaaagactagctgcccgcagatgaagatatatatatatatatatgatctgtacgcgtatatatatatattgatagatatgcatgagtataaatgtatgtatattaacatctctaataattggtgcgtgagagagggaaaaagaggtatatgtgtttagaagagttttggttagtaaattatttacctcataaatgaaggtcaagaggtagataaacgaaggaatgaagtataaactcaggtggtagtcaccatataatgtcctggtgttggagctaggatgaagaagaaacacacttttatagtatggatatatatatatattaataataataaggtaagtgtctgaggagagaaaaataggtaaagctagtgaaagctggtggagagagatttattgcggacaaagagctatcttttcttaaacttttttcaaaaagttaatgggtcgtcgtgtgagactaaggaccgatattgtgggaagtgagtggataagaaaaaccacatagtatttgtgttgtatgccacttcacgtgataatcagatgggttcttgacgaataaatattttaattattattttgtaaggaaaaattactactatacaatactacactacaccccttgagctgagctgagagtttttgttttcttcccacatgccccacagatttcaagaaaagtagacatcagtattaataactactcttctctctctctctctcttaataaacactaccaaatagtactgctcagctcatcacccaagggccttttgtttccatggacactaattgcatctattaattctcaccattcattcatttacatacatcccataaactcatattccagacagaagacaaagagttcgtgcgtcagggcatgcaggtaaacatctttcaggtctttgctttgcttaattgtgtgatacttcttatacaaatgtatgctatttatgtgtatatataaattaaatgtgttgtttatatatatacgtataccgttggtatatatatgttggtgttacatttggtatgagaaagatgtggaggatgattattagaaaatcgtctttagagaaatgaataacattttaaggtggtgtatggtattattccttaaacctcaactaagactctaataaattagttggttgttctttaactaactcaattgtcacagttagtatactaggttaattgacctatataaagagtactattcatcttatttcaacagacaaaaacaagaaggcttaacaagaaaatacgaagttacaatgagaaagtaagagagatgactgagagggagagaatgagttgggattgagaaattgtattaagcagtattgtcgattatgttggctcgggttagtgagttaatgagtgttgagggattataccatggatgactcattgtgattattttcttgtagctcctcatattcacatttttaattctctccattaatatagattagtggcagtactttcaaactggagtatgaccaagttcacattgaacttaggatcggaacaagtagagttctcgtgtgttgtgtctggaagttatctagattcatctctatgtttatgtttcttgtttgatatgtttttgctgatttggttcttgatttgtttgttttgattttacttttgtttgtttaagtgtgatcttgaatctggaattacaaagattatttcctacgtatcagagctaaaattcctacaaatcagagttgggttcttcgatcgtcaagggagattcaaagatcacttgtttctgcaccaagaactcattaagaatttaccaagggattctacaaaaacatagattgaaggaggatgtcaatggctaggttcaaactaga

SEQ ID NO: 296681 - DNA, 2628 bp, Cannabis indica
tatatattttcatataaaaagtttcacgattccgttgtcgtccagcggttaggatatctggctttcacccaggagacccgggttcgattcccggcaacggaactttttgtcaaatttaattgatatactaaattttttaacaaataatagaatatatatattttcttatataaatgtaaacaattccgttgtcgtccagcggttaggatatctggctttcacccaggagacccgggttcgattcccggcaacggaattttttgttaattttattttcaacaatcattgtcgtttggtgctcctacgacaaataaagtcaaccattcaataattatcacttatcagccataaaatcaacactttgatttgaaaaagaaagggcaaccgatattttaagccacctttgtttatattatataatacaatacaaactacaaactcccacaatatcctctctttcccataccacaatttgttttcccaaaatattaaaaacagaatcagtctcactgctttgctatacacaacatgaaatttgacaatacattacaaatgaaccaaaactgaggatcagaaacttttgacttcaagatgactgtttgtgacgccaaagaaagaaaaagcaatcaatgctattgctaataaccattcaataatcaagataagaccgagccaatggaagaacttgctgtattagtagaatttccatttgagtaagcagcagctcatgatgcacaatgttcactttccgatgccaagttctttactaatgtctcttgtcaagctaaactgcatggtgttatgccacggaaagagtgtgcgtgtaactggaagctttcttcgaaggtcctgcaaaacaactttccatttcaaaaaacttgatgtaatgcacaaatttgccttccgcaaaactctcactaaaacaatacacttttccccagatattagaagagccagatgtaaactaacagaacataataattgttagtagccctgaaaaaagagaatttagttcagaaaggtgagccatgttaagatatcaaacattatagttttctgtgttaatagcacttaataaatgggctcaaacaaagaggaatgtgaagtaaacagatcaagtattaattccgaaaattaaaattttcaataggcaacaatgagccttgcagaccttgaaagtggtatctggcaagtttgaataggatgcctgcaaaatcccaaatgtaatatgtgttagcaagagactctaaagaacaaagaatttaacagagaacaagcttggtatgaacctcaagagaagccaagtactctgtctcatggtgacgaatgatgctggctaagctaattgcacaatcttctgcacactgaaacaatgatgaagcatattaaccatgcagaatggctaaaagacatctacttgtaaccaattaggacatgtttgtttgcaaatatgatgcacaattagccaacctgggcaatggtggaatcctggcattcatgtttggcatctagctgaacatttccctcctcaaaataatgagcacccaccttacagcaaaaaaatattgactaagatgaaaagaacaaaggcaaatagatggaaaagagaacaaatttatcaaaaaattacataaaaaactcaaatatccgtcaatcagagcaatcacttgttaggaaatacctgcaacttgccacttaattccactagttggatatcatctttgaactcaatgttccagactgaacgccagctaccattgctatacattgtgtcaataagacttgcattaatttcaaagttgaaactggtaaactaaaaggtgagttgaaatccaaaagtcctacataaaccacaacacacaaatgtggtatgaaatatctcagtagttttcatgatttagttaatatcacaccagaagttctgtggactgtgtctagcagcggatatcaccaccacaagttcaaaatcagatcctggaccctccaaatcttttccactcccacagtaaactgagcagacaccttttggataagcttcactgatatatttcagaatttctgcgtcaagagcacacctgccaaataatagtatcaagcaccaataactaacagaaaactcttggtttgctgagtaaaatatgggagtgaagcttataaagcattaccgatattcctcaatatatggggagggaagttcctcatccattgcaggtctaacctctgtacaaacctgaatcaatttagcacattatgataactttactaacacaacatatgaaagatgtagggcaacggaaactaaaatgacataatatcacaatagataaagtcttccactcttaaacttcatattgattcttctttgttatgtttatgctgcaatttctaacctaattttcaaacaaaaagttttaatagcagaacttacttgtttgacatgatcaatgatagcaacttgagcagttctaggatcaaggaactcatttttaccgagctctccgaatgacgtaatgatcacctacatacgcaataggtcaaataagtggagatcaataccaaaaagattcactacattagaatttatatcaaattggaaagaaaaaaaaaaaaaaaaaaacaaaaactacg

SEQ ID NO: 296682 - DNA, 15622 bp, Cannabis indica
agttttggcactatagctctataattacggcgctacagcaccaaaagcactttttttgttatttttcttaactgcttcaaccttgttctataaaacatgcataactctcgtgtttggattccaaatgaaatgacattacatattttggaaagctaagaaagaactccttcattttgtatttcacaaactcttccaaaaaatgatgggaacatagtcataaattagctcaaagatctcaaaccatcacaaactcatctcttaagcacaaacctacaaatttagagaaaacacatcaaattgaaccaataactcatgggaaaaaaaaaaaaaactaaaaataagaataaataagagtaaatgaatgcataaaatacacattcttcacaccccaaacttgaatgattgcttttcctcaagcaaaggcaaaacgttaaaattaaaaataattcaattattagtatgacaaaaaaattttagacctatggaaatttatctgaaatactaaactctctttcaatcattcaacttgcattcaaaccaaggattagaattttaacccaccaaactaaacttcaaatgttacctaattattaaagtgtgtataggtcaattctacaaaccctatatacatatgactcatatgcataaagactcatcataccataaaacagtcaagataactataagcttgcataattaattcatctcctttaatgtaaactaaagtcatgtagatcaaaatgactttataggtatgtaacgttagacttagataaatagtgaatgagaatgtcatttaggctaattttacacctagacttaaaaaaaaaaactaaaaaaaattcaagaccttcattgtaaatccctttctctctttagtatttttcacttaatgctttcttttttgcacaattaaaatttataatcctctaaaattaatattaatatttttttttcttttttcaacatgaattctttctcttattatttttcttcttttttctttgagatatttcaatatagacaattagtcataactcactatacatacatccttcacaaaaataattctcataaaaatttctcatcccacttacatcatatatttcatttagtacacaacaaccttttatggtatgatttagagcaaggataatttgcttaaaatttttggctcaaacgattcaacaaaaattgccttatcatctctatataaccaagatttaagattttgcttcaaaaaattgatcacacaagttttatttttctcaatattaaccaaatcaaataagtctacgtatatataatcacaaattatataaaataagtagaacaacatataattcatataacaatatcaaaagtaagcataacatcttaagcacacaatccgtaagtactcacacatactaaataacatcaaggagtttagtgtcagttcatcatcaaatcacataggtcataagtcaactttagtagtacaatcacttaataatataaataaaaactttaaaactatccatacaactcaatataataataaaaacatgaaaattgccttcctccaatttttttgattcgttcaggggccgtaccgacacttcaagtctgttagggaccatggctggttcctggtctcgtcctaagacccctggctggtacttagttcctttccaggaactctatccagccattctaaggctaattcttccctggccagttcttggtggaatttttagtaacctagccggttcatggtgaaagaaccataagctcgccagttcatggattaacacttcgtgggctagccaattagtacccacacgtgttggcatattatctcatgtttttatccttgtcttattcgtgatctctttggttgttcacctccctttgtcttttggtatagatgaacatgcatgactattggagaggtgacaattggatcgacgaggacttactttctcttctgtacgaagactatcactcagctgttcttcctctgagagctcatcagacaactctttaagtgactttgaagcgagcagtggttcttcgaaacttaaagttcaacatcgccactactttgagtgaataggtgatgagatctacgggagtatcatttggaaactgaatcgggggtggagatagttcatgcctaagtcttggacgtacattatccggtagggtgtgcctgacacattgccttttggatgggcatcttccgcgtctagagatcttcctatagcagcagctactgtgactattgcccagtactctgagaaacattcaaacctgacaagaagaaaactcacctctgaccgatccccacattgccaaactcatggcaagggggagagtttgtcaggtagaggaggttgaatagcttgaggctagccaagcgaaagagcatatggccgacaaagaggaggaaaagctaaaagtttattaggcagagcctgaaacaaagcctagggctacttggaggctccctaaggagtgaaatgtgatccatggcaaccccctgggctcttatggcgaggctggagtgcctctgaacagtaggggtaaaccctcgaagattgggattaaccatattgaggatgaggttgctaagccatggattctttagatgggtgaatgagatagttgggtatctccttgttctacattatcactaccaagcttgacgacattattgatagtggacttgttgggcaggtctagtgcattaggcctgcccaggaccacttggctcaccatctgtagccaaattggatagcgtggtttggcccacatgcagagcagggtgcgatgcttcctttgcacctgtattttagggacatagcaaacttcttcaagctatgtccaacttagattgcacaaaagagtatcaagtacctgttggtaatttttgtgttatacgctgagttaggatggccacaaccttcacctttcgaggtgaaatattacttagctgaaatccaatctaagttagaataggactaggtacttttactttagctagcatggctatcagtatcttggcgacactaatgacacgaccatgtcaaaggttggggggtatgccagaagttactttatggaatagaacataaatggcgtctgttagttttgtcacctagttccaacttaaaattggccattccccacattgagacagagggatagggctaaccatatctatctctcccagtagcttggtgtaacatttgcacattggcctatgaggagaacttcaggaagtatggtttataccctcctattgaggatgttgttgctctagataaccctcctaaggaccctgacaattctcttattggaaaggagaaaaccaaagggaagagactcactgttgaacaggaaaagagaaattctactaaggaagcctctttggccaagatagcccaaaaagagagcagaagggaccacactctttggctgcattttatttttgggggcactgttggtgatgctctagttttgatcaaacctgagcggtagtggcctacaaggcctgcctagcctgcgccgacagacaaaggcaaggggaaggccgtcatgactaaagatagctctagtgagtcctgttttgaggacgagggacctttaggtggcactccttcggtagatcatcctgaggacactgacgatagtaacccttttaccttttcttgcattttatattaattacttgtatgttgaccttgttatttttctttttatagacatgatctctagaataaaagatttgatgaggtgaccattgaacaacccttatggagggcgtctccagtccaaggttgctctgacggggactgcatcagatgtgacccaagttcctttaccgccacctccttctggcccaccaccatccaatcagcctattattcgagattctttgcccaggacaactcttcctcctcctcccaagacacttggcaagggcagccagaaacatagtcaggcagccataaacatagtcgggaagcctgctccagcaagagtgagaaggccatagaggttgtccaaaactaccttggcaagtgcctaccaagtgttgatgaacaacttcaggggttggatgatgattccccagactacctgacagccagcttcttgagagatggggcatttgtaagttatcttattatttgctcaactatttacttcatgcattgtacaactctattgatcttatttcttcttttttgatttcagcttctcttgaagcttggccatgctcatgctagggcaagggctctggaacaaccttcaagaagaaattagaatgcaaggatgctaaacttgcaacaaaagatgtgcatcttgctgagcttgacaaggtgaaggtcgatctagagttggcagagaaagagctaagagagttgaaggaccagtacaacggcatgggccagcttcttggtactcctaccaaagaggtgactgaactgacctcaaagaatgtcaagttgaagagggagttggaggctaccaggaaaacctgccatgataggcaggttagtctttatgtagctttgtggggtcaggacgacctcatagctgagttttgtgacttggccatggagactttttatgagtgttacctccataatcccgggggtaattttttttatgttgagtattctgattgcgagggcatgatttcctagggcagggagttgtatgagggtagaacaaccaaagagagtactccaagagtgtcttctagccagcctcgctaagcttctaatggtgtataggccagccaggttggggaggctggccaacattctatggagacacatgttagccaatatttggcggagatacatgacagccaggtttttgtcaggtaggccattaagggggctgcccaggccactgattctacccacgaggctcctgttgctgaggctgccacccaggaatcacctgcgcatgactcacctacacttaacaacattgaaaagctttagttttatctttttgtgcttggttttttttttcttcactttttctttgtttctacctggccctggccttatgcatttaaaacaatgatagttcttgtattgccttaaggccttttactttcgaactagtgcccgaccaggcagtttttaatcttggatttatcttcttttggttttttaaacatgtagctaactgggaagcctttaatcccaagtttatacattttatgttcaccttgaagcatgccgtttacacatacttagctattaatttttggctttgatgaagctttaaatttttttgcctatgtatatttgtgcttgttcgatgctgtgtgtgggtgcccccaagtgatcaagcaaacttttggtctcttggtcacttgcaattcaccaagtatatagatcctttgcttgtgcatcttcttaggaggattgttttatacatatgttgaactaaaaataagaattatctttaaaaagctaattcgttagcaagttgtttgacacaatttgaactggagaaacatctttattcattaattggtcttacataagtgttgttactatgcaacatacattttttaagtacgaaaagcttgcaaatacaatatgtttttaaaaccatgttttggctactcctgcgcgacatactgtgcaaaggccaccactaaagagtggtggtcatatagctcttttttgaattcttgcacagtgagacattataggaactgctactgaagagtagtgttttgtacaagtgggctactggtagtactttctgagatgttctctattccaatatcttagtaggagaaccaattccattttctcattgtaccggtcaagtttgtacgcacctttacttgtaattttcgtcacttggtacggtccttcccagttaggtccaaacactcctactgcagattcttttgcattcaggaatgctctttgtagcactaagtctcctacaaagaatttcctctccttgacttgggtattgaagtacctggcaacattttgcaggtaggcatgtagttttaagttagcatcgtctcttctttcttcaatttcatcaaggaattctggcaacaaggtgtggtttgttccttggtcattggataatgcaaagggtgtctatctagtggtcgtcttctcggtgttcctgtgtgaccaaagtacctctgggaggaggttgggccagctacctttttcctcttctagacgctcttttatagtgtccttgagggtcttgtttacaacctctacctgcccatttgcttaagggtgtgcaactgcggagaatggaaagcatctttgatactatgctccttgcagatgcacgcgtaccagaagatgatctcataatgagcattcttaatgtccttccagctgaatatgagtcatcaacatcattctaagtcaaggaaacttgaatgttcaagaagttcaatcacttatgttgagtcaagagaatcgactccattactggcacactcctggtgtgatcaaagttcctccctttgccaatcatgctcaaatcagtcatcgaggtcgtgactccaattcaaatcaaagtcgtggaggccatcgtggtcgtggacgtgctcatagatctttgaaaggcattagatctaagatcgtgtgccagatatgcactaaacatggccatagtgccatcaattgttgttatcgtcatgaagaggattctccaccttattctcagacatcgaatggagataacaccaacactaagaattcctttcttgctacaccaaaaaccgttgttgatcccgcttggtatgctgtgcgatagatcacattacctctgacctcaacaatcttaatctgcaaaatgagtatcacagtcgtgagaaactcatggtagaaaatggtgaacttcttcctatttcgcacactggtactgccttttcatattcaccttctcataacacaccaattactttacatgatgttttgtgtgtttctaatatcaagaaaagcttaattagcatttctagactcactgcagataataacatctttgttgaatttcattctaatgtatgttatatcaaggacgaggtgacatgtcaatctttggtggaaggacagcttaagaatgggctctactctctctatcctagtctagaaaagtctccatgtactaaaccttgtgtgactcaattgttcaattatgtttcagctagtgatcagtgtaaaaactctagttcttctaaatgttttagtactgttcataccaacttctgtaagtggcacaaaagattgggtcaccctacaataaggctgttactcaattagtcaatgtacttcctagttataatacaaagtctcaatcaaataaagctaaattttgttcttcatgtgcctatggtaaaagtcatgttcaaccatttaaacttgcaaaaaataaaaccactcaccccctacatctcattcattctgatctgtggggtccttcccctattctatccaaatctggctatatatattatgtgacatttattgatgactataccatgtatacttggatttttcctttacaaaccaaatttgaaaccttatctgtgtttcaaaactttcaaaagtaagttgaaaagtattttagtcagtccatcaacttgtttcaaagtgattgaggtggtgaatatagaccattctctaatcttattacctcacaaggcatattgcaccgcaaaccatgccttcatatacatcaatagaatgatagaattgaacgtaaacatagacacattgtcgagagtggtcttacacttctcgctcaagcaatgatgccccttcatttctggtgggaatcatttctcacagctacatatcttgttaataggatgcccacacatgtgttaaaagggaaaagtccctttcaatgtttattcaactctactcctgattacactttccaagagtctttggatgtgcttgttatcctcacctaaggccctataactcacaaaactccaatttcattccacaaaatgcttgttcattggatacagtcctgaacacaaaggctactattgccttcatccatctgtccacacttatgttactcgcaattgtctctttgatgaggaagagttttcctattctacactttttcctgagtcccctaactctaccttagattattttgagtatagcacagatcttggttttgctccttgttttcctatgaatgctctaagactacccatgagcccactccaacaactgttccttccacacaacaagctgctgcaacaactcatacacaaaatgcaccaacaattcagcttcagcaacaacaatgatgttcaaaatgcaccaacaattcagcttcagcaacaacaatgcaacaataattcaacaacaattcaacatctatacctggtgcaactcacacaacttcttcttcaacactagccactactaataatactattcctcatgttactgagccttcaccaatatggccttttcatctgctactgctactatttccaatgatcttactgtctcaacacagctgcagccagctcccgttaatgcctttgtccctgctcttgttgctgcttctggtgttcttctagtcccaatcaactcagtagctccctcacactatcagtcagtagctggttccacacatggtatgcaaactcgtgtcaagtctggtgttatcaaacctcaagttctagcagctacaaaacatccttttattgttaacaaaggaaaatgtgagcctactactattactcaagctttacttgatcctaaatggaattcagctatgaacaaggaatttagggccctagttcaaaatcatacttgggacttggtacctcctgatcctctttacaatgtagttggcaataaatgggtgttcaaagagaaatttaatgctgatgggactgttcaaagacaaaaagcacgcttagtggctaaatgattttaccaaactccaagccttgatttctatgagacatatagccttgtcatcaaacaagctactgttcgtatctttcttgcaatggtcgttcactttggctgggagattcaacaactcaatgtggacaatgccttcctccatggtgtgctaaaagagacaatgtatatggttcaacctgaagggtttgtcgatcctcaatatcctcattatatttgtcatttaagaaaggcaatttatggacttaaacaggctcctcgggcctggttcgagaggctcaatacatctcttctacaatggttgtttactccctctaaagctggtgtctctcttttcatttatcacaaaaactctcaactcattcttctccttgtctatgtcgacgatatactagtcacaggatcacatctgtctctcatttccaaacttgtgacatacctaaatcacacctttgctctcaaagaacttggcccacttcattattttttgggcgttgaagcttatagagattccactggcatctatctatctcaatctaagtatgtggctgatttactcacttgactcaaaatgacaggagctaagacttgttccactcctgctgcacctagacaaaccttgtcttgcaatgaggaagaccaatggatgatcctagtatctatcgtagtaccatcggggctcttcaatacttggcactcactagaccaaatattgcttacattgtgtcgaagctaagtcaatttcttcactaccccactacagcacattggcaaggttgcaaacgtgttcttaaatatcttaagggcactgcaacacatggagttaacttcaaaaaaggatcatctcgaacactggcgctgcaagatttctcgaatggcgattgggccagctgcctagatgacaaatggtccacgggtgcctattgtgtgcatcttagctcgagcttggtctcttggagttctaaaaagcaaacagtggtagctaggtccagtactaaatcaaaatacacccttgctcatgtcacagctgaaataatgtggctcaaaactcttattcaagagatgcatataccaattcaaaacacaccaatcatctggtgtgataaatttggtgttgcatctttagctgccaacccagttcatcacgcatgaactaatcacattgaaatagatgttcacttcgttcgtgacatggtacttcaaaagcttatagacatttgctatgttccgagcaaatagctgatgctctaaccaagggactctcagttgctaggtttctcaaatttaaagacaagctataagtggttgattccccttttcgcttgagtggaaatgttgagaaatccttagaagccaactcagcaaaagatagttgcagcaaaattagttagactgttagcaattagttacaacttattacattctgttattttatctttgctgatagttctttgtatttactgtgctataaatactgtcttctataactctaatcaatgaataagagagcttctttcataatcaacatctctttgtaagctcactttacgtaataattaacttttaaaaaatatcaataattaaataataaataatcatggaacagcgtaactaattaaatgtgaataacaaattgaacaagataaatgggatcttcccacaaagaatagtactcctactaaatagtatgtatcaactcaaaactctaaaataattaatttagtaaaaaataaaatcttaagcaaataataaaattgaattttctactcagccctactatcctaaaatttaaagaattatttatacaactatcatgagctatatattatatttatatatatgtgcagagttgagattctgatcccctatgtgttgcaacaaaatggctagaaagatatatttcccattccttttgtcaaataacaatgtctacccgtgttttgatgggtttgagtttaatccccaaactctctggagaaagaagttctggtgcaatgcacgaccggtttgatgggctggccgggtttgaaccattacttgatgaagaagcaaaatgtttttgcctatagaaaccgaatcccatcaggaataactcaatcggaaccaccattgcgtatggatgctcttctgttaccaatgagccacatgcttgaacctgaaaaagacacagagcaaccccatttaagatcttgtgaaaaaaaaaatggagtcaaaaatttcgagaagtaactttacctcaacaagcgcacagcctttcctgtccattttggtactcatatacaaggactcggcatgaaatggactacaatcaccaacaaaaataagtgttttacattgcaattttttgaagccttctgtaaggtcatgcctcctgtcaaataaattcatcagatacattacgagatgttatatttgataaggtgtttaataaaagatgaaaaatctgtaagactaatctttaagagaagagaagggtagtactcattgattgcatgaaggaaacgcatgacattcaaactctgtctttcatccaataactgcaaacatgtcatgaaaaaaagcaagaaatattgaagtcatgtataattaccatccttaaacttatagttctctgtgtaaagcagtgcatggcataatcaattacgagaccgatgttccttacccttcggcaagcttgaattatgtctgactctgcaccatgcataccacatctaagctcctaataaagttaaggatatgaaaaattgaaaattaaaaacaaagtccgaatgataaaataaatgtccctatgaaaaaaggtcaaaattggcaccttgctgaagtagcgctggaggaggcattccttcaatacgccacacataccatagaagtacaacaagttcatcaatacctgcaaagcagagttaaaggaaatattaagcaatgaagagattctaatggttattcattgaattacaatggttttaaaatacttaatctaaattacacaacaaaggtaagccactggcaaaaggtcaaaaaattgtcttgcccaatttcctacttaagttcatgttgtgttgtagcataatgacctttttgtttgtgcttgtaagcccttcattcataactggaagacaggtcagtactatcaataatttaattgcatgcaagttccccattatcgatcgataggtaatataaagtgaacccaagaacgcaaaatacccaccattaacgctttatgcactcaaaaactctcaacacttgctaaggcacttcaaaatattcacctctctcgagtatatacaacaaataagaatttgtgcatttaaagacctatgaacagttagtattgttggtacaactgaatttgattttaaaatttataattcaaatcatgggaaaaaactagtttcaaatacgaataaattaaacaaatttaatatttttaaatttttgttagcctttgtctctccttcatacaaacacaaccttaatatttgaatttttttaaaaaacagtgttcattttctttgacatactaataggtgatattgacttggtaaaagattaaaataagagataaccttgttgtaaagccattcagtccatgaaggtgctttgcatataggggatacaagaattaatccaagcacgcgttctcggtacttcatctgccaaagaaattaagcaactatattatgaaataagaacaacacgaaaaatcatgaaaggttatctgaaaattggtgactcactgcaaagagagtaaggatgtaagcaccagcagttacaccaaagcacataacctctctcaacctggtttaatcataaatatatacatagtcaaaaggtgtacaattgagaaccatagtaaacactttaacgtaagttcttaacaaaaaactaggataattcttcaaaatatttgaaacaatattttattctagtaaaatcttttgtataatgattgacagttacaaacattcaatttcatatcataaacaaggtaatgattacaatgtgcactcaatagaaccaaatgcgtattaaataacacaaaatcagttaaagccaactaaaaagtgagtaaatctagaaccccgaatggataacagtgagataaattaacattaaacatataaaagtggtgggggtgatagtctggaaatatcaaatatataggattttctgccagcataacaatttgataaataaagatactttcatgccaaacatcaatcatactaaaccttcccatgtcattaaatttagcaaaggcatgactatcttctgggcttaaaatactacatataattaagctgtttataataacacagccaaaataaaatgacataaaatacacagaaaaacggtacaagcattaaaagatgaccaataggattacccaaagaagtcaagcacttcaacaacctggtcagctaagtcatccacgctaagaagtggatcatctgaagaaatcacattagctcctaactgcaaggactcttaaacaaatggggaaaagagaactccattaaatttggccaaaaaaacttaatgaataaataaaaacacagtgcttctacattagaaattggatactttgacactgacctcatggccaggggcatcaatatggtaaatacaaaagttatgaagtagcaaagaagctgcatcctggcagaacaagagaccttggaaacaagacatgtctgtagaaaagagaacagccaagtagtaagaaaaacataaacacaatatgcagttcaaagcttgtaaaggattctcacaggaatataagtaaacccaacattttggagaaaataatattcttttgagtgatgttcaaataaaaacatattaaccatttgaaccgtctcaaggtactaactatcactcagaagcaagaacaaattaaacccacttgcagaaacaatagctaacactaaaaactcaactcagaacaaaaaaaaaaggaaagcatacagttgagagcaacatctgagtacgtgattaaagcaggtttttcttgatccccacaaacaaaaacagagattgaacctttgcttgttttcaccacaaattcctgaaaatgtcaaaatgagagaatgagaaaaataagataaaaataacaaaccccattaacgaaaatattgataataaaacaaagaaatgggcaataataatatatagcttgtattagacaataatatagtagtaatgtagtaaatgaaagaaaagattaaaccgtttttggtgggtgttattattgatttttacattaccttccctcccaaaggaatcacatcaatgtcaatggaaactgagtcgcttgactcgcccatgactcagtcagtcacccacataaaaaaagtaactggagagatttttttttttattttcttcaactgtcaaaaaacacaaaacctttctcactttctaaacacaaagctgcactcttcttctccttgttcttttcttctctttagtttccttctttatttccgaaattaccgaaaacccctcgaaacagtaacgaaattgcaaagctaaaccttactcaatatagttgctctgacgattttgaccccaggtcaaagcttggactccttgtccttttgctgattccaggtcaattaagtgaccgttggagtgggtataacggtcaatcggcggaacattactctccgccttgtatattaaaagggcaatccccgagatgcaggcaaccgacaactaaaaacgacgtcgtcatgggaaagacttgtatgtattaagtagaatagttgagggttatttaggtaatttcctagtaagcatattacagctgtacgccacctggaagccgcaaaaaaagtaggctccaggagagttattctatcattgtggaccagctcatctgtcccctgcttactggagtaattccttattattaattttacactatttatttccagtttaaatataaaaaattctctcataatagtatgagaaaattaggaaaaaaaatgtgttgatcccatttacaaatttaaattaattagaaaaataatgtatcctccaaatgaactagtgtatgtccaattagtttgtacaaaactataatatacatacatagtaacattttccttattgttggtgaaatttattaattaaagataaaagctgatatagagcaattgatataaataagtttttgctaaaaagatatatatagttttatactcttacgtaagaacgtaaatatggtgaattggtaatgttattgtatgttgtgaattgtgatgcatggtatttggagttccgaaattgaagagtacgttaagtgagaattaatataaatatggatatgattaatcatgatcacgttgcgatgatgtgattaaaaagtctcagcttaatttgctgaaatcttggaacatgacatgattggtctatattgcacatatcttacacaacaaacaaaacgcgttttaaaagacgttgatcacggccattatatattccaatcaaccctcccttactactatacacctcaaaacttgaacctccatgaattgtctttatagttaatattgtgattggtgtaatattttaattaagagagttaatcacaactttttattataactttttaattaatttttatgtttaaaattaaaattacatgtcagaat

SEQ ID NO: 296683 - DNA, 6702 bp, Cannabis indica
tcagataagcgagcactcttagctagactatcgacaaatgctaagtaggtgcgattagagtgttgcattgttacatcaagaaaacttttctttatctttaaagcagatgagaaccaagagatacaatgccaattgggatgcctctccttcttgaaagcatttagcacaacagaggaatctgaaatgataaccaaatcatcccagttattgaattttgcccactgcagagcaatgaaccaagcaaaaacctcagcagccacagcatcttccccaacagcgcatttcacctcataaaatcaatcattcgtgtcacgattccaagcaagaaaaccagcaccgatctttccatcagagaacgaaccgtccacaaagattaatttccttttttgagagacggcaagccccacatcagtacacatcttttcctttccaagatccaagtctccattaacttcacactggatgaactcccagtattttttccgtaccgtaattgacaagtcattgacattgaaacccagatctttgccatgccaatactcatttcgaagactccataaggtatcaataatcacagccagacaaagtaagaaacgatacctgggatctggttcaagcccagagcacatctcaataacgaaagatttcagaatttgtcgacaccatggaggaacgaatggggataggggacccaaaccagagagcaacagcaacggggcattggacaaaaagatgcagcggagattccatcgcattagaaaaaaagcaacacgtttgcaatgcaccaaatttgtctccggtgggcagagcacctgccacagcacgccaaagaatcatcctcatccgcgggtgaagcttgtccttccaaatccatttccaaagaggctcaatactcccaaagcgacttttctgatcaaataaataagcctcttttacagtgaaaactcctctattagcttccttccaaattagcaggtcgttgcttagatcatgagcaatctggatcgtactgatccttctacccaaggcctcaccaaataagaaacaaaggtagctagtattccatttcttctctctccgaaacatcaaatcagcaaccgaatggagacttggagctttacaccgaatagactccatgagttctctaaactcttcatagcttagccaagggatccaagtttgaaacctgagatcaattgactcccctgaagctataaccatgcaagaccctttaaggatgacctgtctcgcatcaagaatacctctccaaacaaaagaatcaccattcttcctctgaattgaccaaaaggagtcacaaggaaaatatttcgctttgagagccatagcccaaggtcttccatcaccagaagctagaaaccaagccagctttgacagtaaggcattgttaacatcttccatccgtctgaaacccaaccccccggaccatttgcgacggcaaagagagtcccatgaaattgtggcaagaaagcgttgttttccaaggcttccattccaccaaaattttcaaatcaaggcgtctaactccctgcaggaagatagaggtaattgaaaggtggacatcgaataggaaggtatggtcgaggctatggaagaaaccgccaccatcctccctgcataagagagagtacgcatcttccacccctccaatctttgttttagcttgcttcggatgaaatcaaaatccttcttctttcgcctcgagaaaacaaaggggttccccaaatatttttcctcatcattgatagtacttatccccaattgagcttcgatgttctcttttaaagaccttacgcaatttgaagagaaaagaatgcccgatttttgtttactacacacttgtccagaccatccctcgaacttctttaggcaatctccaatacacttgcttccatggtattggccctagcaaagagtaaagtgttgtcggcaaacattaagtgagtcaccgccggggcctcccttgatattttgatcccatgaatgttaccccgatcttgggatctttcaagcagccttgagagaacgtcattgcagaggagaaacaaatagggagatatggggtcaccttgcctcagcccctccccggatacatcttcttttgaggtttcccgttaagcaaaactgaataagaaacagtaccaacacattgcataatcaacttcacaacttcagtattgaaaccatggttttccaacactctttgcaaaaaaatccactctgttcgatcataggctttatgcatgtcaatctttatagccataagacctcccctccctttctttttcttgatcgtatgcacaatctcctgagttaggatagaagcctcagctatccaacgccccgggatgaaagcagattggtaaggggacaccaatcgatctatcaccatcttcaaccgttgagagatgatacggcttataattttgtaaacaaaattacatagggcaatcagtctgaatcggtccaccgtcttcggattgtctcctttaggaatcaaacatagaaaggcgtggttcacatttccactcaattcacccgttctaaagaactcttgcacaaatttcgtcacatcggttctcacaatctcccagcaacgtcggaaaaagcatcccgagaacccatccggtcccggcgcctttaaagggtgcatttggaaaacttgtatctttatctcctcctcataagggatttccgatagcatctcattctcctgtgcagaaattgacggagttatcaaaccttctagatcacagggaacatttactccaccagccgtataaagtttcttaaaaaaacccgttcagaatagctcctttagctgtctcactctccttctgcctaccattttcatccagcaaaacaagaatctggtttcttctttttctcaccaccgtggccgcatgaaagaaagacgtgtttcgatcacctttggccaaccaaagctccctagagcgttgtttccaaatgctttctcgacgacgcaatatctccaagatctcattctccactcttctttcctcatccaaaccatgatcatcaacttcacaagactgaatagctagaagattagtctccagaagtttcagttttgtatcacattccccaaaaacctccgttttccacctttgtaactcccctctcgtgcactgcaattttgataccatcgtacggttactagacccgataccagaccccttcgaagcagcattgatgatatcgatacttgatttatcattgaaccaggcttcgtaaaacctgaaggggtaagagcctttagaaagtattggcgccgtgtccaacaacagaggaccatgatcagaggccaccataggaagatttcggactctacccgtaggataaagagaaagacactccggattggatagaactctgtcaagcctctcctttaccaatcccccagcttcccgtttattccgccaagtgaacttacaaccagtaaacccaatgtccactccacccacattaaacaagaagtcattcataattcgaccatcacgaggggcgaaattccttccccctgatttatcctccttcttacgaattatattgagatcaccgattatagcccatgcctaatcatcatcattaacatatctagccacatcttcccagaactcgctcttacgatcatcatacggtgggccatatatagcatacaaattccatttttcattattagactcatcaaaaaccaaacattcgaaacccgttggccaaaccttcacagacttgaaacccgcagaaggattccaaaataaacagaagccccctgcaaggccatccgaagcagtgaatttgccaaattgaaaatttaaatctctaccaatctttgccatgaaaacacagtccactttagtctccattaggaaaacacaatccaccttaaagttcctcacccaagccccaagagcttggaaagccgcgggtctccccagaccctggcaattccatgaaagggacatcatggggagtggggagcttgataagggccgcctcctcgcccacttgaaaatttttatcgagtttaatttcactaatcatgttccccaaggaagaaatagcattaacatcatcaacaacaataggagacgaagaattacccataatcgctcctttacttttctttttccgtctgtggctactcgacttttttttgaactggatttcttcccctgtttcaatgaagcaggactatcacagctacccaccacgaatgcagctttgtcgatatgaccatctcccaacaaggggcaaccgacttccttctccttctcaccatcaccaatgatcaccggtgtaacactacctcccgcctttcttttctttccacctgtgatctccactccatgctccgagggaaaccatttagccggagtcaaagctttggtgccaggggggttgagacagatgggttttgtaatataatgggctcaggatggtggtggggggttcgggatttacaaagttcatgttggggtacatctatcatttgggctgcagttgggcccacattgggcataaggctcattatgatattagcatcatttcgatttttacccagatttaccatagggtgagatgggcatgagcaaggggttcttcgtagggctttgttaacaatgttgatacaggggttttgtacagctgtctcattcaaatttttgtgggtccccccaaaattcccctgacaattcttggtagtggccgccacactactcgtaccacccgtaccaagagtgttttccaacgattgcatggccacgtcaattgtatgactaccctgaatattcttctctccctgaatattcaccgcctccacttcaccaggatggcctctgtttgccaacgccgccggtttgggaccaaaattatcatgaagagcagggcgccgcgtatcaaaacaatcccttatcggaacggaagccttcaaccatggtccatagagaggaacagctttccccataggagggtaggcaaaagcttttggccgagagcagttctgttcgttgtggtcgagaaacccacaattgaagcaaatcaccggtaccttgcaatacttgaaccgaatccattctcgacgattccgattaatgctgagatagaaacccgcaggtatttgagcaatcgtccgaatatccacccttagctttaggaagcccctccgagagatgactctgttatcagcaccatcatgctctatgaactctcccaccttggcccctatgacagcagagttttgagccactagatagggagttggtagcccatggatttgaacccacaccgaggctttacacatattcacattctgccagcttccatcctccggccaatctctaatattgaggagttgattagagattaaccatagccttctttttagaatctccttcttatcatcttcatagtcgaaaaagaaaccccacagtcctttctcaagggtctttatcttccaggctcctctcagaaagccccacacccccgtaaggatctgcttgattctgttttcggacatactccgagtccccagcagtttgaccacaatccctattttcactatttcagcatttaactcaaaatcagcttccaattccaaagttgcttcttccaagaactgtagccgaagattttccacctcctccgatgtagtagacataacttcattctcaccagccattgaactttcgaaagaaaacaaaggaaacgagagagaagatacacagcgtatcagttggtattaccacatctcacacagagaaaattccatctcacagtacatgttactgatatttatttttacttaaataaggtataaagcgtcccacattgggaaaactttcccagttgtgcatataaaaggacgctaaagctatagtttaattaaaaaataaacagaagaagaaggagaagttgctatctgttgaatctttgaaagtgagagagaagaagagagaaaggaattctgttattgcttggaaagaggtactacaagaaaaataggtgtcaatgaggacaaatttcgtcagtaaaaaatattttatttgttagtaatggctatcaatggcaacttgtcgtcaataaaaaatcattggtgataattcatcgctaaaagtaagtatcaatgcatttaaactcgtcaataaaataagtatgaataaggacaatattgataatgtgcatgtatatatctttatatattaaaagtgactatctaacagttttttttggtttaacagaatattctaagaatataaaaatattctattaaatttaacagagatgttagcattatttttatctaaatatattaatattagtgttttaaaaattaatattacttttaatcgtataactctaacacgaaatacaagctaagccaaatctaatttctaaatatgaatttatcatcccttaagactccatatgcaataaaagctctagaaatccctagagtattttcaatcgattgaaatcaaccttctatttggctgatccagcactagaaggagaggggactatcggacaaggtaccactgagttgttggcgtcagcaggtggcgacggtgcgaagttggtgcaagcattatcgcctcggagggctctggcagattcgtcgtaggctctggcggcttcttcaggtgtgtcgtaagtcccaagcca

SEQ ID NO: 296684 - DNA, 7393 bp, Cannabis indica
aataggtatactattttcttcttttcagttttccccttttaattttagggtctggtatggcgttcttcccctgatgagtcctcttagttttcatctgggttttctctgtatttggatctgtactcgggtttttcctttcaaagttttgtgtttatgtgattttagattctggttttgatcatgtttagtaaggtagttgatggttctagcactttcgccctttttagatatgcttggaaaaaaaaaaaactttctaaaaactgctctttttccccttcgtttgcttgtttattatttttgcttgccctctggatctttcagttttccatttgttcactctttctctctctgtctctctgtttttttttctccttagtttttgggtttgggatttgcatatatagctgcttcgtatttaaccgatatgtaaacatgtatatatatttcatatcttctgatcagggcttgcatgcagcagttcacgggttgaattaaaatattttggaagaaagtaatttaatttactgatcaattgtttttttttgtaatgttcttgtttgctcttgaaatttgcttttggccttgttcgtacgaaaacttctaaccaatctatcgccttattgggaaatcggagtgttatgtatttctcatttttctttcttctgttagtgctgatctttaatcatactgtgcgatccattatggggtcaaatggaattttttttttcttttcatttttgctaggatttctatttattgatttttgggcctttttctctgttattgttttctatttatgatttagatttgccagtatggatttggtatgaagattcatgaaattgtttgcaaataatgttgtgtaactcattaaaaatgtttctgattctgatagataaagcattgctgttggcagagttgaggagggatatttaaggttgctgagggaggataagttattgttgataatgattgatgtcaaatgatttcaagtctgattgacattagaaaccattggtatcactaatggcttcaaaaactggttttagaggctcttcgaatcagcatcagaaaacatctggtgttcaaactatacagagtaatgatattagaccaccagttttagggacaagcaaacccacgcttgccactactcctgaagaagagggtcccaaatatttacaaaacacatcaaagggtgtagtagaagcttttgaaaagaaaaagtttccgaattcgaatcaaaatggctctttggattccttgattaataaattaaatgcaagttcattgtcagaacaaacttcagtagaaccagattcgtctgctactgatactcgtggctctatagagagttcggtagatcaagaaaagaagatatctgagtatggaagtgtgaagaacagttctgtgtccggaaaagttagtgatggggccagcagtcttggcaagactagtggaagtgcaaagatcagtgatcggattgattttgttgagagtggaaagagtagtatgtgtagagggagtacaagcagtgatgttagtgatgagagcagttgtagcagctttagtagcagtgtaaacaaacctcacaaagcgaatgacttcaagtgggaagctatccaagctgtccgagaaaaagaggggatgctcggtttgacacattttagactgctaaagaggttgggttgtggggatattggaagtgtttatctgtcagaattaagtggaactaagtgttattttgcaatgaaagttatggacaaaggttctctagcaagtcgtaagaagcttctgcgtgctcagactgaaagagaaatacttcaatctttggatcacccctttcttccatcgttatacactcactttgagactgagaagttctcttgcttggtgatggagttctgccctggaggagacttgcacacgcttcggcagaggcagccagggaaatatttccctgagcaagcagtaaagtatgctcaattaactttgttatcttacgttctgtgtgttcttggtcatcttttgcattatccatgattaagtgatagtgaaacaaaaaagtagatatctcactcactgttttttcaggaatcatttgtgattcaatacattttagtgttgtggaaattggttgtttaatttaacttttatattattgctagtatttcacatgcattacactttatgtctggtaggtggttcgtcagattctcctgtttatataagcatcaatatcccaccaaaatctgattataaaaaacaaaatttctcagaactccccatttactgtctgcattcttccaaatttggtgcagtcatgcatacctgttgtcataaagtgccaaacctacctctatttatcttcttgcttattcaatctgattcttgtaagatggtgattttattgtaaccaactacttaatattatcggaaaatgtcttgttgctaggaacatttaatgagtcattttggtatgtactccaggacagattgcagagacttaaactaaataaatgtagtaagatttgagttacccagtaactagggaacgtgaatagtatcttgtagcatcttcataaagaaggattacaccataacaggtcatatttgagtgcaaagagtaattgtgtcaatctttttttgctattgtcaactgcagattttatgtagctgaagtgctgctagctcttgaatatctgcacatgcttgggattgtctaccgtgaccttaagccagaaaatgtactggtgagggaagatgggcatataatgctctctgactttgacctttccctgcgatgcactgttagtccaactctcgtgaaaggcacaataatggagtcagaccccatgcgaaagaatgtgtactgtgtgcagccaacctgcattgagcctccttcatgcatccagccatcatgtgtagctcccacgacttgcttttctccccgactattttctagcaagtccaaaaaagacagaaaacccaaaaacgaggttggaaatcaagttagccctttaccagagctcattgcagagccaacagatgctcgttctatgtcatttgttgggacccacgagtatttagcaccggaaatcattaagggcgaaggccatggaagtgcagttgactggtggacgtttggtatctttttgtatgaactcttgtttggtaaaactccatttaaaggatcggggaatcgagcaacattgttcaatgttgtgggacagcctctaagatttccagaatcacctgttgtgagttttgctgctagagatcttattaggggtctacttgttaaggaaccacagaacagactggcatacaaacgaggagcaacagaaattaggcaacaccccttctttgaaggtgtaaattgggctttgatacgctgcgcgaccccaccggagatcccaaagccggttgagcttgagcgtatacctaccccaccaccagcatcaacaagtgaaaaagctcccaccattataggagctccagaacaaaaagggtcaaacaattatctagagtttgatttcttttagggatgttaaacaagacaaaatgctttatgtctctggacatttcagggatccttaattagtgaggtgaaggtttagtgggtttcattttcttgatagatatgctgaggaatcaatcttatgtttgttattgttgttgcatactttgacaattttcaaatttgtattgcatattgtatggattctctttcaccttcaaggcatgaaaatggtgccccaaacttgtttttttaccctttactttttgtttgtcctttgtcacgagaatacaaaggctgctatcaactgtacctgtaatcgcccaatgtttcgctcagcttattctttaagaaaagctacacattttattgactactcctgattcatgaattcaaatttttgttgtacatcaacttaaaagaaaaaataaataaaaaaaccatcacctatacaaaataaattaataatcacatttcttgggagaaaaaatttcataaaaaatacaccaaaaaatatctcagggctgtgctatatttttgttttctttctttaggatatttataatttatattatgtaaaaaaatgtaagattcccaaaaaaaaatggttttaaaaatatacaaaagcatgcggtgagcgtggatcgaacacgcgaccttcagatcttcagtctgacgctctcccaactgagctatccccgcttcgtgataaatttagtcttaccttttggttaaacttttagatctaaaacacatgcaggagacgggcgcttccttttcgggtttatcttcttcttgcaaggactttgtggagttatgctcagaatcattggatttatcaacactgacacgtggagctggcgatggcggttcactcatgatgggttggtccatgttctctactcggtttccttcgcaaatgatattaacctcgcaactttccggtgcactttttagtagttgatcagccaatcctgttcctcttcccgaccttaatttcctaatatcattgtatttaatttaaataattacttatgcaattatcataatattcgtaattgttatttatgtaaacaaaaaattatgtattaccttaagttgggtttggcgattccaatgacgagtttccttatgtttagaattgcaacaagatctatgattgccttcgccagcgcatcactctcaatcaacacggtatccaccttaatctgtttcgtcataaaaaaaatattaataaattgatatattattctatagtttatattagtcaacagagtaattcaattttataattgataaatagtttctttttattacattggcagacgaacatttacggaggaaggtatttagaagctctcttctcttgcctctttcctgtgccatgtaattctccacctgctctggactcacttgacttaacggaagctttcctactgtcaaattatatttcaaaataattaccaacacaacagcatagattaactaatatatataattgattcaatgctaatgagtatatatatacatctctaaaattttcagtgcaaacaaaagtttacataatatcatgaatgagtaggacaaattaaccctaggcattgacatcaacggcatcatttagaccatgtaattaatttatacacactactttattattaactggtttatttaataataagccaagcaacatatataatcaagtaccttgcactatacataaaattgtcaaaaaaaaagtcggtttgaatattattattattatgatcgttgactcatgcaccagcaaaaaaaagaagatcgatcgcacttacatggagtagggatttggcggatctcaggataaatatgaatgagataaacgatgatcgccggtgacagatccataacctgtctcaaagtccaattcaaggcgtccatgctcgacgtgcttttcccaaccgccacgtaaatgcaattctcgccgccggcaccgctcgatgattgttcttctccgatggccggcatcggcgcaaacttcttgatctcgaatagctccttaatatccctcgtaacgtcgtcgttttggctaataattcctcctcctcctccccctgatccttcgtcttcttcctctatttcgcttatgctactactgcttctgtgaaagtagccgtagtactcatcatcacggggaccaatattacttactttgttgttgtcgttattgttttccgttaacgaaaccgacatttttgggctactttttctttttccccgaaaatgtctttattattttctgatctgagttgttgctaagattttaagtttcgaaatttcggaaaagaaagaggcagaaatatctatatattaatgatatgaaatcatttctgtaaaggcaaaatataatgtattaatatgaaaagggcgtttctgtctttttctttttctttgttagaagcattagtgtggttcggtgctttgttgggtagtacgttttggagataggcacttacgtggcctagaaggtacaactctagccaagcttgaaattaggagattcagtctactttcagaacctttttatttttcagttggatcttaaaagagacaaaataattaaagataaaataatataataagaggagagacgacgagggcaaaggtgctcaattgattcatattatcttttttttaattaagggaccgtacggtaattgtaaaattaataatgaaatgagatcatcagatgaagcaattcaataatgtattgtaataataataatactatgagtgatataacacgtatagaatatgcgaatatgcgagtcagagtatataatagtcaaattaagaataacaaaggtagcatttttctacatacataatatacatgtcttatttataaacaaacttaaataccacacagttgtgtggtcattgataagataataagatgcgacatacatcatatatgattgtaattgtggactctctgatttaagaaggggaggggaaagtcctccaacgccattgtcgtcattatcattatttttctatatatatattcgtatcataactcgtgtatgatcgatgtcatgcatgcattgtacacaacttgatgataatataaagtgtcctactatggttcctatggatgaattttgttctcggatgctctgataagtgatttaaaagttcttgaactatttttaaaataaagttatataaatgatgttatatatatatatatataatataattactacaacatacatcctctctcaatagtcaattttaaaaatgaaactataatacataaataataataaagaactctaaacgaaaaagagtacaacctcaaggtaatatattgcaacagcggataagcgaaactaatttttagttttatttttttaagaagaatttggcctcattaataaaatctgaatagttaccaaactaatttttttttctttctttaattacatctcgagatcattttttcttaaaaatgtcataaattttagggagcctttatcataatattatccttatgtgagaaccgataaaagtatatcatattgcattatatatttttatttgtgcaaattaatatcatcatattcaacataaactaatataattattgtagacgtaaaaatttgcttaatatttgtgatatttttgagaagtccaatatgcaagtcagacgagcccatcaataatggattcaacaatattgagcccaataagacagtcagacggactcactaggtcttgaaatagactaacgagtgaacctatgggccacaagccggatcgtcccgcaaccgggtccgagcccggccagtcagcccaaacgggtaaaatcaagtaaatatggaaccagtc

SEQ ID NO: 296685 - DNA, 4337 bp, Cannabis indica
gattctccaatactttccaacttccataaccatttatcagactcctgctcagggacagacccattaagattgatgtgggggctatagcccccactaacaaaaatattgttttttaaaaaaattaaatgtaaattttttaatttaataattataggtcaaaatagtagaaaagtctccacaaaattagatgaatttagtaagagtaattataatatagctataaatatttttttatgataaattagccctcacaaaataaaaatactgggtccgtcactgctcctgcctcttcggaactccatctttaagaatagcagtaacaatttcgtggttatacaggtggttaagtttagacaagctccagtccccattacaaaaaaaaagggcctgccacctcaacttccattaaaattgaattttgaaacttgaaacataacacagtgacatacagttacaaattaaaataaagcaatgccagtcagttcttctgatcaatataaattaaagaatcaaatatatacaatttcaatttttacaaataaaaaaaaaatagaaaaacacaacaaagacttcctcctttttattcattataatattagttttaaccaccccaaaacagaacaatatccaatattgaactcacattgagaatatggggcattactaattattcttcacacaacaacaaaaaaaaaagaagaaaaaaaaagcaagattttaaaccaaaacacacatttttcattgtcgtttttccatctgagatgagtaaaatgggctcagcatttccagcaagaagcagcaacaatgggcctagatttccaaccaagaaccaagcagcccttttcttcgacaacagtgtatccttcacaggcctctatctggcccaaccattgtttcgctgagcccaacatcttaatgggcccagcttgaaacccggcccggctcattcttcttctccactggtctactctctcgtgcctctccactctagccggaccttcacagctgattatgttcttgatctcttcagcgaagtagaactgttcaatcttagctcttctggtatcgtacttgggtaacatggcgtccaacgaatcaaagattgcagagtagtaatggagagcctccatgaatcttccaagaaagaaaggtccattatggctagagtcttgttcgacaagaacaaggactttagggttcagttcgtgaatcgtttggagtacagaattgagagctcctctgctttctttgaccacgcaatggagttggagaacgctgttcaccgcaataacttcgtctttcgaagttttgatgtcttttgaggtcagattctctaaattactcttaactactgtgaattctaagttgaggtttaaactgtttgcgaaaagctctagttcatctccgatgatttggaatcgttcaacgcagagcccaactgcagtgattcttagtcttttaggcagttggtgtgttttggctctttgggcgaggctttggataagcgcacgccattgttctccatgtgctagaccaagggtcatacccaggtcgacgacatggacgtaactctctccctcaaaggcttccaatattgaagcattagctacaaagtgaccaaatttaatatgtgggctaatttcatagaccaggcgtaaagcctcttctttcttttctgatattccaacgtccataatgttcatcatcataggtagtggtggtggttgtggtggttgtagcgcgataaaaccgactgccccaagtgggtgaaccatggctaggcgatcagctagtccttggacaaagcatgaagctacacgttggaaagaagagccgaataccaatgcattggctcttagctctgataacagaacagaggcatgtgatttatctctacaagcaacagcttctgcacaagcaatgagaagctggacaagcctcatttcatcagcttctccttcttctgaggtagctctgttctcttgttcagcagcttccatgattgcagctgcagcttcttctacagcctctgctgcgtgatatagttgtttataagtccatatgtgatcacggaattgcatagtctgcatgttacttaagctattagtactgctgctgcggctcatcatgctgctgtttgaagtgtcattactatcattatttcctcctccacctgtataaggcgtgttgttattactcgaaatcgattcctggaagctatgaactcgtttcattctcttgttttctctggtgtcatatgagaaagggaaaatcaaggtgttgccacggttgtcccataaggaaggcatgtaaggaaaaggatagctagccatggctgagagactgagttccacaccactcagctctttagtcttttcaccattgatgagctcttttgtgaggagatggtgaatatcagccatttcttaaactaacccttttcagcctttcccctctctctttctctcttttagaggtattttcaacaaaggccctgagggaccttattgcttgacaattatggcttatatagggaaaaaatttcactgataaaaatccactccatgaggatttcttgttcggcgtgattttcaatacttctataatagaaattgctgtgagagaaaattaatttgttattactgtcttcctgaaagggagcatcaggacaaaagagcatcgatcaatcaaggaaagcgatgcctatttctttccagagtttttggatttcgttcttgtcttgcatcatgcataggtggctggtctatattttcacttggcgacagtggaatactcaaatacattcaaaagggtatatgtcgttttctcaattgtcctccgtttactcaaagcttgtaccttttttctcatctgagaatattttctcaactgtacctacgtatcaatttcaggcggagcctcttcaaatgattctgctacatcaaattaaattaccaatattcactgatggagatggagtaagttttctttaatcaagatttagtaaaagtggtcacttttattcagattaatttcttctaaggtatcaagtgatttaaaagatgctcttccaatagtgttgcaagttgcattacatcttatatatgtccctggtcttcagttatctctctctttcttatatacagacacacacaaacaaaattaatcaatatccatgtgatgatagcttcactagatgtagaatttgaagtcaacgtacttttacattttacttttttgcagcatggtatcaaattgaacacatgaatagtctggccggatagtataacaatattcagaaaaactacaagcacctgtgttcaagttttctgcataggtatgttttttaagccatatacgattctaaatgtaagtgtattttatatataaaaatatatttatacacatataacaaacatattccaagcataagctagtaatacttagtatttatataataattgttgttcgttacaatcaactttcaagtgaaagcttcctcctctgacagtactagttttgatggcttttaattcatattaattagattttttcacatcaatttcttataaagtcaaatgttaatttatacactatggactgcatattctttttcttgaaagcaaacataacaatgaagaaaagacaagtatttaagattctatttactacttgtcattgtgacgtatgcgtcacacaagaaaatcatagctactaaggactttttactattttatgcatatataaaataataaagttgaaaaggatattatcatatttgtatctaaactctctcaataatatgggaaaaaattaagatttttcgttcttaaatttatagctattggagatttttttttctttggccaggcccactgactttccttaggcttaggtgaagcttggccgaggttgtatttcttactacaattcaatttttgctattgcgattagttgtctttgtgacacggttttcaatgttttagccttgtcactgtcacataattttaagcatttttgtcttgtctctttgatatgattttattttgttttgcttcgttgttggttcttctttgttctttgatgactcgccatcaaatggttgttagtagttgggaataacaaatttttttttcgattaaagggttgctagtagtgcagttacgtaccttactcaattgttgagtgctcaagctacgagattgaatgaacgtactgcaaccgtttctattgttgtgtctttttgagcagtggatgaaaaagaatataggtgtttttaaaagttaattgtgatgctgcaattttttttatctgactttattttaattttttttttt

SEQ ID NO: 296686 - DNA, 3753 bp, Cannabis indica
gcatttgtgaaattaacccaataaaaattatatatactatgagcctataggttatagtagtaatgattaaaacttctttttctcaacgaaaaagaaagcacgtctttaattatttcttgatcagtatagataccttcttgttattatctcaaaaatcatcatatttaaatagaaaatctatacatcaaagattcaaaagtggtcaatgattatgtataagtcaaattaacttggtaaataaattcatacgacagttttttctaatgatttagttgacttattaagaatattctacagtttaaaaagtctttaaaaaaataaaataaaatctagctcctgtagtcaatgaaatgaaaccattgaacaagctttaattggttttcacttcagtcgaaaattttaataatctaataattattttgacttgtaagtcttttgttgggcttgaattgatcatcttctacagtataaattaaactatttagaggaaaaaagaaaccaacttttattagaccatcataattttagtaccactttttttctaattgatttattagtgttattggtacgacacttaatttttttattattagtatattatgttttagagattttcactatctaaaatttgatgatattttatataaatatatatatatatttacgagctatgttttactatttatgatttttcttttaactaattttttttaagaaacttcgtaaaaggaagctaaaaataataaacaaatatcactataacaaattttacttttaatcataataaaatttgtgattaaaagcaaataagttaagactaattataaatcattacttttacgttatcactaagaggtctatgaataaaggtattagtcacaaaaattataatttattctctcaaactaaattagtgacaatttgtatctatgttttgatcacaagtaactttttgttataactaaaaatcacatttaatcacaaaattatattgtaactaagagattgtcactaaaaataggttttttttctttttaatttgtagtataaaacagtatgaaaacaacgaacaaacaacgtagtatatttttttttaaaagaactaaggatagttcattgctgtaaataattgggaatcacaataggggatccctccctgttaaagtagccattacaatgacttttctctctagcccatttggctaatgcatcaaagccatattgtcttggggagaaataaaaaggaagttacaatcatcaaacaaattacacctgttcagtacctcctaagccaaaggtttcaaaatccacatcgggggacaaattttttccttcaacgcatcaatcagcaccttcgcatccgaagcatcagcaaacgctatgaatctcctctgcccagccaactgcattgcccactgaattgctaaaagttctacttcagccgcagacgaggcccttacattctttgcaaactacatagttttgttatttcgtctgtctagcatacccaccgctaaacctagtaccctccttccaagaagcatccgatacacacaacacatccgttgaattgcagattgtactcccaaccaaaccagttggtgttcttctacctatagccgcgttagcctccatcaacgctaaggactcggagtatcttctcaagatggagttcctaacctgtgtaatatcaaccaaacctcccttgaacaagtattcattcctagttttctaaataccttcaaacaggcagcccgcaaaggataggaaactatcagattgctctcttagaagtctcgccaacatccaatcgagcctttccttcactgaatttccaccgcccacccccacacaaattggaaaagggctgctaaaccataaggcccgcgcacaatgacaatcccagaacacatgaacaacggactctacttctatatcacacaacggacaagacttatcccttacaaagcccagtctatctctagttggaaggcagcccgtaattactcgccatagcataaccgaatgcctatagtgcagcttctgactctacaccttcttccaaaagtatctatattcggtctgtacacttgagtagcctcatagcctctcttcacactgaatttcccgtcagtcgcctccttccaaacgatcatgtccttattctcgcatggtaatcgagcaatttttctaattctttcacccaatgtatctccaaacatttccttaaagtttgggaacctcggccttacttgatccataaggttgataaagtcgcagtaatcaagccatggaatccaaggttgtttctaaatatcaactgtgtcacctctacataccaaggtcatgcctcctttgcgaatcacatctctagaattcaattcctttccaaaaggctgaatctttacctttgacttttgtactccaaaacaaagccttcttgcaatatttttccgagagacacttgacccaaggcctttcaatttgtgaaaccatctgccaggccagtttggctaaaagggccttgttcatatcctcaagctttctaaaccccagacctccgttaagagtagtagtacaaagtcgatcccaccccaccagggccatgaagcattccttctctgtatcccctgtccactagaatctcctaattactctgtcaatttctcgacagctagagaccgggagcttgtttgtagacatcgcatacataggaatcgagagagccacagatttaaccaaggtagtacgacccgcaaaggaaagaagctttgttttccatttttcaatcctttttaataccttatctttcaaatacaagtattcttctctctttttccttttacaaaaggattccccaggtgcttttcatgaccatcacactcactgaactggtataggttaacaatgcaaatgcacatttcgacaaccaccgaaatcacataaccgtgtatcccaactttaacatatatatattagagaaaaattataagcagtaataaattaacttactacggcgtaccatatcaaatgtgatgtaaacaacaactacttcagcttcaatatctagggatcatatgcttcttatccagaaaatgaggaggagtagctaagaaaaattaccatacatgatctctctctctctctctgatgagagcttacatagtatattactgttgtgaaaacaacataaaaataataatttgtaattttataaaataacagttcaaatccataaaagtatattaagaaaaatgtagatcgatccctatttttataattttttattattttactaaataaaaaatagtaaatcacaaaatattacaattcttacccttgtattatcacatgttgatttcttatcttccattgaagcaaggtaagaaaggataattaagcttttgactgttggaaattgttgtgctccaatagaaaattaaaccaacaagattacaactaactcaaagcaataagctacacataaaacacaatatataaatagtatatatataaaagagatgtgagagcaatctcaacaccacatacactacaagcgtataataggggaatcacaaaacttgaacaaagtcttacacttttgtccaaaatcttattttcccctaccacaagcacttagggaaaagaaaagaatggaaatagcttttttgatttatcaagcctatagtatttctagcaatgtgctctcttgataaaaacttgttcactcccaaagtgaacccaagacctcta

SEQ ID NO: 296687 - DNA, 4043 bp, Cannabis indica
ctaaaattaaaattaaattttcaacctttataatcttaaattaaatgaaagaaaccaactatccttacgatgtgggaccacggcgctattatccaataataaaaaaaaaagcacaagacctcatccttttatcttcttctttctcctcacccaaattcccataactgaaagaagagatgtctatcacaggctcacttctccagctccctccattgcactccctcaagctctcatcttcctccgttaccaccccttttctccatggctccactcccctctctctcctctcaaaaccctcttcagctctcaccactccaactctctccccgccctctttccttcccccaattcgagccatgagatcaatgcggggacgcgtcgtttgctccaccaacgacaagaccgtgtctgttgaggtggttcgtttagctcctcatcccaagtacaagagaagggtcaggaagaagaagaagtttcaggcacatgacccagaaaaccaattcaaggttggggacattgttcagctcgagaagagcagacccattagcaagaccaagactttcatcgctgttgctgttcccgataggaattcccccaagaaaagtggtgaagaaggacaacaagagcttgggattcccttggagtctcagcaacaaccggtttaggatataaaagtgagggttttgtaattcgatgttggtttgtgaatttttactgcttttgattttccttcttacttattatgataatgtttcaagttttagtgtattttgaatgcccttgttgaattgataaagtttagtcttttataaatttgagctgtttttctttgacattggtgttgtttgatggatttagctaatatagctaacagggtttagtaattgcaatgtggaattgtgagttcatttttctgggttttgcaacggttttaaatggaaagcttcacaattaagtagaattgagacagattccttagtagttgttgaacctattaatggaggtgccaaaatgacctctcagtttggaatgttggtgcacgattgttgcttgatggtctcttctttaaacaatgtcttaatttcttttgttaagcgatctgcagatagggttgcccattcgattgctaaacagtcctgttttatgtgagattgtacttttaatgaactaaattctccttctggtttgatttttattgtaatggatgaacgtttcaattaaataaaataccatttcatttacaaaaaaaaaaagaaaaatttatgattagttcataatgtggatttttgtttagtgcttttgagtcattgaaaactacattatatacttcataataatatttcaatattgagcaaagaccataataatttcgaagcattttcgtttagaaagtatttttactagaaagattcaaagaggtgtgttgtttagtatgctgttgcatatttaatcaaattgtataacatagtttctttatgttattggagaagaacatcgagttttttagtagagaactattggttattattctgtgacctgtattggagagtagaatacaatcaaaattatcatataatttatattacacacaaggaaggaatatatcacatcagttctgtagatccattgtagattttgaataattattttctctacgatgctattgctaactacagatgttccttccttagaaccaaataatgaatgaaaacaaacccacttgagcataggtaatttttaaaccactaacagcttagcctacatgctttacaatcaattagctaggtctacctatttaaaaatactatattttagatcaaccctcctcacattgcaaacttgtcttaatatttttcaaagtacatgatataagagtattaacagaatccactgactccatagttagtttggctgttggggatgaatttgttagtatttggaatgctactgtaagtaaagatcccccttctgaacttttttcctctggcctagaggtgatgactagaggccttgactctatcccatcgggaagaatggagaatccagacggcaaaatcgcaaggttgcttgagtcacatccggtcatcacagattgcattccggagatattcactggtgcatagaccaccatggattcgaaagggttggtgcagcaatcttgaagtatccacatgctgttatctttagagttaaccgtctgagaagaaaagaaaagaaaaagatggaaattccaatctattttagtactttgtttgagtataaagaaatcatttgacaggaaaaggaaaatgtttattgacaaggattttacttggatggaaactgcattgccacgatcttgtcctttcgataagttggccatggattcaactgcacctccacttgagattatgtcccactgaaatttacaccgaaaaattgtcaaaacaactactctaaacatgtttcttagattagcatatgaaaacgaaaaagtgtagtattgaacctcattccggtgattttcgtctctcaaaaaatcgaatagcacatttgcagaaacaggcaaccatactgaggaaacggcacaaagtatcagtccaagaggttcaccagggtcgttcatgttcttcctagaggtaattcttatgtcgtcccctgttttgctagacactttagtccaagtattgtagcttgacgctgcaactgcgcggcagaaactccatgtcattctctgtgccaacttcagtatactcttcctcccggcaagagtggctacgcctggtaaagttcaacaagtaaaagactaaagttaaggaactatttttttaactcatagttttaggtccaaacatagtaaagaagatagttggaaatgtcaccagttgaatccttcataggaacattagttgccatgaaaaagaccagtctttcacattgaagttgcagagtagctatccagtgcctggctccaaatgctaggccactgtttacaatagtacggtacattgtatgaactgtgctcttctggcattccaagtgttctacccaagtcacctgttatattatattcatcaccaatctatattacatcatattatttagttaagaaaaaaaaaagataaagagtttcaatttgtttttcccttcattcaataacgattttatggtcgaccccattaatcattttcacctttctatgtttcccttttcattttcgagttgttttccattacctgaccagaagtactaattatgaatatgatgattatatcactgtatactaattgatattattacagtatctaataaaaacaatataccttgcaatggccattggatttgtcttcaatgatacaaccagagggacgttttctgcatttgattaacgaagcatcaatgttttcttcgacattatcaatggaaacatcaacaacggcccactgctccgcacttaattgcttgcaatatcggacgaaatacacttctcttgtgggcaccatgggtgtcagcatttgcagctccgcaaacatctacatccacaaaattttaatcgcctatttttaatttcttcttcgtaaatgttattatatatatacatgagatttttactacaactagaatttgttctattaataggaactttgtgtgtgtcaatgtgtgtgtttataccctctaatttcattttgtttttagttgagagattatgataatttttgcaaatcaccaataataatttcttaatggatgagtcacatgtgacccttttcgttagaattgtataataatgtgttaaagttaattaatgatgagggacccaatactttatgagttgtattatctgacccaattgactcattccaatactataaactcaccaattgtacggctccattcttattctctgcttcaccattggagataacatccactgtcgccgccttcgatatcatgcacggaaacatctccttccattgattctgctcaaatcccaaaaaatattaattaattaataaattataattttttattaattaatgatgaattttaattttttttttaaa

SEQ ID NO: 296688 - DNA, 4660 bp, Cannabis indica
cctagagaaagactcagtatggaggtgggagttataacaaataccagagttggataataggcttaaaaggatggtctagattggttatgccaattactacacaaagaatcagagggcgaacagattccttgtggctcacagcagaaaccaaccttatgatagtgtatcacaaaggctttaccttcaaaagaataacttttacacattttcaggtattgttgaactaaattattaatgttatattgtttcttagtgatcattattatgcattattttggcttataacatatataaaaatgtagcttggatacaagtgagtaagggaaaccatgtcccagtaagagctactttcaaaacaaagaatggattcaaacatgctggttctgttgttgctcaatctcattgttggtcttttctcgaaagggggtctcactgttgatgagtcaggtgttgcagacctctattttgaggtcagttcaatcaattatatataataatgattatgggattaacttttaaacaatactaatacaaacctggtgtgacaattcgatctcttgtgtataattaactgttgctaacttgctagtgggtattttaacactctttttactaataataatggtacaatttagtatcgattttgctataaatttcagtttttttttttttttttacaactttaatatgaaccatattattacagagcaataacacatcagttgacatctgggctgatagcatctcactccaaccttttactcaaaagcagtggaaatcccatcaatatcactccattcaaaaggtaataataaatcctcgagaattgctaaaaaatattattggtatctaacacacttctcggtgtcatattattggtataattaaatattaaatctcataaaaataacttttagaaaatataactaatcaaccgagcgccaccaataaaagttaatgtgattatttcatgtactcacaatttgtatataacttaattctttgataattaagaaccaacaaatggaggagtgttgatcttgaaacatattctcttatagtcttccaagttatcagaagttcaacatatttttttaaagtttattaaacgatctactcacaatgtagctcactttctaacgagatctattattttatttctgatcatattattcgagggatcgatgctccttggacttcatttctgtaatgatgaaccatttgattgcttattcaagttttcatcttttctacaaaaaaaaaaaataataataataattgtcattggtcaggtacggaagagtaacgttagaatcagagtagtggacagaagaggcaatccaatacaaaacgccacaatcttgattgaacgaaacaaacccaatttcccatttgggtgcgcaatcaacaagctcatcttaaccaacccagcttacaaaagctggttcacatcaaagaaattcaccgtaaccacattcgaggacgaaatgaagtggtacagtaatgaaccaacccaaggcaaagaggactattctatatccgaccaaatgctcagtttcgccaaaggacaacaaatctctgtccgaggccacaacgttgtatgggacgaccctcaataccagccatattgggtgaaatcactttcgggccaacaactctactctgcagccactaagaggctcaactcagttatgggaaagtacaaaggtcaagtcattgcgtgggatgtggtcaacgagaatttgcacaataagttttttgagacacagcttagaaatggtaatgcttcggctgagttttataatttggcttttggggctgattcgagtaccattatgtttttgaatgagtataacactatagagagccctggtgattctttggccaatccaactcagtaccttaagaaattgaaggaaatacaaagctttcctggtaatgctaatgggaaattggggattgggcttgagtcccactttgatgttcctaatcttgcttatattagatcttccattgatgttcttgctgctactggattacccgtttggatcactgaattggacgttaaaagcaattccaatcaggtattgtcttacacttcttactatctcaaattaaaacaactttttaatcataaatatattggccactatctacattttattgtggatattatctaaatagtaaagtattcagccatatatatataagaatatgggccactacacttatcactaattggttttgagatggaaccctatgattctcaacatggtacgagagtcatctcccttgcaggcaagtgatcttatccgatctgcacctatacagataattattatccgatccgcacttatacagataattactatgttctctctcatacggttcaagattgatgagcaaaaaatagtaatattttggacattgtcccacatggaataaaaataataaattattaagtcatatataagaatatggactacttcactcattaccaattaattttgagatggaacattacgattattaacaaattttttatattaattatgatgatgaattaataagaatggtgattttgtacaattgtatttgtaggcaaagtacttggacgatattctaagggagttattctctcaccctgggatcaaaggaatagtaatgtgggcatcgtggcatcctcaggggtgttgggcaatgtgtttgactgataacaatttcaaaaacttgccaaccggtgatgttgtggacaagttaatggccgagtggggtttcctaaacgacgtcgtaactggccaagctaatgcttttggcttttacgatgcttcccttttccatggagattatcaagtcagagttgctcatccagctcaattcaagaactcttttttctccactgctacttctcacagcttcaaagtgacacccttggtagttggttctcggaatagatcaaactcgttggttattcaaatttctgattaattgtttttttttttttgaagtgaagatattagtgttattttatcgtattgatattagctcgggctcatacatatgccgttttaagggagtggccttttttttatgcaaaactttagtctgctatacggtacggcctacgggagtaaggttttgtaattgggcttgtatttgattcagagtgaataaaatattgaaaggaatcttctgctgcaaaatttaactgttgctatttttgttcttgttttgcttaatgttttattgagagacgtgttcataaaatattcaattcaatctacataaatgtgaaaacatgtatttatgcatgttttaaactcagaacatagaacttaaccaagaaccagtacacaacaagttaaaatcaatccaaatataaatgatcaaattaacaaaagaaccaaaaattaaaacacagattaaaaatgctggaaaaataaatgaataagacacaagaattttataccaaattaagaacctactttctgttactctgttgagttttcttcttcattaatgtaaggaattataatgcttgaaaggttgagtgcactctagagaaagattacaaaaagaatacccctgaaacttagctcgagttcagcttcaagaacattgatcttggttcagttttctaactctcttctctttgatttgtactcttacaaagtctctctcccactcgatcttacactctctcaattcaacattctttcagtatgaattgtttcttacattacaaggcaaaagacttacataattctttcaagtgcacttaaaaccaactaagttgaatgctacaacattttcaactaacataacaaaaccaatattgtagcatttaactaacttaatagttagttaaaactgtaaatcccaatattttttgttctatgaattataccaaacaataaattctacattaattcataaaatcaaacaagacaaacattaggggagtgatccaactatctacagatgaagaaaatgtcaacagttccaaataatgttagagcttgggtgaatttagacacggacttaatctgccttaactaaagtctgacccattcaatatagttaaaaaaactgcatacccttctacagtagttgttactatagttaaaataaaatatgtaaaatttgatattaaatttcttaacccatcattctttatggttatttcaacagcatgtgctaaaaaaataaaaaaaattcagaaacaacgtcaaaaattcaaaatctctatcttattatattacttcacacatgaataataagcaacaatatgatccagagagatcatgaaatttagagctagctaagatatctgagaagattgagagatcaaagtgaaatttattctttatgtacacttcgataccttgaaaacatacacatgaaaatattattagtcaaactatatatataagattggtttttttttttttagaatatatgggcataaaacgaattagatttttgggctttcactatatattgaaaatggaggaaattacactctatacttttttcatattgtcctctttcttttttaccctcttttttaaagtatcatttttacctctttttttaaacattgtaccaattttgcccctgtcacttcaagatactctccatgtgactctcttatgtcagg

SEQ ID NO: 296689 - DNA, 4829 bp, Cannabis indica
gaggggtttgttgctcgatcgatcttcaattatatttttatttttaagtttttctcattttattttagaagatttttcttttttttttcatttttgtttatatgttggttagcacttttaacaacgactaatatttgccaaaaaattataatccatggtgggttaataagtgacacaaaagatagttatttatgtcaaaagttttcaatataagttagtactttataatgccaatttgttacctaagccgcattaatatagtatacactataaatttttttacttttaatcacaataaaatttgtgactaaaagtaaaaaaatattgtgactaaacataaaattatcattcctatattattattaaaaagtgcgtacctaaaaatattaatcacaaaaaatataataaaaatttattaacaaatgtgtttttagccacaacacttactgtgactaaaactaaattcgtaacaatttatatgattaaatatttgttgtgactaaaagtaatatttaatcacaaaaaatttatattcactaaaaatagtatttttggtagtgatagatgctaattttgcgaattgacacctaaatctttagcatttaagtaataaattacaccattacattgtatattttgtttaataagatattattaataaaatttcacttataaatgttcaatacaaacaagtgcacatattaattcatatgtgctaatgtgcatataacaaataaaaagagggttaaatgtttatacaaaataaaacaatttttgcctatatttgtaacattataggagatattatagattgggctattaatttatgtgtataagatcgatatttaagttctacttattaggtcttaaaattttatttctctaattgctcatatgtacatcctatcactgaatattttggtgcaaaagtttgcgttcacttatgtcaataattaattaattagagacaccaatgatacatgaaacgtacctagctaatgtgatcatcctgagcaaaaattctaagaatttgctatactgtatggtatatgagctatgacccaagagattaaaacggctagcaagctacaacataaatcagtaacactgtttggtcacttaaacataaaaaaaaacctatttttggaactgtatataatattttccctattttgatatgatcatgttcatgtgagagctaggcatagtatatataccccaaaaatcaaaattaagttaataatgccatcagtatatgcattacaaattatagtctttggacatttcgtcgataatccgcacacacatatacatgttttggatgtaaacctcttttttagcggtctcgtattccattatagagtagtaatttataatgcagtcaaatatatatatatatatatataatttagtaataatattacatttcatttgcattagtgatgctgtataaatatattactcaaaaatgaaacaaaatcagtccaaaagcggcactacatctgctcccattcccaaaggtctctttttctagtcctgtgagtttgttttcaaaaatgtacttaatatcactacaattagtgctcattttctaatagcattacatgatgagaactccattgggaattcacatgaatgcttcatcaatcgatcaacaaaatgttttataatgtaattaattcatgatacacgcatatcgaaaattaaaacatcaaagagagagaagttaaagttaacaattatcaagttatagaagtttggatttcaaatttcaacaattacttacatatacatacatacatgcaagcaagcaagaatctcgggactgtaatatatatatatatatatacgaattaatttataaagtaaataccacaaacatgtaccgcgcatgcatttagagagaataatattattgtcatcaattattattagtaccatataagttaattaattaaaacaaaagagcataattaattaataataatatatatgtatggagatgatgaggatgaggatgaatgacctggtgcttgaaaaatcatagagctttccagtgctagagaatatcataactccaacctccgcatcgcataggatcgcaagctccttcgccttcttcaacaagccattcctcctcttcgagaaagtcacttgcctgctcgttgaattatcgatcctccttattacaatcttaccccttcccatatatacccccttttttacttccgatatacctatatatatatcaatcaatgcattttttttttctaaaatcaaaacaatttcttaatgctactatttatcatttcaaaatcaacagttatatatatcatttttctttgtctcgtttcaaattagaaaaattgtacagaagaaattaagaacaacaaaaataaatcgcacaagaagaaacgaagagagagagagagagagagacttacttggaggagaggagaagatagacagagctttttcaacaaatggagaccaacggaggcttgcgaaattgaaccaaaaaaaaaatggtgagagtctttttttttttttgtatttaaatttttggccgtactgaagaaaatcacatcagcagaggctatataaggaaagcgtatcccggtttatgaaaccgcctttattttaggcgtagaaaaaccactactggttttggattatttccaccaatgaggagctcagagaatttcaactttttattcataccaccgtcaaccctatagatcactgacgcgtggaactcccaatacgtacactgcagtttcccttttaggaatgagaattgcaaaatggtatcactcatctttataggtgtaagaattgctaaaagttgatctattgatgcttaattacaatgctttataaaaaatatattttttttctttaaaaaaaataaatttaaaaaactttttcatttatacttttataattagctttttattcatttttatttttataattagtttttattcatttataaaaatataatataacattaaaataaaaatattttttataaaatagaaacattataacctttatataaaaataatataacctcaaaataacaacagtttttataaaaatgaaataaatataaaaaataagtaaagtaaagaaaaaaaaattgaaaatgccatatagcacttcccctaaatttaatgttccttcaaaagccccaaaaaagattactactaaaattgttaattgagtagtgctataaatgtgtcatcgtgtcgagctatttttcacttacatctaattttatcaaccctaactcaatacgtaaaaaattgtatcgcattcatgttgactcgcttttaactcatttttctattagtgaaattggggttgtagataaaaagatttaggattctattcaaaaatatatatttgtgtatgtatagtttatatatatagcataataaaaactagattttttaaaatgttttcaattttttttaaagaaaattaaatttaaatatttttagtcataactaatctctaaatgtatatttttacatagttatattattattaataattttttattttattttatttataaatttttttcaaaagttcgtgtttagcatgtcgtgtttgacccgtttttatttcatgtcaatcgtgtctacctgtgcctaattttttcgattctaactcgtatatttgtgtcttgtttgtgtatgtcgaaatttatttttccacccccatgctaaataccacttaatgatgtcgtattattgatgaaattaaatattgagtattttacatattctaatttaaagaattctaaaaggtattagtaataattaacattatcataaaataatatattattaatataatttaacatgagatcttatatatattaatttaatatttgtattataaaaattgctagtcacttttaaagcgttaactcatggtagtatcataggtactattgatacttagtagtattttaataattattataaaatatcgttaactaattgttatgaaagttatcttataataatattgaatattgttatttggtagctatataagtgttcaatatgataattatgtaatactttgtaattaattgattaatgatttttttatatcatttataaaattaatttgtgtactgtttaacacctttaaaattcaccatagcatttcttagataccactagtgtttaattaacaacaatactcttactaattattatcctggtattttctttataatggccatcatgtccccttggaaggaggagtaatgctaaagtgacagtaagcagtctttttcagcaagcatgacccaacccaactcaaatcaacctaactcgatctattttgttttgcttggcttgcttttgacccgattgattatgatttgtgtgttaatttgatactatatttaggtcccaaataatacatacgtgataaacagtgcaaagataatccaattataatgattttgatgaatatatattaatataatcattaattagtgcaaattgttactttattaggacatcactaatggctaatgtagtagtagattaaatttgtccatctcaaactagtgggctcacaaaagtatgtaaggggtcacccttaccaaaaaagaaaaaaagtacgtaaaaggtaatgctaatttgggaagagggctatattgtgttttaattgttgtggtatgttattctattctaattttctgaaaggtatgaatgtgaagtttgttggttcataaacaatatatattaggctaattaataattttttttccctcgaactttgatatgtactaaattgtg

SEQ ID NO: 296690 - DNA, 7047 bp, Cannabis indica
ctctctctctctctctctctctgtatattatatatattgaaaatgtaatatgggatttgcatcagtgacaagaaaatggaaggagatgatggttggagaattgtagagggcttaagaggaaggcttcttgcagagagacaggcttcaaggattgctaaagaggaatcagaaagcatggagactaaggttaatttaattttgtcataataataaaattatctcaacttaccctttgttcaaaattttgattcattttttatttttacatacagctaatagagctagagaaactgttaaaagaagagataaatctgaggaacaaagctgaaaagaagcttaagaagataaagaaaaaacttcaaagtctcaacatttgttcatccaaatcagtggaatcatcagaacaatcatgttgttcagagaagagtgaagtttcttgtagatcattattcactgtcacatctagtagtacttcttcaggccccattgactcagaagagaatgagtcaaattttcatgttacctcacaaaaatcaacgaaaaatcatgaaagtcctaatactgagaacccaattgatcaaggtactgccagctttgaagatttctatgataacccaagtcataaatcaaggtatgtctctctcttttatttgatttcctacttgtggtctatagcctatacaatctgcatactgattaaaagaaccatttggcatttggtatttccctattcagctctgcagactttcgatgttcagtggaagagaatgagattgatcacgaggattatgtagatgactcttttgcacttgtgccaattaattactttgtagctgaagcccctaaaaggattgagctaaacccagttcatgaaaatgtatcagaagctcttgactcacttaagtatatcagagaaaaaattcaaagctcaatggaaataagatgtatggttagagttggccctacttaaaactcagctctgatgaaagtaaacatatatctatatctatatgcatatatgtttatctccttattagatgacattataaagtaaaatcacattttgttaggaataacttatctttcttttctgatatgcaaataatttgagatgaaaaagcagaatatatggatgcaactatgtgtgtggatgtaataaaatcactttttgactgtgttcagttcacatcacttcacagagagcattttttaagagtttggtttgatttgggggtcacttggttcttgtgacttgcatatatgcatggtgatttgacttgtccacttaggcttggcttgacttggctctgtttttagctaaaaaattttgatgaagattcacaattataattggaacaattgattaataaaaatgttctccaaaggtgaaacatgctttaattgcagtagtggtgtatttgttaatggatactgccaaagaaacaaacactggtataaagccttagacaaattcccgtagcctggcttatcagtcttctaaattcttggatttacatgcaccccatcacatgtccatctacacataatacagacaatgtaatagtgtctgatataaagcctctagacagcctttggtttttctcctatgacgattgaattggtcaagaccaataattttacctgacatggttgggaatgaaaatctaatatgatatgagaaaagatgagaatatagagagtttgactgagttacaaacttgttgcttaactattagatttgcttatgatctttgaaattcaaaagcctatctttcttacctaatacctacctttgtcaaactttaaaaggggtaagaaataagtgaaagtgtaactaatttctatttagtactgcaaagaatactgagtcaattgtgcccaagatcatcatgtgagaagcatatgaacgagtaaggcacgtggtttgcttttacaaagtctgaggttcgagtctatgacaagtatctatatagtaattgctataatttttcatctttaaatattataaagttagatgaggagcctaaattcaaaacaatgaaaagaagagcataaccgatcaaattcttacaaatcattgcttctattttttatccgtacaataaacattactagaatacagtttctctcaaatacacatttagttttgtcttcaaataagaaccaagttgatcaacatgcatatgttcagccgatattggagtcccaatgagtgtaccaaaagcattggttggtctcataaaaggatcctcgtcatactaagaaaacagcacatttctaaaatttgcaaatcactagcgatataaacaagtctcaaaccataatatataggtgtaattgttagaatttggtggtaaggtgtgattaaggtgcattcatcttatatatgatgctactttatttctacactttaatagtgtaagactaagtctaatagtaatactaaaaactttgtaaaaatacttgtttggaaactaaaagatacagtctgttattctctttcaagtaagtgaattaattataataatatgtatattattattatttaattttctttggtgggtctcttgtcctctcttcaataagcatgaaggcccttttcaaagattaatgctgggaatccaaaatggctatattggcccttatttgagaatagagagaaagtaatggtgtggcatgggtctctactctctatggacggtatcaaatagaatttcagccttcgcctattgattccaactcattgccaactccaaagcatagttaaatattagtttgcattatttattattatgacttttgtgatagacattgtaaaacacatcatggttcaataatttaatagtgttttcttattatttttgggtcataactcataactcgtataactagatgtaatttaagttgttttaacttaaacatgagtacgatttcaaaaaaaaaaaaaaagaattaggtgttgttaaggtggttaatgttggatgccaaaaatcaaatcttcataagggctgtcccaagccaacaccgatgaaacaaaaagtggtttaagacacggttttgtgcacaaacagaaacagttcttcctttcccatgttacataaataaatatttaggggagagtgagttaagagagagagagaaagaggagctgccactaagtaaaccagacaaaaattaagtaggagagagatggggaaatttgcctagaatggtggatggattattagtagtagtaagaaaggtcagagaactcaaaacctcatccatgaatttcagaaaagcctctctcaaaaccccacttggccacaaaaacataaaacaataaagaaagaaagctagagaagagagagagaaagagagtgaacaacaatgtcagaagttgtagtttaaaactctcattatttttgtttattttttaatttttttcccatcttagatctcatctgacaacaatctgaagatcttctgccgaaaaactccaagcccttctcttatcctttgctcccctttgatcactctgatcttggaccaactctggcattcaagaaatgtgtatgtgcttttacagctaagtttgttttctgaaagattggcacacatggaagggccaaacatttgcaacccagattcaaggtacacagaaccagcacgctttcatattctctgaactcacttaaagctattgctttttggtcccaagaagacatttttgagttgatttagcccatacccatttggtctctactctctatctatctctactttggttttattgatggtgtcttggcttgatgggtatatatttttaccaaatgggtttgtttttcagcacaatttaaaacaaggcctgatttttattccattgattgctgctgctgcttctgggtcattttggataatgagtgttgcacttactacttctcttatttgttctgaagttcttgcttgaaaatgattaaaccctgttggaaaccgtctgttgagggtgatggacctcgtcgtagaggaggaggaggtgatggttctggtcgtgttgatggtctgatgtggtataaggatctgggtcaccatgcttacggagttttttcaatggctgtgatccaagccaattcgactttggaagatcaaagccaacttgaatctgggtcactgagttccacaaactctggtcctcatgggacctttgttggagtatatgatggtcatggaggtcctgaggcttcaagatttgtgaatgagaaccttttctccaaccttaaaagtatgtctttctattgattgttttgatgtgtatgtctctctattgaatgttttgatgtgtatcttgcctaaatggttatgaacttgcaaacatctttttatactgcacctgagccaatatagttgtttgatattttgtggtttccagcgtttgctcccagaagctctaaaattcaagtctttcgtgagcctaatattgtagggctaggcaggagtctagtttcagaagatgttgttcactatgatcacattcactttaattgatcatagttaatctagagctttctatatttagtatccataaccttcaaggcttaaactttgccttttagtacaaagatttttaattggggaaggatcaggaaattatgttaaatgctgtttttctgtcttcttgttcagtgcagtgtagtgaagttactgagtgtttatttgatttttgttttgggcaggagttgtagctgagcatcaaggcgtaacggaacatgttatcaagaaggctttcttggccacagaagagagttttctctctcttgttgagagacagtggcatagcagaccgcaaattgcttctgctggaacatgttgcttggtgggaataatatgcaatgcaacgatgtacattgcaaacgttggagattcccgggcagttttagggaaagaagaaagggcaactcacgaagttagagctgttcagttatcatcagagcacaatgcaagtattccatcagtgagagaggaacttcaagcaatgcacccttatgatccacagattgtggtgttaaaacataaagtttggcgtgttaagggccttatacaggtaatgttcaagacttttttgtttttacattcacagttccaatgttgcataagccatttttcaaagaaagtgcaaaacttgaaacatgaaccaaaacagtcttaggatttcatcttaacatgtccagagtttgttcaagtgactaggatttcatcccaaaattgttaaacttgaaactccattcatttttctttctctaaaccaaaaattcggagagcatagggatgagcatcatggctgcaacattatgaatccaagatgttcataaactcatgacactgccagttaataatgactaatcgtttgctctttgcaggtttcaagatctattggtgatgcttatctaaagagaacagaattcaacagggagcctctactaccaaaattcagacttccggaacctttcttcaagccaatccttagtgcagaaccatcaataacagttcaaaaactcacccgccaagataaatttctcatctttgcttcggatggcctatgggagcatcttagcaaccaggaggcagtcgacatcgtccacaaccacccacgtaatgtaagatttggtactagtatgtatatacagtctccaataataagtcttagtggcttatcattgcttgccttccacaagaataactcattctatttccttccttctgtagggaattgccaggaggcttgttaaatctgcgcttgaagaagcggctaagaagagagagctgagatactcggacctgaaaaaaattgaccggggagtgagacgccattttcatgatgatattacagttgtagttgtgtttatagatccacattcgataaacgagaacttcctacacaactccccagtttcgataaggggaggaaaccctgttactcccactacatgaaaattattagaatactagaatgaatatgtttggaaatgtcaagcttctcataggggattgcatcacttgaaatcaagctactaatgaattgaacttatggttcaattggaaagctccccatattttcccatgatgattcctcatctctactcttggttggaaaaagcctggccttggccttggggctttagattagttgcaccctccttcccttcccccagtgtctttgtagataaaaacttttacttctacacattgttaaactaagaaatgtgtcatttatttggcgatagataaaatcttttattaatgtgaaacctcaaatgtgaaatgtcttgttaaggtttgaagattgttttcatttatagaataatgtgtacattttgaattctattccattatacttcttcgccttccgctcaaatcccattaatcgacctcctacgatgttgaagccgtggaattatcttgctaatgatttgaaaacataagatcatcccctaaaaattgtgttatatttggcgctgaaaaaaaaaattgtgataatgtatttacatcaatttctaacgttgtgttctaatatataattgtataattttgatacaaaatttaatatttttattaaaagtataataaagaaacttttacatgaaaaatataattggcttttttattacctaaatacctccacttgacatgggcagtaattttacatttaatgtacttttatttactaaaatatcacttacacacaccttccacacatgcatgcataattgactgtgattgacacatagtaactttccctcactttttttttcttctcattttcattttcattacagaattcttttgatttttatttttatgtttcaaaattttttatccctaaaaacctatcccaatccatgttcaaaagtcatatacccacgatccaaagcttcttctcctattattttctccaactcccttaacccaactgcccaaattccttttccctatttttttatttttgtctgaagtaatataataatgtcgattacttgttcttcttcctccccttctccattgcccaaaaaa

SEQ ID NO: 296691 - DNA, 2727 bp, Cannabis indica
tgtaaaaagaagtctaatttttagtaaaaaaaaataaagttttattgtaaacattataattaaatggcttaactggtaaaataattatagcaacaatttatataaaaaattatttataattattaattgctaaaagaagtcttgttaaatatttaattaactatattaaaaaaataattaattctaaaaaaagaagttttacttattagtaacctcctattataaataaaaaaaaatgtaaccacgatggttacaataaaaatgtaaccattgagtagtcaccctaataataaaatattgcaaaatatatggaagatacatttaggctattgattaaggttcaaatgtgtatattttaaacctttaattatgtacataaaattaatttaattaaatattttttggttttaattgtaaaaattattttagttgaaaagatttaatttattttaattttgtgttaactttttagatttggtggagaagttttttattttttgaacaaacgagatctgtaacaaaggatagaacatgagagtacaagttacaaagatctaaagaaacttttaaacaaaattgttccaaacacactctttatcaattcctaatgcagcttgggcgagattatgagctaagatattgttgcttctaggagcaaacagatctttgcattaggaaaagaggacaaagaggagatgattttccatatcaaatcagacaagattgattgatctctctgcttctttaggattctagagactaacacttggcaatctgaaaccacaaggacaataggaaactagattgtctggcaccaatttcaagctcgaagaagagcctctacttctacaatggttggagaaagacctaaagttgcaaaagaatagagccctactataaatctatcatgagaatcttgaatgatagccccataactatgtctattgacctgactcttcactgcaacatctacacttagcttatatttccctggtgaaggcaataatgaaactaatttcgattgatccaaattgctaccttgaaaggtgccatctgatttgagggtgaccttagcttgagcttccttgttatcatgcaaatatgaaataacaaaaggttccacatccatgtaaccaagcttcttatctacaaagagagacttattacgatgattccaaattgtccataagataccaaaaaatacagccaaatcatctctctgaaatatttaaaaacctcttaaaaggaattctttaatatcacaagacttgttattatagaagaaatttgaaaaactagtgtgtttccaacacttacctgccctagaacactctaaaagggaatgggtattagaatcagttcgtattaaacaaaaggggcaatatgggttattgaggatctttcttgaaaaaagattaagtttgaagaaggtggttgaaagccctccaaataaaatgttttatttcaggaggaatattggaagaccaaatagatttccaccaccacttaaaggtattaggattaacagaactaggataggaataattggagtttgcaagatggtaagctgaagtgactgttaggattcctcaaggactgtgcccccaaatgagacaatccttagtattgggattaagtggcactttgagaatcgagttaatgaggtcttcttcaaagtgattgttgagcttatcaatatcccaaagaccatcctccctaataaaataagaaactgtagtttcgggagaaattgggttatttttaaaagagatataattggatcctggaactaaattagggtagtgatttggacagatttaccacctttcaccttccaaactaaaccttttataagaagatctcttccccaaaggagacttatccaagaaaaaaaaggaacatgtcctattgtagcttggataaagtcattatgtttgaagtattttgcttttaagagggaaggcacaagggaatcagggttagtataaatttgctaagcttgtttagccaacataacttggttgtgatgaaaaatatcttgaaaacctagacccccaaaaaacttataattacaaacatgggaccattttttttcagtgaattttgtgttgattattacccgaagatctccacaaaatatttgccataagttttccaagatgtctacaaatagaaagaggaatcctacaacaagacataacatacgaaggaatggcttggataactgtcttgagtgaaatttctttaccaacttttaaaaaaagtttttggttccaaacagataacttactactagctctttggaggaggaaaagaaaagaatatttcttagaacgagaaaaatattgagggacacctaagtatttatctataaaagatttatcgttcatgtggagtaaatgaagaaaagaggtcttgtgcttaggtgttgtattaggagagaaaacaacaaaagacttagccaagttgacagattgacatgtggctttattatagatgctgaggatatctttaattgcctcacaattttgagggttaacatgagtgaagagcaggctatcatcagcaaacacaagatgagagatagaaggagcagaacgacatatggaaataccttaaaacaaatgagcttgagtttcgaataatggtagatagaccttctgcaacaagaagaaataggtaaggtgaaagtggatcgccttgcctgattctgttggaaattatttt

SEQ ID NO: 296692 - DNA, 2410 bp, Cannabis indica
tgctccagcttgagggggagtgttagaatattagttgtaaagaaattagggaaacttgtattttagtagtttcctatttgtatttagtagtttcccatttagtctcctagctttgtatataaatacgtactattctatgaaatatatatacaattcgattcattattttttacaataacccatcgataatcacattttggctgaaaaaaccatacccaccaccatctaaagtctcaaacaaacacaaattcaaaaaactcatagaaatctaagaaacacagtatcacaatacatacaatgatcaaattaaactaaatctaccaaataaattcttaactcaatttttttaaaaaaacaaaaatctaacctttcgtcgaggggtgggtcgacagcgggggaatggtggtggtcgagggctttgagtcatcgaattgtcgaattgtgaagtgggtcgtcagtgggtcgagggtgagtagaaggggtcgtcagagatagagagagggaggaggagggtcgatcgggtccgttaggcacgagagagaatgggagaattagagagagaaagactttttgatatttttgaaaaaattaaatagaaatggtagtttgagtaagagtataaattattaagataaaatggtatagtataattagggggtgttgtttaagtaattgaatatttgtttagatatggattatgaaatttcccatataaaaagaattttatgttgacatagcttagagtatgtgttacacattcttcataaagtgaaagtatgaagttccaaatctttcttttttattttatttttatgtatatatcctaaaccatattcacacaaagatccacatatttcttaaattgatgagcaatgagcatgtcttctatggtgcacctttaaaaatggtaatttattttaaaaattttgaaaatttataggaggtattaaataattttggtgcacattataatataaaaagattaagattaaaactattttgatattgaaaatatagggacactattttgtcccgtgatatacttttacggaatgtatttcgtgctacattagatgggtctcagggtacgttaccattttttatctctaattacccctagatcaactccagccctcagatcaaataactcccccatctaacggatgtcgtacatcacggaatacattccgtgaaagtacatcacgtgacaaaatcgtgtccctgaaaatataatagaggcattggtatactttttttatggttgcactatagaatttttcaccttaaaaaatttaataataaaaatatttgaaaaagtttatagtacacaagtgttcagtccctgtttcagcatctaagaaaacttttttcttatttatgagtcatttaagaaattttattagtctattttttctttataatcgtatatattatatatatttaatatcacttgcaaatttttagaaaattttgaataatttatagtgtcaaaaataaagtttgaatattttattacatgcgtgattgttttttttatacgcgtagtaaataaaaatttaaatcttattttcgacactataaataattcaaaattttataaaaatgcaagtaattcaaaataactacaatataaatcacccttaaaaaatgaaataaaaggctctctttgatgtaaaacattgagggattgtatccaaaacacatattttggaagtgtactatagactcccaaaatattttgaccaaatttaactcatttttttaatcacttgtattgaatttattcttatttttttcttgataattaattttataatatacagtctaaaaatttatatctttcaaaagaaaatattgtccacacatagtttatgtatgaatattgtgtttagtataattaattttatttaaaaaaataaaataaaaataagcttatgaaatagtgttttttttttttgttgagaaacttatgaaatagttgaatatagagaaatgtaaagtaatgagaagaaagaagtaggaattttataaaataataattttgtataagagtgaagttgaatagtataaaaaatagaataagtgaagttgaacagaaattaaaaataaattaaatggtacgttgggttttctagtcagtcaatcaactgcacgtatccgtcacggtgcacaccacacacacttccctttccttctcttctcccaacacacttttgtttattcactcttctcaatctctctattttattattcaaatgcaaattaccaatattccaatgtgtagagagagcaatttatatttgaagaacattgctattagatactagtgatgtttaatatttttaaatatgtcgtttagtaattaattagcggctaattaggatttttgttccctgaactttgacatgta

SEQ ID NO: 296693 - DNA, 1785 bp, Cannabis indica
cattagtaagcgatacaaaaatctaccgcaaccttgtgtaatgcatatgatatgtttataaaattgccaaatgatcaaaatctactgctttctagggttcacaaaatctcagagggagaggatagcaaaaatattacaagacttggtaaattggtagcagaagtactgcgaactaggagaaaaaccttagtaaggactcatcatacaataagttcaactagtgtaacacaagctccaacagagaggaaccactgtagagcatagattttgcttcttgcccaatatttggcacttgttgctaacggcaacaatatgaaagttctaaattataacttagacattagattaattaattatcattacaaacggaatttagatggatggatttcatatttttcctatgctataccagtcagaaagtatatacacaggtgagctaaattgtcaagataacaaagctatgagcacaccatatcaaacatacttacacttaatcttatgtttgcatccataagaaagtccaatatctctgctgtagtttgtttactatcaggggctggttcacatttccaccgccattggagtttagttccttccttctcaaaagtccacgacaactgcaaatcaggacatgacaagataaattaacaaagtagcaacatattcaggcattacagcaaaagaaaaatacatactacaagcaccccaaaaatacaaaaattcattattgacagtattatatccaaattatgattttcttacctatgtcatctattagtactctgttttcctgctagctagctatgtaaaagttcaaacttgtcaacaacatatatttggcaaaatagacttttttcttagacacacttgtataaaaagaaaaaggccagcttgcaacaatttttactgatttctcttaatgtaatagacataaatccctttcaattctaaaattattctcaacactcaaaaagttgcactttctattaccaccgctcctccccaataaaagtgcagtgaagaatgattgtgtaaagaataaattgaacaattttcatggtaggagagagagaagagaaaagagtagagaacaaacccttttatggccatctccggcatcggcaaaaccgtacagtgaatggggctgttgaaaacccaagtattgctcggccaatgatacgtactccaataccggttggtcccactgtgccgctcggtttctcacttcctcttccgaagctgcagtagtgcagtgtataaataaatataaacaagtagttgtaaatcaattaaaaaaccaatgcgaaaatagagaggaagaatacctcggcaaatccaagcgttgtggccatcggtgagagagagctcgaatcgagagtcgaaccaggtccctttgacgaagattggatccacgtctttgagctcaagcttcaagcaactatgccttgttacctccatttgttagcctcttccttcctttgcactctctctctccctctctcttcttctaatttaaattaactaatgtgtgctaacacttgattttttaatttttttaatcaaagatgaaaataaaatttttatttttaaagattttatttaaaaaaaataaaaatgtgttctgtaactagttttattttttaattttaaaaataaaaaacaaaaatatattttgtaaattatatttttcttttgattttttaattttatttaagtttgcttgataactctatggtatagagatatttttcatgctttaaagctgaaaatattctaaatagtaaa

SEQ ID NO: 296694 - DNA, 3344 bp, Cannabis indica
cttagtattttttttttttgttattttgtgttaattttaaacaattattttaattagtttctaagggtgcgtttgggatagcttttaagaaagctagaagcacttttttaaaaagctatcattcaaaatgtgtttggtaaaattagaaaactagtttttttaagaatttaagaaaaaatttcagctttttgcaaaagttggccaacaccaactttgagaaattagcttatacgggaagctattttgttggtttaatgaatatttcacttgacaaaattaccctcattctaattataaaattctttttttaccattttattttaagattctcttctccccaatatatctttctctatcatttttatgtaatagatgatatttatgtaatttattttattattattagtagtacaaaagccaaacaaattattttattacatatatatatatttttagaaaatattataagaaaaaaaattattgtaatttgtaataaaattaaaaataattataaatatattaatatgtatgaagtttatttaaataaattaaataacaaatatcatacttattttggtaattgtatgtttaacaactattcaatcatatagtttatcaaatacttatatacaattttttcaagtcacaactattttaaaattatatttaccaaacactcagcacctttttttcacagcacagctacaactgttttttctcacagcacagctacagctgctttttctcacagcacagctgtgtcaaactggccctaagtcaagtatatttttattaatatgataagtattttaagaatacatgagaaaaagaaaaagaagacaaaaaaaactagcataaattaaaaatatatattttataaaaaataaatatgattgaaatgaaatgtttttaataaacctaatatggagcttagtttttatcttggccagctaacatgtgttgtttctccattttaatatgtacaaataggaaaagtatgtgactaacacaacaactttaaattttaaaataaagtattaatttgatttaggaagattacttgtgtttaaggcaataaaattttaaataatgcaagagtaaaaaaaaacttagtcagcccataaagaaaaatgagaattttttatagagcattgttattgggccccagtagcgtcatacaattagttagttgtattctttaaaaaatattatcttaaattatatgagacttgttacttaattgcaacaatagctatatgacaccgaagagagtactaaacaccactggtaccttttaatatttatcttttttataatatttgctactaccatcaccatttgaatgtgatattggtaatgtgtgtcgtaaattttatttcaaaatcaattaataatgaataaaataactaccataacgacggtattatgtttacacaaattatatcaattaatgtgaattttctaacaatttttcttccattttttggaattcctatattgcatggtaacatcccattttaatgtagtttagaatcttcttttatatagttaaatagattaccatgctcacaatttcttttgatggtgtaaagggactggaacacaaaaacctgattatttggcaacggtggacgttgatccaacttctcctacttattcgaaagtcatccacagactctttgtgccatatttaggtgatgagttgcatgatatgggatggaactcatgtagttcatgccacggagatccgtctgctgatcgatgttttcttattgtacctggactattgtaatcattaaccctaaattcggtatttgagttttgattattaggatcggtcctaagttatttgggaaggctctcttttacatgttttttttttttttatctactgtctaattttcttattcatgcaaatcattcggccaaatagtacttacgaatgaattagttgcgtatgtatttagggtggatggtgagatcatttggatagagaagatatttccatttttttctcctttgctaattttaacatttttttacagttctggtcgaatttatgtggttaacacaaagacaaacccgaaagctccttcattgcataaagtagttgaatttgaagagattgttgagaagactggtttggcatatccacacacatctcattgcttggcttctggtgatgtcatggtatcatgccttggtgataaaaatggaaatgccaaaggaaatggatttcttcttctcgattcggagtttaatgtgaaaggaaggtaaacttaatttcttaaacttttcctttgtttgaacaagttaggtgtagttgaatattgtatgaatacatctatttcaagaatcaagcaaatttttgtgtgtgtctaggtgggaaaaagaagggcatagtcctaattttggctatgatttttggtaccaacctcgacacaagacaatgatcagctcatcattcggtgctcctaccactttcaccaaaggttttaaccttcaagatgtctctgacggtctctacgggagacatctttacgtttacagttggcccggtggtgagctaaaacaaacattagatcttggtaacacagggatgttacctttggcggtgagcaacataaacttgattttataataaccgaatatatttttatttgtaactacgaaatatttgatttcattcataaattttatagtttacattatagctattatgttcgttgatagataaggtttctacatgatccttccaaagatatcgggtttgttggagctgcattagcaagtaacatggtgagatttttcaagaaccccgacaactcatggagccacgaggtttgtacatagaaaatctagatgtttttgtgttgtaggaaggattctttccaacaccaatttcaaacaccacaaacaaacatgccaaactacaaaatagtgcatgaaaaacttaagaacaaaactttaaacaattcaaatacagaaaataggttctaacttcctccaattagagagcccaatcatttttcatgaactccatctctctcaccataagaatgaaagcctttaaatatgctgctagattacaaactaacataaccgaaacaagaactattagaaatagtatcatattgctaatgtgaaaaaataatcccatatataagatgaatgacctactactttcatttctaattggttttaagataaaattctatgcaccttatcttaaattatgggcatgtttggtatgcaggactggattggattagacatgttaatttgtccaatccagtgtttgggcatgttagaagtctggataactaatccagttaacctcatct

SEQ ID NO: 296695 - DNA, 2233 bp, Cannabis indica
gagagagatagagagaaagggggaggggacaactaaccaggatcagtgtttaatgggaccttggcatcatcaactttattaactggagtattcaccaagaggtctccatcatctatgtacctgaagacatcattcaagacaaagtacccactgtcctgtggggcgaggaaaaatgattgagcaaacttccttttcaagttatccttgccagtcaagcatccagtaactaatacaatcaccgcattttcataagacttttgagcatcagcagtttttatctcagccttatactccttataattcatcgaacggatcttctcatcaataccctgttccattgaaaaaacaaagtaataatggagtagctgtatgtcatgtcaaacaacactcaataactatcttttcctattttaagaaagaaaaaagggggcagacaaattccatcagcagttgattgtgaaatttctacattaattccctctgagcactagaaattgttagaagagtcccacattgataatgtgtgagaacataataccatatataagatgcatgggttactcctctcagccaattagttttaagatagaactgcatgtatcttaccatacacctcaccctattatactttcttcatgttccacattggttgagtgtgagaacataataccacatataagcaccttaccatacacctctccctattctactttctccaccacacacaaataataataaaagaaaaaaatcgaaaggatatccaaaatatcattgaggaatcttacttgcatggtagtcgctgatgtcattacaccattggagtcgggccgtcctatcacacttggatcctgataaaatctaaataccaactcaggagagtggtgaagaatgtgataatactgctcgacaaaagcattcccaacaacttgggcgctgggtgcagtaggaggacttgctgtctgcaaggccatatctgtcaaaatacggaaataagagcacatttaataccacatacattactaccatatgaacataaaaataacagaattggaattgtcccaaatgccaagaaaccaatataagccactaccaaatctaaaggtgatactcggttccacataatgaagagatgatagttcttaaacaagttcaattgtggagttctcaggactctggactaataaccaaacacaaaatatgaagcagtaatacaataaaatagtaaatagagaagaactatcaaaaaaaccctaaaaacattaatgctattttgacaacccatgaaaatttgttcaacataatcagtgacctagtaagattagaagatgcaatcgcgccccaaatcttagtacaataaatttgagaatgttcccccaatcagtattgcttacgtgttaaatcgaaaacagaacaaagcttcaaatgcaaaccctaaaaacacctcaaagcaataaaagaatatagcaaatcagagaaaacaagagatataaatcccagcattcaaacccagataacttataaccattaaaccccaattcgagaaccccagcaatgctagatcacaggaaaaatatagttacataaatataacaacaaataatttaattgggcaaaaaaccattcaagagtcaacttgaagcaaaattggatgaagaaaccattaatagaacaaataaaaggcaaagattacaaaatatgatataagatgagaattaaggaaaaaagattacatctttcggaaaatcttatagctgagcgatagagtcagcaactgaaataggagatggagaacagaggcttcgccggagatcggagagagagtgagagtagagtgagagtgaggaataagagacgagtccaaaatgctactgtttttatgaatcctcacacactgattgggtcaggttattttccactccttcctatattttatacttagttgttttttttttttgaaaagttttatactagttacttactagggtaatgtttaaaatttaaagaaaaaaaaaataaaccaaaaaataaagaaatttttatatcaaaaatacaaattacacactttattacatataaacctacacacggttaaaacaacttttttaccttttctctatattttattacacatataccacatacacatcacatctatgcagtcacgtcaactcccctatcaaccatcatgcatccctcaatcacttccctctctctttttcttttgttttccttt

SEQ ID NO: 296696 - DNA, 2621 bp, Cannabis indica
ttataactgattaagaacataaatccattaattatcgttgagctaagtcatataaaaataattcgaaatacctttgctaaattatttggatgtatgtcgaataggttctttggccaagctacaaaattattcacagctaaaccaactgtgtcgaagccttcatgctctataggacatgggagaatgacattttcttcaaccatcttctcaataaagacacatttaaaattagcaaacttcttttttactccatgtattctaatattgccttctttttctaccttttcaagtttcacataacctaatgcaattaagactagatctttttctttgggatcaatcacgtacatatcacaccttaatatcttcatttgcaaacaaaacaagagacaaataaaatttattttaaaaagaaattaaataattatgatataaaaattaaggatgcataatgaaaatcattttaaaaagcaagtaaataatacattatcagaagtaaccaaagatggtgctggtggagcagctgcactggctgtggctggtggagcaacaactggtggtgttggaacagaaccagtgtgatcacacatggttgctagtggaccagaggccttgggagctggttgagcagaggcccttgcagctggtggagtagaggcccctgcagcaggtgttgctcctagacttgaggtaacagtagcaaaagttgatttgttggatgctcctccaacacctaaactagatgcatatgaggtgccagcaacaccactttggctttggactatttggaggagttgctttggactacgacttgaggagttgctttattactaataggttaggggtattcgggtttgacgttcctctacagctgtgcgtgaattttttgttaaatttctttcttaatctaaatgtgcaggtataatgaaatgaaaaaagaagaaatttacacaagagttcacacgtttatttctcgcacaagctatgttttaaacaagtgatcaaaaatttggagacgtccaaactttctggatcacttgggggtagtatacctagctatatgccttcaaaaacgtacaagtgccttacttattgctttcctattcatatttgcatttaattttgtaattatacttcaattcaaaaaaaattgtaatagccaaattaatggttgaaaataatacttaggcttcgatatgtcgtcaaccctccttcttggaagggacaattgcttgaagtctattgcatgacctatttagttttcacctttagtcttgggagcaaagccgttgcttggattcttgtacgtcttcaaccctccttcctagaaggaggaaccacttgaaatctattgtatgtccaacttggttctcgtggaaggcacagccaatgtgttttcaacgtggtccttgaaaagggaacactatttgaatacaattgtagtcaccctagtttgttaaccacactgacaagtttcctaaaaggagtgagaaaaaagaagcacgtctgggagccctccgtggtgcagcaactctcttatcacaaatttgggaaaaatttatctaatgatgaaccaacttaagtatataagatcaaggaaggatgatctaagtgctagcacaaacctaaccttgtctccctgaaaaagaacctggctaggattttgtcgcacacttagtcccttttcctcactaatctaaataacataagtttcctacaatgttctacttaaggcagttaattgggaaaaatgtagatggaaagtaagctccgcgactcctgtagcaatccgggaacatagtttacaatgcccccgcaaaaggttaattcgccaaaagctttcaaatcaccactacgagaactttgaccaaagttgacacctacagcatttgcagttctacatactttgaagggttgaacaagatagttataaagttataaagatcaaaggatatcaagtttttgccattgtaaccaaaacctttgcaaaatcctgaagagcaatctattgaatggtatagcaaataaacaaaggcagggaaaagaagcaatcaacaaacaaggaaataaagtaagcataagcgaagtagatgtctctaaggctatcatagacgaacccacaataagggcattattaaaattattcccgtgaaactaaaattaaagcaaagaaaaaaaagagaaagaggagagaactgattgagaagcacgtggggaaattactacctcaactagtcgctcaagctttgaatctccaagtgctgctagatgattggtggagggcttccctgtgcatcttatatatggtctcgttgcggtgatcactgattacatggataccttgtaggagaagagtttgttggccataattgacctctaacaactcttttttccttttcaagtccttcaggtccctcatcagagtctcattatcatccatcaccttcttgatactatcttcgatgaccttctttacattttccaccttgatagcaatctaagatttggcttccccaagctcaaccagtaggcccctgttaacagcatgcagctgttggttcttaacattggcttgctaaaggtccatgacaagggagcctacttgtaaagaccgcttagtt

SEQ ID NO: 296697 - DNA, 1793 bp, Cannabis indica
cataatgaatatagtatagcttttaatttcattaaatcgtatttaaatttatacacattatttaaaattaatgtaggacccgtaacaatttttataacaaacaatttacgtgttgaaaattccaaatatacctaacatgaatgagtaatcatagtatggcttataaaacagtaaacatttacaatattttacttattttaattaattaagcctgattacgtttattttagattggacattttttgagtgtagtaatttgaaagagtaatggtacatttttttttgtgagcaggtatggttactgttactgattaatttaaaaatataaatatattgagaaaaaactttctaccctagagatggatagaggtttttgtcttattgtaaaataatgttgatcgatttcatttgtatgcagcagccatacttgtaatgtgtccaagaacggtggtcaagatcaaccttaaagattaaatattagtatatcatcagtagctagctagggataattagtcactggtcaagattttgttaagtcaaatcgtctaaactctcaaatcatccatgttaaatcacttgtctaccaaagattagatattgataaaatctagtggtgaggggcaactcattttgaactttatatatcaatcaattttattatgaaagctacatatacatatttatctatttataacttttcttgaaataaatattatatgcatggctgcattcgatctatatataattatttaaaaatatacatacaaatatacaccctgtccgcatgaatatttaagtgatagtatagtagttattagtcaaatttctgttcaaacattaccataaattttctgagcaatatacatttgatctaaagagccgtggaatttggcatcaaaaatcacgtgctgatcggtgtggtttgaccttatcctgccaccccccctttaattttcgttattgtttttctactgagaaaactgtaccacacatacagtaaagttttcatttgtattttgaaaaaaaaaaaaattatatattttgctcaatttgtaattaccaaatctagatagacaatatacattttaccactacataagatcatttatatataaatatatatataccatatgagtagataattaataaagagaagaagaaaaggaataacttttgtgatcagatgcatgcatttagcatatttctttgtcagaaaaacttacattagggttaataatcaatcaaagattagacttacaccaaacgatatcgctttcatttatttatatagctagctagtgggagcattagctaggttactatatatataatgttcaaacacacgcggtatatgaattaacatgtttggataaagtaacttacaatttggataaagtaacttacacttacattaatcaaatatatttatctatatatatatatataatgatatataaattatacaagaattaaaattgcacttacaaatgaaactctcttcattatgttaagtgacgcgtgtatatgtttatatgttatacgtattggcatagagttaattgtgtgattttatgttcaccaatgaatgttaatttagtggtattgggtaaaataaagtaaggcgaagcataaaagtattttatcattatgataatgtcctaacaatagaatagttgttatatactgtttttatagatagagtaagtatttttttttaattaatcagcagatttattaattaataaattcgttcaaagtaatagaacacactatagaggaacaatcctccaact

SEQ ID NO: 296698 - DNA, 2067 bp, Cannabis indica
gataaagagatcattttttaccttgattgtcaatgtaagaataatcaaattaacagtatagtgacaatacgtaatatagtatgacaaaaaaaataattgtcggcaatatcatgagattgatggctctgaaaatccactatcaagatcaagctgtatgtagaggttgaaattaaatttccttatacgccacttttgaactcatggaattttctgtatgtcatgagagatatttttcttgctgagtaggagataatggtgaatggcaaaacaagtggcctttcacctttcaaatacagattttttttttaatgttttgacaattctactaaggacaagacatgagctatgttagagaacatggtccacagtagcccattgttcaaagcacgagcttgtgagagcctttaacctgtctctttttcctggtcccaatgaatattactactcatttattaaacgcatgatttccctctcagcatatcctcaatattctgtcattttcagatgcccattattgatccctttaagtggcaaacaattagtataaaaaagaaaaaaaaaaaataagaagaaacacaaacacccaagtgttgagtttggcttgttttgctttctctatctctagtgtgccaatttgcacatgtttgtattattgattgtcacttcttgcgactatattatggagttcacttaattgggtagtgattattaatctagacgtaatattaatatgtattggttaggatcaagagtacttatcttaaaattacttcttatgtttattgttttaatataataaaaagtatgaaatcacatgttgctatcattacagctagagagatccaaaggatgagggcgatggatatactgggagtggggacatcttccaatgatcgttcacctatttttgacaagagttaatccaaaaagtgaaaaatggtataacaatttacttgtctaagtaaatcattcaaaattgtgatatttaaaatatatttaaacaggtgaacgagtttgagtattttccagctcagttggtgactaatcgtctgataagtgataactatatttattttactagtttgagtaaaatttatgcaagtttaagacaaagcattgtatgtacgaatcacagttgggttaggtataaagtagttagtttcgtgggataacttctctttgggatcatatactactcaaatgtctcatgccatgcatattgatttttgtgagatggtactttagaaattttcaatctagttttaaatgcatactttttattcttccttcttacatttaaaataaaaataaaatatattttaaatattataatacaaaaatatagaatctttataataaaaaattataatctttaaaataaaaaataaaaaattaatattgtttaaataaatataaaattaaattattgtaattaacaaaaagttgtataaaaacattaataaaaaataatgtgaaagaattttcttaaaaaatatatttcttttctaaaatcgtcttctaccacgtgttatataagtaccctaaaaaagtattatttaacacaaagtaatatatatatattataataagacaaagtcatcaatttgatgagttgtcttattatattaatatattataaccatatcttaaaatgtaataattaatatattttttctatgtataataattaatatttaagtaatgaaaatattctttacaaaaaaagaaaaaaaagaaaaaaaagtaatgaaatattatttttctcatattattttgtaatgattctaagaaaaaggaagctcttagggaaatttataaaaatattgaaatttgagttaatttttataaaaatactgtcatacgtaaaagtttttaaaatactgtgtttttataaaacacaaaacataacaactcaaaacaacagtagaacaactaaaaaacactagtagaacaactaaaaaatactagtagaacaccagtgaaaatttaacacagtatactgcagtatgaaacttataaaaaaaatacagtaaaaaagtaaaaaataccacctgacagtatttttat

SEQ ID NO: 296699 - DNA, 2107 bp, Cannabis indica
aagccttttttaactgccacagagatccaaggcaaggcattctacgcaatgagtaattagttgcactcatatagaaaattgaaattcttatacaggaaaagaacaccattcaacacttacagtcatttcatccacgtcgattacaacaaacataagagaaggatatttctcagatagctcgcagtagaatggtgcaatcattttgcaaggaccacaccaatttgcgctgaagtttgcaatgacctatcaaacacatgtttcaattaattaagtttgagtagactccaatatacagaatgaactctgttttccatcaaaggcctacttataatcatgtttcttcaaccatcttcttcctttccccacactattctcaatagcaggccaatgaaattcaaatatcacatggtttgattttgcaccaaattactttcactcatcttctaaaataaaccattatgcattaaagttcgtgattgcctaattattaaatataaaataaaaaaaattattcctccaagtccgacttttttattttcaacctgtagaaaaatactcttgaatgttattattatcactattggaaaagccttcaaaataggccgagtacaaaaaataatctaggtatagatattaattacacctcaattataaaccacaaactaatcaaataaatactaattatttctacaccaagctggtgcataaaagtcgcacatccagcttgcatatttgttcataaaagttttcttttgataatctttttgtcagcaaatcagcagcttgttgcttgttttacacataaactacacatacttccttttcttcaattttatcttttatgaaataatggtccacccccgcatgtttggttctatcatgatgaactgcattgagtgctatattaatatctaattcattgtcagtgtatagcttcaaaggacttgtgtcctttgaagttgtagttcttcaagaacttgtttgatccacatcaattcacatactccttgagcaagagctcgaagctcaacttttgcactgcttgttgcttctccaagtaacaaggtttccccctaccttggtacaatatccaagttttgatcttctattctcaattgaagctgtccatctgcatctgcgaaagcttgtatgcctctttcttcatttttctgaagaacaaacatttttctagcgtcttctttaaataccataatatcttgtaaactgccttcaagcgttcttcaaaagggttgtgcatatactgacttatcaagctaactgcaaagacaatgtcaggtctggtgtgagacaaatagatcaattttcctactagtcattgatacatccatttgtctacaagcttctccttttctttcttcttgtaattgcctttaggttccactaatgttgttgttgtttacattttgagtataccggtctctttgaataaatcaataacatgcttacgttgagagactaagaggctgtttggctttattttcagtttttaattttcaaaattgtgttttcaaaaataaaaacagaaaactttgttattttaaaaatttaatggtatttgactattttttttactaaaaaaaatcaacattttacaccatacaatgacatgaacccatccaacactgtactgaacctcgaaactgacccgaacccagaccccaaactcagacccgaacaccaaaacacaaacccaaacacgaaccccaaaacccagtcacggactcaaacctcagaacacgaacccagacccaaacccggactaggaccccgggctcgagctaggtcttgggccggggtccgggtcagggttcaaggtccacgtcctggaccggggcaggctaaggtccgattttggggtccgagtcaggattcaggtgtggggtccgggtcaagcctgggttcgtgtccgtgttctgacgtccgggtccaggtctaggtaatggggtccaaggtccgagatccaggctccaggttccatggtccgggtcaaagttttggcatgtgagcgaaaatgtaaaatataatatgttagacaaaaaaattatttttgaaaattgaaaattacattatgatattttctgttttt

SEQ ID NO: 296700 - DNA, 7667 bp, Cannabis indica
tattattataataataaatattaaaacttgtacaaatagtagtcacgttcttgggttgggtgtagaaatacagagtagagaatcattgcctaataagtcgatgaggatgatggtgatgatgaagatgatgatgatgcttgatcaaactaatcacaaccgtccatttcaatcttcccaacttgggatttttgatcatcttaataataataataatggtcctacaattacttcttctactactacttctaacacaacaccaacaacaccacctatgactaatcacaataacaatatatattgttcttcttcttctaatattattaccactgctactccttctgctccttctgctgcggctcctgtctcttacaccaccgccttaagatccccaggtttgattttctttataaatatccaaacccaaagacttttctgttttttaatatctctgtacaaatacaaaactcccccaaattaaagattgtatctttatgttgagtggatagatatttattgacccttttctgagctgagtttactgagtggagaaaggaaatgtttttatgaatctctgtgacatttgggattttgggtatttgatattttaggcttatttttctttcttcactttcttctaggtggattcatggcggcgtctgtgggttttcctttcactaatgcacagttaagagagttggaaagacaagctatgatattcaagtacatggtggcatctgtacctgttccacttgatcttcttcttccatttaacagaactatgtctggttcagctatcccaatccattacccatgtaatttctctttcttttttctttctttctttgttcaatcaatgtcattagcatattttgagatttgggatttcctgggtttgtgttaaaaccttttttttctgtttactaatttatttacagttgggggaagtgaatacaagttgagattttcaaatggaacagatgctgagccagggagatgtaaaagaactgatggtaaaaaatggagatgttctcgtgatgtggcaccagaccaaaagtactgtgagcgtcacatgcatagaggtcgtccccgttcaagaaagcatgtggaagttcaactcaacaacaacaacaacaacaacaacaacaacaacaatagtaagaggactcgtcttgataacaatcaacaacaacaacagcagcaacagcaacatactctttcagtttcatcttctgcaagtttagcaacttctactactaattctagtattactaatcatcctcaatgtcatcaaaatcacttccttggatcttctactactgctctcccttaccatccttctcctgtttttattgacaaaccagcttttgaatctatgccatcagataaggaagcaaggttggtttgagttcttcttttctttacttgtgattttttttcacttgttttggtttgtaatttatgtgatttttgaatatttgaaggagtatggagtggatgatgaaaggtgaagatgtaactatggctgcatctgatccaagatggcttcatctgatgcaatcttcttcaaagtcttctttctgtgacaacaacaatagttcttctatctttaaccaacatggtgaagaggagccatttctgaatctgaattcttatgggagttttggtacaggaggagaagttgaacaggaaagagagtgtgctatgtttctcaaccctgaggatgtgtctttggataataataataataatcatcaccagcaacagaccaattctgagaccccaagaagtttcattgatgcatggtcaaagacaaacatgactcatagtagttgtagtagtgttaaccaaagttctattacatcacaagggaggctgtcaccttcttcactcactctatcaatggggggttatggctccatcaatgatgagatgggtactaaaccacatgtgtcaaactggttgacccctgattcatcttgggctcctgcaggttcaccaccaggtggtccattggctgaggttttgagatcaagctcattgactgccacaacaacaacaactagtgctgcatctgatccatcttcgccattcgcggtcgggaatggagattcgggtagtccaccggctactgctgtttcttcaccatctggggttcttcaaaaaacagtcacttcattatctgatagcagtggttgtagtagcccaggtcttggaatttcaaaggtgaaagctgagattgctttgctttaaagtttgaataaacaatagaacaaaacaaaacaaagggtccttatttggtttgtgattttgatcaagcaagttactttttagcaagagattgtgtatttaagtagagttatttttctttgctgtctttatattagaatactctgtcccctttctgttgccaagattgtgtatattgctatgtttgttctttcttgcaatggttaatggctttaagttaaagctagtgccaaagcattactgtgtggactgtactttgaggcttacttactttgtctgtgtttctttagacaagaaaaaactatgtatgcatttgacttaataatagtctcaactttctactgattaccatttatatatatatttgtatatatacatatgataaaatgtcaaatctcatgaaatgtatcatgttaagcaacaattgttaattttaatgattaatctagccatgggaacaacctatatgctaacttaaaaaccaagttgtattcattaaagggtgttgttttagaaaagagatatcttgagcattgtgcataaagtgttggtccacatttgtataatattaataagattgggatatttgcagaagaagaagattttggggacccggcaaccacatggttactacttactttttctttttatatatctgcattttggttactttttcttaattgttattattattatgattatcttaccaatgatataatgattatagaaaaagggaatgttagtgcagtagcaacagaaacattccatacatttttttcaagccattacaattcattggaaaccaaggacacatctcttagtctactacctaacccaccttctctgctgccttaactcattgcctctgagaggagaagtctcgctgtccgagcaacgagatgaaacactcgatctctgctgctggtagttgctattgctgttgctggtgcggtggcttccattcgcctcatcagcaacagcaaatgatagtcgttttctagctgatggccctgcttctggggtcacagtagtagagcagcccctttgcctcggtgcactttgagaacgcgaacgtgccttagctgaggccgttgcagccatgtagttgtagggtgttgttggtgtgttgtatgtacaacgagggctgatagtgttggtcaagctgtgaagatttctaggctttgaaggtgatggtgttggagttatgaattgttggtattggtattggagttgggctggaggaggagtggagtaacaataggaataactctttggcctttggtgatagtgattttgtgatctgtggtggggtagtatgttggtgtttgagttattattagagtaaggtcgatatgtgtcaatttcaactgttttaattgggtctatgatatgatcacatgaagctcttcttgttgtgctcaattcccactgcttattttgactacttgtcctcctagtccagtactcttctggttctggttcactttcaacttggtccacacaacactcacttctccacatctttcaatgccaaaaataaaacacagaaaaacataaactttatatgattctgaagatattaacatgttttcaaaagctaaattctaagaaccaaacctgttgagaaaaggcattagtaagagccctttcgcgtttcattgtagcttcttttgttttccttatcatggcttcaatttgctccaacatttctgatgattctgaatattgatcatcttcatctctagtgatctgcatcaaccaactaagaatatgagtatataatacatacatacataagagtagttagtgtaattgattttcttacaagggagtttctgttagcattaacattataaaatgcagaatcaaagttttcttcaagagaaagtcttctgttacgctgttgatccaaaacccgagcttgaactcgaaccagagcttgcatgcattgaagggtcatcttagcgcgttttctaacattatgtcctcttaccaaagcttgcaactttactaacccctttagagctttaagagctcttcttgcctactcaaacaaaatcaagaattagcatatacataattaactaaatgtacttaaatgagagttttaagtaaagaatcagcaccaaatatcctctgaaagcagtctgaatagtcatggcagccaagtctttaatgtacattgaaggtctagtagctgctcttgtggccattgccacagccagagcatgtgatgatgaagaagaaggagctgtaatgatcttagcagtagttgttatagtccttgtttcacaattttgtgtagctttcttttcttgctgattcagcttctgtttcttgaaaatccatctcctttttcctctcttctgcaaaaaatagaaaataaatatactatgactcagaagacataaacacaaaacatgaatcaaaccaacatatataaatatatatatataccttttgttgctgttcttcttcttcttcttcttcttcctcttctcttcttctactagttcttttgtcattagaatcctttgaaggagaactgaaagcccttttgaccaaagtcaaccaagagcttgttccaccaattttccccatgaaaatgtaagtgtaaaattactatagaaacattaaaaaagaaaaggcaatggaattgagtagttgggttggtgctttaaagaggaataataattatgaagtgtagtctaaatgtacaagtggatgaggaagaatggaaagaagggtaactctagttcatacatcccatgcatttaggagaaacaaaaaacagaacagaactgaattagtcatgtttgtttattttataacgttaatatttggacacaaatgtataataatattaatatattagaaaaaagagtaaaagaatatgttgttttgtagtggcatgggagcaaatttaatgttttggtgtcagagaattgttgagttgttgtagccttgaaattgatgaaagctgagagagaaaattatacaaatagttacagcaatgagtaacatagccatagcttttactttttaatatatatgtctttggtcttttgctttaatatatttgataagagtttttgttgaaggtgttttgggtttttgggagggagttttgtttgtatttttttaaactctttattttgagtttgttgagttctttcttttgaattctttacagtatttctatataatctataatgggatgttgagattaagtgaatttcaaattcacgtgtaaagagtttgagattatcctaaaattatacttaaaagtattcccttaattataagtttggtttacatttccattcctacactttcaatcacatttttgtaatttaagtatcttattaagcgagtcgagtcttaggcacagacatgatcaagtttacacatgacatataagtgcatattttatcagaaaaaatatcgaattttatcacgataaaagaaaactataactattatgaatatgagtataactctagtgagaattgttatgagtgtagctattagaaatgtgggttcatgtaatcttaaattgttgaatttttaataaataatatgagtgttagtgttcagcaagagcactgacactcattttcttattttttattttttgattggttatttttttttagcataggtacataaatatgtacattttatgttaggttgggattgaactcatgcccttcaattacaagacttaaagagccaatggttatgagttatgatgaaagaaaagaagagtatatgtttaagagtttgaaatcatccaatggttaactgacacgtgtaatttttaggggttaattttgtaatataacttgaagaatgaaggaaggaatttgttttcttggggtgtggtgtaaagtactttacagtgaggaggaataatggaagaaacaaacacatacaatttaaagaagaaaaacaaaacaaaacaaaaagcttatttaatgttgtaaatttgttgccttttccagttggtaaagcagagcagaacagaccagtcaaactctatatgattatgttcttcaacattttgttatttatttatttggggttttcttaaattagttgcaaaataagtttgataatatattgagtaagtaatccttaaatactccgaaagaagagcttattattttaggatgatatatggtcatgatgagaggtgttataaatgtttgaaaatgattgatactaatgaattgtgatgcccatatctattaaccttggtttgattacctttgttgtgacaagtgagaaaaagaagaagaagaagaagtattggttcttctattcaattccaaactaatcttgataaagaagaagtggtccatttttgtgtgtgtgtttttcttttctatggtaagtgtagtatgggcctattttgagattaaaagaggagttaatgttagaaagatacattactctccttgggtttggtgttgttggtgacatatgaagtgattatataaacaaaaataatctgatttaatcgagcctcccgaactacttggcatgattgttgcttgacagatgtgtcatgtagctcgagagactcgaaatgaatagcaatgctcttaaataaatattatgtttggtgattactacgagagcattagtataagacatttttcaggttgtccaacatttttatataatgatatgtgatttgtttaatatatttgatttctttttggagggtttcatatggactctaattacattatatgtctactttattttatttgttttaatttttatctttatttctatattatttaagatataccaatttttatagatgatttatagatgatatttccattataccctttatgttaatgtaaattatgtagtaaagagtgaaagtatattgggcaacccactcataaaaagaggtattttttagtttatgcgacatttttcaaatttcttatttgtatttcaaaattattttcatgtctcaaatattttatagcaatagcaatgagtgtttgttgtaaaattgtttatatacaatactattaaatatatttatatgtatttaaacaatgtggtatctgtaatattttgtttcttttcaattttctacttattgtgtatatttataaactttttaaaatacattgcaaaaataaaaatgtattgctagggtttgtactaccattgacaggttgtgtagtattagtagcaggacaggccttgaaaatatatgggtccaagacgaattaaattttgggaccctaaaaaatatataaaaaaaatatccaaaaaagagtgttatgggatttgaacccatgatcttgaacattatgccatttatgtcaatcaactaaactatgaatatttgttgtttataatacacttaaattttacttaaataaaagcct

SEQ ID NO: 296701 - DNA, 3029 bp, Cannabis indica
aaaaaaaaaaaagaagaaaaactaggatgagagaggaaaatggcccaaaatgcttggtagccatttaggacccgctccataaacaaaggaatggatgcatttttcaagtttcaagaccataaaacccttgaagataaagaaagaaaagagaagaagacaatttaagaggagagggtaagaaagtaatttcacaaaagcaacgaaggtcgtacgacagtgatttaaggcgggtttcaaatattatctccacagactcagacagacagacacagctctttctttcttcgcattatcccttcggactgagcaaagcaaacgacacacatggctatctccaccgcccttatctccacctttctctccggtgaaacggcgtcgttcccccttcctcacttcaacttctcacctttcccttctcccatgcctgtccacttgcgtgtggcacgcacgcctactctcgccaccgcttccaagcaggcctccaccggcaagggcgaactccgaggcattatgaagccaaggaaagtctcgccggagatgcaatcccttgttggagctcctgagatttctcgtacacaagcccttaaggttatttgggctcacattaaggagaacaatcttcaggtccaacccctttttctctttcgcctttttcttttttggaaagatttctcatgtgggttttgcgttgtttggctgtttggataagactgattcatgtttcgcctttaaacctatttccttcattgtttggataaggttatgttcatatggatgaaaatgtgaaggctatatttcatagtttgttaatttcttcagggtcctatgtttgtctatatgttcactcatttatgtggttatctgtttctatatgaggccatgtttgtgtgactagaaatgattgtgcttggtattccaagttttttggttggtgttgtgcttgtaatacatttagtactgatgttactgtggataaattattgacatttctgttttgaaaagagtttggctgttcaattggatttgatgtgttgttttttgtgtgctgatgatgaatctaaacttttctggttgccaagttaagaatagcttactgacattttgtgcaggctatctaattcgttaaaaagataactcatattagttggggatggttgatttatggctatacttttctctttctgcaacagctgtaattatattatttttgtttgagttcctatgccaacatttgtagtaatgtaaagtattagtttaattaacataataacagcatttcattgcattagttgaactgggtattagttaacattagcatattcagttcttgcacattgcatattttagtgaatactttttaagatttgagttgtcttatcgttaaccatgttagagttcttcaactttgttaacagagtttctaagtgtattcattgatattttaaggctgtaaagcttgctcttcttctgattacaattttctaaattcctttttcccataactgagttgtgattttcttctgtgtttcggttcaaatttttacaaatttttacagtctatgttgaaccgagattggcattttaaaaaaaggataggttttatgtgttttcataaaacttattatagtttcattcgccatataatactattaggagaatagaaagatagtgaaaaatacttgcaaaagttagttgagaaggttagtttagttgtacacaaccagtaagaagctaactaaaggctaaaaacagaaagctaacagtcttatcaaacttctaacatatattaactgtataatcttgggctgtccaattattcagtctactattttcatatgaatatctcggttctttatggctgtatcaaacgtatagttatctgatctgtcaccattgacctttctgtaggaccctgaaaacaagagaatcattgtttgtgacgacaagctgaagagtatttttaagggaaaggaccgcgttggatttcttgaaattgcaggattgattactcctcactttctttgatcgaaaactagcgaggatagcctatagcgatgcggatggtttatatgtagggctgtttttttgggtaatgatactagtagaaggtgggaactgctgaattttggatctaagaaagtgtcatagttttttatttttttttcttcttaaagaactagttgttatgtaagtgtttctgtttcagaactccttattgtgtagtaagcttttctaggcaaatatcattagtgactgccggtttgcatttgctttgctttggttaaaatcttaaaattttgttagaattctcttatagttaaattaagatagacatcatcgcaggttcttgttttctcttgctactcggttatttcatacgtttattttgacgattgagcttatgagtaatcatatgtatgtggtcacaaatccacagaaaacttaaaactcattatcctagttttcaaagttatgtttccatattggtttgctatgaaatattttggtgcatactttatcttagttagtgttttcagttgttaattttgtgacctgatttgaactagaaataatcatattattaacaaatcaattttcttctaaaagtaatcaaagtattcagaccagtttagttttctttttctttaaataaataaaaataaattattagtcagaaattcaaaaagatattagcagcacagaaggatgactacagcactttaaattttcaaatggtctaacagatataatatatatttttacaagaagataaatgtaagaagaggacatgtgaaattgaaaggaatttactgctcacgtgatacattacaaggcgtacatatgatataggataatatgttttatccatatgatatggattaaattttaagaataattacgactttttttcaacaatttttaatttattaaaaggtatctatatggtaccctatattttatctatttacaaatttggtattctgtatttttaataatacttatatagtattttgtattttaaaatcata

SEQ ID NO: 296702 - DNA, 5219 bp, Cannabis indica
ctcagggagatatccaagtgtcttgaaaagcttgaaaaaattgcaattctttgtttgatatcgataagattcatattttctaattctttcaatattggagtgaaacaatagtgtatcaacagttgcaacagcaacctaaaaatcaacattacctgtgggttttgaagaaagtcagaaatgtcatttgtacagcatggacatttcataacattcttccgagcccgcagtgctcttctgccttgacatgtcctctgctccacagcagtttgaccagcaaatacaccctctaggcaacctttgcagaagttatgagcacaaggggtagtgatcggaagagtcatcacttgccggcaaatttggcagctaaactctgcacatttaactatttgttcagtaattgtaccaataaaagcatataataagccctcaaagatgattccaaacgttcgaaatttgtcagttagaaaataatgcctttcaaaagcttttctcttgcagatgctttgttaacttttttagatctcttccttggaattccagaacaatcagaatgcatgcgttttctactaggcggcggaggcttcttccacatccaccgacctttctcctcctatggaacatgataacaagtttataaataactaacttattttgaccataataaaatgttaatatgcaattagctttaatgaaagaagaaatatcataaaattttaactgcttttaacttacatcatagtcccagaaaggagcttctttcctttcagttagatcaattgctccctttaactctggtactgcaggcaaaggccttggaaggtccccgtgatcattactgaaagatcatttgaaaaaataagaattagtggttgtagagaaaggggctgttagagggaaagatgactattaacagaccttgtccacggagctggttcattgtcacatctaatgaacagatatctgcacacaagatggccctaaaacaagagagattatcagtttatataaacaaataacgacactactacattaattatgacaagcattatcttacttgtgctcctttcttgcgccaacatttctcaactctgtaaactccatcatatcgcactccctcttctggggcataagctgatcgcttctccttgtgagacctgccaatcagaaatttgagagaaaggaaagcagttgtcctaatacaataccaagaagaatgaatataagagataaggattaattaagcacaaacaaacctcacaactcggacagggtagccttttcgacaactaagtcgcagtgcctcattcaacttttcaaacttctgatcaaaagaatgagccttgtttgtccgcttattgccgctaagatctctcccaccactgtacattacaattgggaagcaggagattagaagtcttaacattaaagctagaagaaaacaacaataagttttcctagtcttaagaaccttggcaatggaatttataaatacaataaattcaacagtcacaaaagcaaatacctcccagtgtaaagaaaccactcgccatgatcctcatcatcttcataaccaccagagagagccactgactggcagccataggtagactgcccagcaattccagaaacatgaggcatatggacaccccattgtctgcactccatcctatcttcccaggactcaccaaccaatacaccctgatccctttcaggatcattttctgcaggaataggcccaaagtgatcaggagccgttgtcacaaagatctttccactgcaagcattagctttgccagtcttctttgcacggtcagttgtgaaagctttgtctgggcgatcttggttgtggataaaatgttggggcttgctttgccccacttcagcattggattttgaagccttggccattctgattgcaatgacaagcgcagagttgattctggggttgcttgccatcttgtttgggattgggcaccggcaattggcacaggtgcgtttcctctgtccaacccatttctcgaaacacttgaggcaaaaattgtggccacatggtgtctgaaatcacaaagcaattacgcataagtttgtaccaaataccaacccctctttctatgaaaaaaaaaacacacacacccaccaaagaaccctaagcagcaattttctacataatcctcataatgaagaaatcaaaaggcaaaaaaagcatttccttcatttgggttttctataaaactataaaataaaataaaaaaactaagccccaaacatataactgatgatctcaatgaatccgaaaaagacaaaacattgaatgcttgacttttcttttcttttcgaaacatttcagtttaggaaaagaagaaagacgaaaaggcctaccgtaacaggtctctcgggcagttgcatgcaaatagagcagttgagattacccccaagaagctcaagtaggtcattggtcttgggaggtccgccatcggctggtccatcctgttcgcgcttgcacatgagctgctgacgtttctgggccttctcccgctcggtcaacgaggtatcggcctgaatgatccgtatggaagcgaccaagtcagaagaagaagcgattggtttaggaacgggatcgggattagagagaggcgaacagtcggggcattcccatttgagagcctcccccatggtttcggggcgggaagagaggcaagcgacatgccatggagtggcgcaggtgtgacaatggagggtctcatcaggagaaggcttgatcttacagaccatgcaaaggccatcaccatcgcaggggagatcagccatgatggtggttgaggaggacagagaaagagagagtagtcagtactactgagttaaaaattgagcgagtgagaagtgtgagagaaaaggtaggattttaataggattaggaaactgtggggatttgtatgggcggcattttgaaaaatttcataaggtttccctctttttttatttttagttttcccaaaaaaaaaaacaatttatctgttattcccttatttgctccctttcttctctttatttctttaataattataatttataacctattccgtgcatctaacctattcacgttttttcttttttccatttatcaagatttttcctaattttcttccttaatggctaaagtttattcatgctctaagtttaaacataatttcattttttactccaaagtcagctgatgggcagtcaaaaaagggcaatatagtgggtcctggtgatgtccaggcccaccaatcattatgagtatattaagttggaattgttgtggcttgggaacccacggacccaacaattccttaaagacatttgttgtcaaaagaaacacaaatttgtattttttatgtgagaccttatgcaagaaagatgttgtggataaaattcaaaaacgtttgggttttgaagcttcttttaatgttgatgcctaaggtagatcaggtgggcttgctcttctttggaaagtggttgatgaggcccaactccttaggttctctcataaccatattgacattcgtatcagccttcctgggatacatccttggcgtttgaccgacttctatggagaaccgaatcgcaatctccgatcgagaacctggaatctcctcaggtctctctctgccgaaagcaactgccctggtgcgttatcggagaattaaacaacattgctaaccaggctgagaagagaggctgacatgcctacccttcttctctcattgaaggtttccaatctgctcttcacgattgccaactccatgacttggagcttcgaggttatccttacacatgggagcgtggaagaaacacaggcagtcttgtcgaaattaggcttgataaagctcttgtcactcgacaatggttagctcttgtcaaagcttgctgggaagagaatggtcatttgtctcttgttgaaaaaattaaagtctgtagtttggctcttgaaaactggggaaaaagcctcacatgtaactttaaaaagaggttggcgaagagcaaaagtgctatggcagctataaaacatgatgctaattcgttctcctatcaagaatatgctgcagagaagaataattactttgagatacttgcccaataggaaatatattggaagcaaagatcaaaataatattggctcaatgccggtgataaaaatagcaaatattttcatgcttccgcaagtgctcggaaaagaaacaaccaaatccaccaacttcaagattcaaatggcagttgggtacgatgggatactggcttggataaggtaatttcagattatttttcaagtcttttttctgctagtggtgttaatcatgacttggtggtaaatgggattagtggcattgttaataatattcaaaatgaggatctgctccagccggtaacagttgaagaaattaaaaatgccttattccaaatgcatcctgataaagcccctgggcctgatggaatgggacccgatttttttccaaaagctctgagatatcattggagcggatattgttgacttggttaccaacttcttcgatactggggttcttccaagtgatctcaatacaaccaacctcgtcttaattctaaaaaagaagaacattttgtctatgaatgacttgtggcctattgctctttgcaacgtgttgtataaaattgtctctaaagtattggcaaatcgaatgcggggtattactgaccagattatgtcaaccactcaaagtgcatttattcctggaagactaatctctgataatgtaatgattgcatttgaagttatgcactacctaaagcgcaagacaaatggaaaaaaaggcttcatggctattaagctcgacatgagtaaagcttatgaccgggttgagtggagttatctacaggccattatgagtcacatgggttttcatgataagtggatctatcttatgatgtcatgtcttacccctgttcgatataatgttatccatggaattcatgttgttggccctattactccaactcgaggtattcgccaaggggaccctttatctacttatctcttcataatttgtgttgaaggcttatcaatgcttatcaattctactgaatccaatcgcatcatccaaggctgtcgggttgccaaaggagccccctccatcacacacatacttttcgcagatgatagctatctcttttgtaacgtcctaatgctaaggcacgctaca

SEQ ID NO: 296703 - DNA, 725 bp, Cannabis indica
agattttttgaagccattcaatattttgttttgaaaataaaaagtaaaatataagatccaaccttcaccaattaatgtcatactcgtagttatccaaaaattacgtcaaatgagtactcaaattttgtattaaattatatattgtagataccaaaatcaaaataagttggtacttctttcgtaaatttcaatctcatacacagtaatcatatttgcatatttatcgtttaatatatgaaaaaactaattatttgttcctagagggcttagcaatatcatatggttatataattgtgtaattaagtatcaaagtcatatatattttattttaataattttaatatataaaggtgttaatcatttatttagtatcacatccatatagtacgtacactacttaataaatatattcttcatacaatttataaataatagttaaatgaatatatgtcaatgaaaattatccaacctaaatatatcatactattattgatgggattattcaataacaagttttatatatttaagttaagtctcttgacaaaaatgacatatttttttgaagttattttctaatttatagtctagtttgcaatactcttgacaactggtagaatttttatactgaggtcattttgaaaagagtaatcaaaatttagtcaaaattcaaaatgactttaaaaaatatattattttactaattatttttataattattataaaaa

SEQ ID NO: 296704 - DNA, 3450 bp, Cannabis indica
attctgtagaatttctctctatgttctcacatctcagtctctccctttctcgtcttcttcttcgccatggttctctattctccgctctgctgctgccactgctgacttatcacttggcaagtgtgctcatgcaaaaatcataagaacaggggaaattccagatcgttttctgaccaacaatcttattaccatgtactctaaatgtggttctctcatatatgcgcgccacttgttcaatagaactaactatagagaccttgtgacttggaactccattctagctgccatatctcgatctgctgaatctaaattcgagaatattcaagagggttttagtgtttttcgtaatcttcgtgagtctttcatatcaactagtccttttagtttggcaccgatgcttaagctttgtttactctcgggatatgtttgggcttctgagactgttcatggctatgctattaaaatttgccttgagcaggatacgtttgtttctggtgctcttgtcaatatttattcgaaattcgggaggattagcgaggctcgtgctttgtttgattccatgcccgaaaaggatgttgtgttgtggaatgtaatgctcaaggtgtacttggacatgggtcttgaagaagaagtactttatctcttcaccgagtttcatcgaagtgggttacaccctaatgatgttactatgtgttgtgttatttctgggattaacaaacttggatttgataagtgcagtagtaggtatctacagcaggttcaagcatattcaactaaattatctttgtatgaagatgattcagatgcatacatgtggaacaagacactttcaaagtatcttcaagtgggtgaaaaatggcttgctattaattgttttatcaatatgattagatcaaaggtgaagtatgatgttgttactttagtagttatgttaagtacaatctcaggtacacatgatctagagttaggaaaacagattcactgtgttattgtgaaatcaggttttgattctgaactttctattgcaaatagtctaatcaatatgtattcgaagttaggttcggtttattttgctcggaaagtgttcaaatacatgaaagatttggacttaatttcttggaactcgatgatttcgagttgtactcgaagtggtttagaggaggaatctatgagcctatttaaagatttactggatttgggtgtagtacctgatcaatttacactagcaagtgttttaagggcttgctcttcacttaaagaagggttatcccttgctagacaggtacatgttcatgcagttaaacttggtaaagtagctgatagatttgtttcaacagcacttgttgatgtttattctagatgtggaaagatagaagaggcagaggttgttctacacaaagaagttgaatttgacttggtttcatggaatgccatgatgtttggttacataatttgtaataagagtcacaaagcattggaacttttgagtctcatgcataaaattggagaaagggtagatgagattactttagcaactgctaccaaagcttctggttccttggtagcattggaacaaggcaagcaaattcacggtcatgttactaaagtagggcttggtgtagatttgtgtgtcggtagtggaatcctagatatgtatgtaaaatgtggagacatggtaaacgctaatatcgtgttttctgaaatctctgtccctgatgatgttgcgtggacaacaatgatatctggatgcgttgaaaatggtcatgtggatcgcgctctttcaatttatcatcagatgagagagttcggtgtccaacctgatgaatacgcttttgctaccctagtcaaagtgtgttcgagcataacaacattggaattaggaagacaaattcatgcaaatgtgataaagttggattatgcctttgacccttttgttgggacatcattagttgacatgtatgccaagtgtgggagtatagaagatgcctattgcttgttcaaaaaaatggatgttaaagatgtcaccttgtggaatgctttgttggttggcttagctcaacatggagatgttgaaaaagctcttaaccttttcaaatgtatggttgataatcatattgagcctgataaagttacatttcttggggtgcttttcgcatgtagccattctggtttaatttcagaagcttatagatatttcgcttcaatgcataaagattatggcattgagcccgatgttgagcattatgcttatctagttgatgccctcgctcgatttggacatgtaagagaggcagaaaaattgatcgcatcaatgcctagtaaagcttcaacatcaatttatcgaaccctacttggcgcttgtagaattgaaggggacattgaaactggaagacgagtggtgaagcggctcttggccttagagccatctgattctgcttcatatgttcttttatctaacatgtgtgctgcttcaaattgttgggatgaagtgagtaatactcgaaaaatgatgaagagaaaaaatgtgaagaaggattcaggttatagttggataattgtgaaggaatttcatgaaaaacatgaaatgtactaatgtttgttaagatacaaagtgatcatttgaataatgctatctttgaaactaccttggtactcaggttgtttttctttttctttttttaaaaagaaaatttagctttattacgctactaaaaatagtagtaaattagtaggaaaagattccaaactaaaaggacaattaaagtataatatagtagccctaacaaggttatgagtcattctattagttgctcgcttaacaaaaataatagaaatatttcttaaaagatttaacaaatacttacaatcattaatagcaagcccaaataaagaaatcatatcaaaaattatttcgcaaggtttgcacaaccaagagacaattagtttcaagagacacctgccattgatgatctttgataaagaaagtgcttcttgattccccattattttagctaactccaacttcatttgaccttgaaagaatgaagtatgaccttcaatccaaaaaatcatttgaaaccaccatgccaaagccaaaaccattattccttttaaactgtttgaatgtacatttttcaataaattttgtaaaataaataaataaagagtaaataccattttggatcctgtgttttgcaaaaattattaattggaccctctattttgttaaatgacaaaatggaccctgtattttctaaaatagtacaaataggatcctgaattaattttttgtcaaaataaaatttaattataatccgacctaaaagtattatgacaaaattgtttacattttctgaaactgttcgtattaggaattgttttcaagttgatatattaaaaaaaaaagttgtcaaaaattaagctcagactcctatttttactattttggaa

SEQ ID NO: 296705 - DNA, 2063 bp, Cannabis indica
ttctttttttttttaacttctaaattacaaaaaggcgaaaaaatgaattacagaagcaaactgactccccctatgacatctacctcaaatattccatggaaagatcttcttgctataacatgtttgatcatgtggttcaagaaaaagtagccttaaaaatgccactaatgccaaaatagcctacgagaaaagtttgtctatgcagtaactgcaaccttttcttgcttcttaccgggtggttttggagtctttggctcttctatgatttcgggtttttcaattccttgaacgtcgattatcctcaatttagtcagttcctgcaaacatagacgataaatgaatcaagaacagctcattacttaattaactgcaccgactatctgtggcttctaatgtacctggcgatgtcctttggttcgacgatagttctttctcctctttttcttaaagataagtactttcgcatccaatgcctgaatgaaagagaaaataaaatttaaataaattgcaaatccgaatggaataaggaatcaactgtcacaataatatgaaaattccaaaaaaacatatgtaggatcctccttagaagataacatattacctttaaactctcaaatcagaatttttttttatatatatatatatgtatgtatacataaatcattaaggaaacttacattttacacaccttatgatcatattccaaatttccaatgcaattggagaataccatgtttaaatcatattccaatgctcctctatttctcatccaacaaaattttacatactagtgttttcgaattgaaagatgtttctcagataaaacaggatgatttgtatgatctctagatagaaacacaggtgattttattttcaaatttgaaaaaatatcagtgagaatgaagttgtttttacagagatgacgaagaagggtgtgacgcttacatgttcttcaacaattgcatgaacatttgcatctggcactatgggcctaccaattattgtctgggtactagatcccagcattaaaaccttattcaaaatgatctgcaacataaaagggagagtaattaacatagccctataagatatcacactataaagtatcaacaccacgagaatttaaaggttaatagaacaaaacaatgacagatttaaagaaacggccaacactaacagatatgagacaaggacattaacagtaaggttcggtagtttgagctgtattggactttggaatagatgaaaaaacacatagctcgcaaatttatgatcaatgatatagttatacatccttattgaactcattcataccacacaacacttcatctagaattcccagagaacaattgcagtttaattaaacatgaagtaaacgaaaaaccagaaaaagaaaccatgatctatctctagatgatcaaaataactgtgtaagtgtctagacaaggtgattagcaagagaacatcatcttctagtccaaatcaacttcacaaccaaactgtatcacaaattcacaatcctaaatgccatacacaattctaaatacaacccaaatacataaatatttcttcctctcacctttgcaaaattgaaaacttaaatctttaaaggagaaatggtaacttacataacaaagtagaacactctacccattgataataatttaacattgaaagcaatttcattcaagacaatcatcacatatgtatatcaaatatacagtttatgcatagaatcagaaaaagataatgtataattaccttctcgttaatgtcacaaaatttcaatctttcagtgaaaatgcagtctccattgctgaccttgaactggtgcgaaccaatctacacaaaccacattcaatcgttaaacctaatttaacagctcccaaccacaaactttattacaaaaatattaacaaagagagaccagattgaacctcaacaacggcgaaaacaggttcgtaaggcttgaaaactcgatcggacctctcaagcggtccaacgaccttgtaaccaatagcagcagcctcagcttccttctcttctggcgtatactctctttt

SEQ ID NO: 296706 - DNA, 3064 bp, Cannabis indica
tggtatagttcctctaaatgaaaaaggtgtcagcaaacgttatttttggaaagttgttcactcatggttgtcagtcctaaaaggagtcttgtggaatgatagtcgagtctcgataggagttcccgaataattatcacgtccactccaggtctagttctcaggatagctagccgcactctaggatggagttccacctgaaactaaaactttctttgaactcaaaataaacataaggtagccgctcctctcaagtccatcgtcccctccttctcaatcacctatcgttagataattaaaaagaatattttgtttttaacatatataaacaattctgagatgtgaaaaaagcatatattttatttaacatcaaataataatttaatattaaaagaataactaattcaaaacaatcaattgaaatccactttattgttgattagatttgagctatattttgcttgttgagttggattcaaaatatgaaagatgcactttgtataaattgaatgtatatatatatatataacttatataagcaaaatagtacaaattagattgaataaacactattttcaaaatgatctcacacaacttatttccctgcctattcttgcgcctagtgctctctctaaaaatcaatgggtttgtgaggtttgatgtgatcatgactctctattcttttctctcaaaatctatgaataactatcaatggcccattggatgtaacactagtaaaagagtaggatggatatgaattcatgagtaaaacgatattattgtccttaatgctcatctggaaaatatgattaaacaattgcagtagaaatctattttagctcaagccatgcaagtagtattatgtgacatttgccgagatcatcattctttcgatagaatttggaataactgatatacattaactcaatatataatattctcataaaaaaggcttagatataattagaaatttaatagacactacaagaaattagacttttgtcgacctatttttacactaacataaagtcatatttgcatcagtgcctcgagaaagtgtttttacttatgataaatagaaggcgttgacagaattagttataattcttgacaaatgaagtgactgaaaaagataaggatcgagtacagaacaaaaatggaagcagagcttgtgaaagagacttttgccagcccgtttctacactaggaatgggtacgtatgccttcaccaacgatataatgcatgcgctgaaaaaagtattttttttagactcaaaaatagtgtcggtgaaagttatcctatcgttgcaaaaaaatgcgccaacaaaagtattatgatttaataaatgataaacatttcttgtccataacataaggaaaatatttatttataatttttttaagtttaatgtttaatttaattttaaactctgtttaaaaattcaaatgaacaaattaagtaaaattaaaagctatacaatatttatgatataattttaaattattctaactatttattaaatacaataattaaaataaaaacatactaaaacaaagattataattgtcttaaacaaaaattggtggcttcatcatagtcaccatcatcatcaagattctcttctactttttatatggctagatctaacatcgtccaactatagtagtgaaagttactagtgtgaatatattaattctttaatcttaaaagaattgattaaaatgtgttcgtattaaatatattaggagatgtatagtaaagtaataattataagagataacctaggcgctagtagtggatttttgccacttaactcctaataattattctatatatatatattaaaaattcctaataattaattagtggaaaacagtgtgattatcaccacttgcattttgttgtccaatcatttttcccatgattagctatacaacggttactttagattttctaactaaccttggtataattgtaattgagagaaacatattattgaatcccctattctattatataaatatgtgaatataatccatctcaaacaatgattacatatataatctctttcatcaaaacaaaaaatgaatacaaaattatatatttcttttccttttacaaaatttaataagatttatcatcttatttcattaataactattgttgaaatagttgctaccgaaaataaaacaaacaaatttactgaataaaatttgagttaagttgcagattagatcactctttttatgacattcatgacactaccccaaattttacaagcaaattatcaaaattgggttgagtggcagaatacaaaatgcacacacaaaaaaaaaaaagaaatcactaattagcaaaatttaaagacttttgtctaattttagtgaaaaaattctaacatggatgaaagttcaaggggtatgatctagtatatatatatcaaagtttaaggggcatgatttggtagatatcaaagtttggggagcatggtttaatacataaacaatcactgaaacagtaaaattgaatgaaattagacaaaaatccttaaatttaacaatctcaatagttcgaggggaatttctaacggctaaaaaagttcagggggcacgatttagtacatgtcaaagttcgggagaaaaaattacttattagcctaaataaaatatatattattatcaaaaatgcctatacataatttggttatttttactctattgataatatactaagtagtattatttggtaactgacaggttatttatacagtaaaacttttttctaaaaatactcaattcaataataatcaatttattattaaaaaaaattaagtttcactttgggccaattataaataagaataatctctaaattttaattagttatacattttttaagtcacgttttaacaaaatatacctctatataagaataattacatctcaataatgtatatacatatattttgtaaatctatttatatagatttaataattttatatcaaattataatacatatataaatattatatatattcaaaaataattctattataatgtagtatt

SEQ ID NO: 296707 - DNA, 3549 bp, Cannabis indica
ttattgtattaggatgctttgtagcatcatgaaatacctgttttatatggtaagactctggataaagtagaaatttatgcctgaaaattttatggattaaagatgctgctggtgcgagaggaaagtttggatcatcttctaattgatatatttgattgtagaagaggttttcaagtgaatattggaagtccttagagttttcttagttgaaggaaggtactgtttatgcatgtgatgctttgcagagttgctgctttttgcagagttgctgcttgatggattttagaggacatagtttcagaggattgagttgtattagccattttaatctgtagaaatgcatgttgaaagctattgtcactagagcccttacttttcacatgtttcagtgtattttgaaggactaagttgataatcgcagtgcaaaagttacgataacaaaaacttatgaaatttccttgtgtgtgtgtgtgtgtgtgtgtgttcttctggaaatttagtgaaaagcatatgattgaatgtaccatctctttgtcagaaacaaaggatatgcttcatggttctttttccttgacaggatgttggtttgtggttggaagagatcaatctaggtagttaccgtcaggtatttaaggaaaatggtgtcaatggagaatacttggaaggcatgtctatgtttaccactgaacaaattcttcgatttattagacggtgtcacatgaaatggggagatttcataacattatgtaaggaactcagacgaattaaaggtatttcttctatctcccccaccactttattacatgtgtaatcatctgatatgcagggatgatagaatatataacgtaataagtggggagactggtttccttttctttaggaatataattcccttgaaaataggttgtttaggcgtgactagattatttcattccaacatgatgatgatggcatactgggtttagtgtcctcattttctagccttgcccaaatttttctgttatatctgtagctgtggaagcaacaaacttgctattgttgacatttctagctttacctgtgtctttctgttatatttgtagttgagatatccataatcagaccaacatgctaatgatggcaaactgagatttgataatggattaatgtgctcatttctagatttacctgggtctgtctgtcattacatcttatgtttagcggagaaatccatgctcataccattttcttatttttgtttgcttaagatatgtatatatatgttcctttagttttaatatacaatttggatgcaagtgatgtatgctaaagcaaattgtttatccagtggcctgtttaaagggggagcaaaaggttcgcaggccatggtgggcaccgtcatgcctctccgtagtctttgtgaaggtggcaaaacgtaatagacaatcacgggttgtttcgttgaatttggaaccttgatgaaagaaaagatctgcttatctgtatgtattcatattttttcttttttttttttttacttagagaactagaaaacttaggagaactctttgtgttgaatctgtcaagatgactgttggttcttctttgaagaactttggtgtaatctcaagctcgtttatgtatttatttcttggtgattttgctattggatgacactatttgataaagaaaaggcatgaagcaattgagttcccgttgcaatttactttgaacatctctacaagtgattgtatcacatcttatagcaaattgaaaaaggactccatatttgttttggcttatacatcttcattttctactacgatcaatgagcatagttgttggtatcggacatataataatgttggtcatctagaaatgtgtttagaaggtcaacagtcttttcaccctcaattttggttaacatttcaaaattgagtcatgtttttgttttgttcttctttgccttttcctccctgtaaaactcatggtagtcatgtcatttgaagtttgataagtttatggttagcagacaatgccacatggatgcttggttaagtagaaagaaaaggggatgttgaggggtatgtacgtgtggccctcaatggagccactttttctcattttctttgttttggttaggggacatgtaccttatggcctggcaaattgagacctgtgctattgtgttggaataagttagtgattgtgggtgaagtaattggttaatgaaccaaaggatcaatttacctttattcgcctcgaaaatcctctcttttttattacaatggtgtataaattatgaaattattttagttgcttttgtgtttcttcttttaatatacgtgtgttaatttgtgaaggtggacaattgcaattttagagtcctcttttgaaagcttttaactagttcacatcgttttcattaccaaaaacaccatcatcaaaaagggaaattgcttttttttttggccaacacgtcaagacaaaaataaaatgaataaggtgacacgtaatcaacgtccacatggagtttgctttcacttatccagattgaatattatttttaccttttcttccttgtgaatattaaattactgtattttattaaattgtttggtttaatatatagtattttgttaatttggaaccgtgatatgtttttgttaataggagtggctcttctatactactagttttgaaattgtgccgatggcactttttatgtttaagaaacttttagagtaatttttttttttttttgtaagtacttaagtattaagtaaattgtcatggtaattcttgattggttcattattaaatttttatttttttaaaaaaaaaattaatttaaatatagtagtaagaaagtaacacgtggacaatgatttaatatttaatagttaggtacttacatagttctaaaaatataacctatatattattaccgttaaaaattaaacttaagtatttatttgcaactaggagttaaacttaaaaatttatgccgtaaattactctaaattttatatatataaaaaaaatataaaataacaaaaccacttattaactatgcatttatatattgattttatatgatatatatattagtgtgaagacgtactagaggcacgtaactctcgtccaaatatataagttaatcatatatcttattttcatcaattacgtttaaataagaatggtttgatataggttctttttgaagataatgtgtgatttgtcatattatttaaatgtatgtccatgatttttttccattattatttattaataaaataacacaaaaatattaatataatttgtaaggcaatatttggtttgatgtaatgaaaattgtaatataatcaaaattactataatatttgatttttttaaaaagtgatgtaatcacataacaatgtaatgttgtattacattatgcaataaaattttcttaaattgaagaagctgtgtgtaatgagaatgacatcacaaatattaaataaaataaaagtaaaataactacaaatactgtttttatataagaataaaattaaagtatagggataa

SEQ ID NO: 296708 - DNA, 5440 bp, Cannabis indica
tagcaaaaaaaaaaagaaaaagagtttctctgtacttttgcaagtgtcttccattgtttagcaaactgttgtggttgaatatttgttctcatgtgttctcttgacatacatgtatgtgcctttacatctgatagaagtcagttttttcttgtactttttaacccaatagaaatttatttgcttggttttatgaaagtttcagtttagtccatttaacaatttaagtatccgcttgtcaataccattcggtttcatgtcactaacaaaaatattatctttaaattacttgctaagacaaaaacaaatgattaccttgatccaatgctatatgagtagggtttctgagtaatgaagtctgattgttgattttgcaattgcaggagaatttagttgcgacattgaacctgatggtaaagtacaaataaagggagtgaccactactggagagcagatagtgtgcaagaactctcaaatctttcacatgctgacacggaacttgtgcccaccaggacatttctctatctccttccggcttcctggtccagttgatgaggaacaattttctggttcttttgggactgatgggattttggaaggcattgtaaagaaaaggtaaatcaaaatgaaatgattttctttgtggttaacaataagttcagccaacaagctttgcattttatgtagtgaggacttcacatgaacagatagaacacggttgaaagtgttgtggtcaggtagctgactggaagttctgattgcttctgattttgagggaagtagcttgacagctgtgctaattttggagatatggtaggtttagccaagtttattgtgatgttgagggcttgttatattttcttgtatgtgcaaagttggcaaattttggaattatgacgttttactttaccatttctttctttacatttgtaatcttcttcttaacttgttatttgataaaaaggaaaagtatattagatggggaaaaattataaaagctgataagttatcatcttcaattatagaggatgacataagattatttaaaagaaatcgttaacaaacattcctatctcttagaatattggaaaaagtcaaagctttaaactcatgtcatgagtcaatacttcgtctttgggatcttattaggaatgaatctataacttattatgtttcctttggtgtaaacctgttctgttcgagatttttgttagcagtgaattttagcactattcagccatttacaataagttgtgctattttgttctcaatgaaaatgtccttttggcagtataattttgtttgtactgacaccttattattgttataatttttcttgttctcttcgacaaaaagccttagaacctattcggttggagggaacggaaaggaatccatttttattccttttttttttgttttcttagaaactagtgttggaatgccattccagtggtatggactttccaaccattttgaatggctatttcatccaaaaataaaaggaaaagtcattctaatttatgataaaataaataaatatataaatcttctttcattcaatttaattaccatacttattttcatccttagttccctgttttcattaatcccaaccaaacagacccttagtgttgacaaaagtttttcccatgaatattagactataatatgacaatactacattgtacagtgttttcatatttaaagtaaatgtgtggattggttttttcacattttatatgctgccaagataaatcagctatattacgaattgtgaaaaaaagaaagaaaaaatacaagctctccatgcaatttcagtcagaagaacattttcttggttcaattttctaccccctctttgacttttatctagagtcaactatatagtaatttaatgtatgtaatactgatgattaaggaaaatgagtagtattatgactgtgttatagctttctaataaaccaattgaagagatagaggtttggaagagattctaactttacttggatttttggagtaaaaggaagtagtaagttagccttcatatgtagattgctaaccttcatctgttctggctctggctaattagtctttggtagtttatatgcttgggcaagttagcaaggtcacaattcggtctaaatttgtgaaacaaagtacaattatataactgcaaattgggaattatataatgcttgagttattggacagccttttcaagctcatcctttcaggcatgatcttcttaggtgacgagtaatattagatttgcttatatttatagtaattgtaaagatttgttttctttccatttctgttgtaagcttaacaatatgatgcttcttatggttacttagctttttttacaaactaaatgaaacgaattttactctgttgtcaataggagaaattaaggcttatagcagttcagttgttcttatatatcatatatgttctctttccatttcagttgttcttccatatcattgtgctctttgggattttcattgtcaataacttatattataaacttttcatatgattgtaaaagtaatttgaacttcaaggcatcttcagttctggatgtctaattgcaactgctcggtatgataatgatgtgcaataggacatcgtcagtgagtacattttggcttactgaatattttgactgcatataaagcattcatatttttaggtcttgaaacctatttttgtcactctgctttcgtcagaattactgatatttgatttgacttctttcattgagtcacactggattaaagattcagttattcatttagttcaacaagaaattacacttgaggtttttatttgattcaatgtctaataactcaggtgattttttatgccattcttagggtgtggtaggtgagcttaaactaagagataactagtttatttactagttatatgctaatttttcttggaggaaattgtattatgctatgattttatctatctatatatttaaatatatgtatttatatatataaagaagatgtctcttaaaaatattatatcaaagagtatatggctgtatatagtgtggtttttccagtgaaggccagcagttttataggagacccttttaacggggataaagagctgttgaaggatgtctatatcatattaacaagaacatagttgcctaaatagtaaggtttggcttttctaccatagttgaggcatgtataataatctggtgataccttttacatacacatgctaacaataccaattatgaaaattcacgttaccaagctcattagttttgttcgagaaacacattgtttataaggtgtcacatcacatcagaagtcagtgctataaacaagccaaaaatgtggaatttgttgcatcagcatcctataaacacacatttctcaagtagaaatgatgaactttgtatacacggcaaagcactacacttttttgagtgccattagataacagtccactttagtggtctggatttaccattcatgctcataattctcgttgaatgtatttagtatagtatatatgttttagcacaaaatgtcacgagattttaatatatatcaaatgtagttccatatgtaagtttaccatttatgggacactgcacaatgaagttccctactatgttatgtatgtttaccatgtacaggccaccaacccaactctagggttaccaagttcacgcctcccacacatgtttgtatgttaatgcgtgtgtaattcaggggtgtgatggaaaacagcatgcgccgcatgtttatcagagtcatggttttttctgtggtcggtgaaatacatctataaatattgtctcaagttgaagtactgggacttatcttcattttttctgctatgagaaaaatacttgtcaatcactaatagtttttgcatggtgaactttttcctcatggcttctgaagagggtgaaaatgaggatgatagtgatgatgaggataatgactgatgatggaaacatcggaccaagtgatgtacccaaaaatggcaccaggtgcaaggacaccttaagtgaaaggtttgaaatggattaatcttttgagtccaagtgttgcaaatttctttcctttttctgaagtgaattctgttagaatgttgtccttaaattgattgttttgcttccaattcgacaaggttcttatttatctgcagcattagatcctatcattttgacttgttgatagaacctatgtttatgttttcttacgtacctaataatcattgtaggagaagtattgtccctgcacttgtaaaaaaaaatacatattttatcaatatttaatttcagtatttggagaggtgcacaaaaaagttaaatctttggaatattatttccagttttgatgttattttcatggtctccttgtcatcaactaattaattcacacattctttcttttctttttttagttgactgaagatgttgaagaggcacaggtgtctggtgatgttgtgtcacatttcttccccaccccttcagataggtctggttttcctgaaattgttaactcaacaaaggggtcaaactcctgttcgttctctagtgttgcacaatcagggatctaaagcaaaaagtttgaacatggggtttccatatggatttgtggtggttcatgggaaaattacatttgcaaatgctcagatcttggatgacaaaaacgttgtggcgtttacagttcttgccagacaccagacatggtaataacaggctgcgattctttgaaaattttgttctctggatcaaagtagaaaaataatgtacacagattgtgtatttattgcaaattttcaatgataaatatagaaatgatttccactatattttcattgttattttgaagaagcttaagctagcgagccttagttacccactgtcaaccagatgaccaatttatggtcttcatttcataccaaaattcctgaagaaatttttcttaaatttgggaatgacaagtcatatccattcaaatgcaattttaatatgtgattaaataggaagtcaagtttgaaaatgacaaacaaaactcctaaagatattcaaaggaaaaataattgaaagctattagaagattgaattaagcagtgactctccaaatgaattcattttcattcatcaaagaatgcttcagtattctttatacacattaaaatgggtcaagggagtggcgatagaattgacaaaattcctccaaggaggtgatgctgtaatatatttctgagcatactagcattgacaaaatagataaaaaggctagatcatgattaaattagcaacttcatctcaactgaactctgaccaatagttttgttaatggtgttttgcttcatcatctctcttgccatctaccggccctggcatatatatatatatatatatatatatatatatatatatatagtagag

SEQ ID NO: 296709 - DNA, 4675 bp, Cannabis indica
gattgaattagatcgactattttatgaatactcctaaatgatactcctaaatgatattagttggggtctagaatttattatgcataatattgccctcacttgaacaaaatcgtgaatagacaattattttataaactaacaagacaatacgaaacgtacacaagaacaaataagctgaaattctatcaattgcattataagacactaattaataattcctagggagctcaaccaactaaatgatataattgcttacaagaataaaaaaaaaatcctactactcgttcttatgaacaccaccccccattcccccacccaaaacgcctcccaggctcactcactatctttccttagctcaatgtggttatcaagttattgtttggttgtcttgttcattttctcagcttgtaggtgcagtccagctattgggaagccgcgtagaggtcacagttggcatggcacagacattaatgtctattggaagaagacgatattggatgtcaagttcccggaatgtcttaaccatctcttctatcagaagagatcttctagaataccgttcacccatgtcttggtggttcattttgtggcacaaccacacagccattcttaccctgtttagttcttccaggtccttcattataatcattggtgcaggataccaatgctccaccttgctctcaacataactgcagtaaaaatgacaagacaattcatataccagattaatgcataccattataacatcaccaatcaagagtgaagaagcaagtagtgtatattttcatgtcatactttgttattctttgtttcattgctgcaatcttctctgccggagtagctacgtggatacagaactcaacaccatctcctgtgtctggacttcgatagaaattgttgacggcctttgtggcaagagtactattaggaaatattattttagtattgtcataccttaggaaaatggtagtcaagatgttcatttcttcaacaaccatctgaaaattgttgataaacaaaattagggtcccgaaaaacacaatggtggtaccacagaatacaaattgttaattagatagcaagtaacctgaattccatcgatttcacaccggtctccgacgtcaaaagggtgcatcacaaacaagaaaacaatggcttcaaaaaccgtcttgcaagtgtttccaaaaacaaacgccacaagtactagctgcgaactgacgaagagtagaaatttgctggtggcgattcctagtacaagaagccatatgacgcctataacaatagcaactattatgtttaccatatgatgaagtttgttgacagcagttttggtgtcatttagtgtcaaagcgagtgctctccgctctctgaatgcattaacctggaaaagtgttacccctttatcaaataaatgaccactactaaatagtggaagacgagttttgttaggtgcttctaaacacaaagacatgtacactatagcagagaagttggcaagaaaagaaaccactgaataatgaccatgtttatctgcaagttcttgtatgcgtgtatgctttattctagtcaaacatactaaaatggcaaaaatatcttcaaggttataataaaataattaattagtgtttcattcttaccacccagtttttaagggaagatttgctgattcttttagtctccactgccccttcaaagagactcatggcctttagagcctcatcttctcgcatgaaacgcatcaaatcctcaacgtaaataaacctggcaaaaatatggtatgacataaatttgtttagataagaataaataatctatggggtatgtatagccaaggacagtaaggagatgaagaagaatgatgtcaactacgtaaagctgactagtaagttagaaagaaggacacgaccagatagagttggcaggagaaaacagcatttatacaattaaaggaaaaaaaaaaggaataatttctatttgtatgaaacaaacagaatgcttactgttattccttatcgattttgcatgcaccatttcctttttcataatagtaaacaaatgcaatttaacagaacttgaattgcataaatctatcatagcacaaaataatgtgagaaaataaaacttttcatttatgccaaactaagccttttaaagcaagttagttgaagtgatatcaccagatataacctttcatcaacatgactgctaatgccaaactaggaaacatattaaaaagaagacaatcaaatatagtaaggtttaagaagaaatcagaaacttacttgcagccccgcctagccacattcagaaatatcttcttggctgcagccttggcctcaacttcactcctgatctgagtagcggactcatcatcattagtcgaatccaaaatctgctcatcaagcgtagtaagagaaccatttcgcactattttcataagccttttcatattccaggctgatacgttcttgggattcaacttatgtaaatgatcaattgttattccctcgtctgacttcttgctaagcacccgagagagtttggcactattatttgtcttggacaaccgaccactcccgatgactcggctagttctcgggggtgggaatcctgaagagaaagcagtggccttaaggtcaggtggtattgtagccccagcattttggagcttctgaacctcatcggcaagtctctcatcctcttcctctgttttgtgaatctcaatcaatggtggacccgagagcgtttcaatcacaaactggttgaaaagcgagtcctgaattctgtcgaagtaggtactaacatggaatgaagaagcaagtactttcactatgagggtcttcaccaaccaaagcaaagtacccaccaagaaacaaaccaatactttagtcacgtatctgaggccctcactcctagtctctctctcaacttttttatcaaacaagaagtgccaagcaatcaaaacaaggcccagccataaacaattctgaacagcttttctaataccataaacgaaataaagaacccttttacgaagtagaaaattcctctcaatgaagaacaccacaatccgaatcccccaacccgagaccaacctcccacaaatcagaaccgcaatcaagacctcccatttccatagcttcaatttccacaagtttttctccctcaaaagtggtacagaaagcgtacaagctaatgccccaacgttcaaaaccaaactagcccactgaatcagagtcaagacactaagattcgacctattgaagtcatcgggtaagtcctcatcaaaaaacgggtcatcctcttcgtcatccccggccttccccaaaaacccagatttcaattgccccgacttcggcaacataccagatttcagcacctgacccgacctgggtatctgcccagacctataaactcgatcagctcgtctatctggatcttctggcgggtccataagcctggacctggtctttacccgtaacaaactagacctcctctgaaacgaaagctcgggctgaaacgacgcgtttgaggtacacctcacaacctcttcctcttcattataaggttgtccttgactctccttgtcgtccatcgaatccctgtaacgccgccgcatcgactccgtcgcctgtaatccatcgacgccgtccgtcgaagtcgacggatggttatacgccaccttcaactccatcgattgccaaacattcatcggagactcggccaaaggctgcaaatctctatcatggtggcttttgagctcctccatctccaaatccatatccaatgccgtgtcccctgaagccctctgcttatgcaaaaactggccaatcaacttcgacggaggatcctccataccttgcttctgcagcttattattaccttgcacaaaattaaaactcattctagtcgcatcatcaccatctcctccgtcgtcgtggtcgttcacattatctctggcagggtccttccacacatcatagctcgtttcctgccaaatcttgccggcatgtttagaagagtcgccggacgtggcggcggcggcggtagaatcacctccttcatcgatttttacaatgacctcattccggtcattggagtcttccttcatcgggttcggaatgtgggggtgttgatcttcaacaatgtcttgatccgatagaataggtagctcttcgtggctggtttgggcacctccacctgcggagatcttcttcgtatgtttattataggagccgtgggacttgaacgatttcttgagcgagaaatccatggacgttaaccacgtatgtatgtagacagacactgtcgaaataatattttattaatattatatataattatgaatatccttgtctctctcaaatccaaaacaaatgaaatcaaaattaaatgaaatgaaagaaagtcaagtaaataaggaaagtgttttcatgttttttttgtttttttttttttttaaataaatgagtagtcaacaaaagggttaattaaatataattagggttgtcttttacgattaatttaggaaagaagatattaattgagaataagtgtcatcagctgatgacattccataactctctggaaaaagtaatattaatatataccctttctttcttaaaaaggtaatgctaacaattaaaatattaaaaaaaatatgaaagaaaaaata

SEQ ID NO: 296710 - DNA, 2620 bp, Cannabis indica
aaaacaagatgcaccttgttgatataggtagtactaatcaatccatttaagcccttttcaattatgcagtcacatacctacacagtttcagaatcattatatttgacattccttaagcggtatgagattgcacaacttacctgatatatctctttacagatcactgaactattgactgtcacactaagcttgtagaaagaaatgaaaactgaaaacaatgagagaattccatgcttaaaaaaaggatttttaaatgttggaaatgccaaattgttctgaaaaatggtttttttttctctttgaaatcgaaaaaaaatgttgtatatatatagatatatctatagagttcaaacatgtatacataaaatcttgcatactataagaacaagaagaaagaaagtggaggaagaagataatcatataacaaccttcttcttcttcatctctttgttctgcaatttctggcaactaaaataccggttggtggtcctgtcatctgcaattggcatctactatgtaaccagtaagtaacatgtatcataccaagagttgctctcactttaaaagtccctcttatattgtagctgactttgttgctctgtacttgtgttcgaagttccagggcgtgatttagaggcaagtaaactaagcttgatatgaggtgaattgcttcaagccttgtctctcgaggtctttgagtgaaaggctgaagagcttgtcttgatatgagcctgtcagcaaagtaaagctctacatccacaaactcaaaccttatgtcgagtttcctattcgggttggtgaaatttgcaaggacagcaaaatcgccgttgaaataatctggtgcgtcgaagtagatggtgttaaggcgtgcgtttggggtgtcaaataatggtattttcggtttaacaacaaggtaaactatcaaagttgctattccaaagaaaatgagaagaagactaaatactagacagagaatagcaccaaaccatacaagtggattggttcgtcggggttgagtgtgcctgagaattggctcctgtatagatgccttgatgaagatatttggtgatggggttgctcggtcattgctgctcacagcttgtctgagtatcggttgctttatggaagacatgatgtgagtatccggtggtgttttgctagttctactctcactattcatctcttgcattgatatgctaacttggtttagagctaattgttgggcatgtttctgaggtggtggctgcagtggccgagaactcgaagaagaagaagaaagagaaggagaaagagagggagaccgagacgaaggtggaggaggaagaggaagcatccttaagtgcacaaatttcaaatgaaaggtatgaagaaggtaaatgatgatagttgtttgtttaaataaattaggaagtccattaaactaagtaaagagaaaaagaagcttttttgattgggaggggtgttggtggggtcagtcgggccaccatttttgcttggtttttggtattttagagagaaaaaaagaaaagggaagtttaggtgaggagctaaagtttgagtttttgaataataataatgatatataattttgctttttaagaattgttgaagcagctggcactagtttgataaaggagtggcctttgtccttcaaagtgatcaactcacacacccttttcctcgaacaaagcccaattggtttagactagtcaattggttgtgatggtctatgaaatcagtgtcctatatttgtgtttcttgtctttttgttctgtttttcatgttttacatattttctggttcatcaagttattatgttttgtaaagatttgatttttatttttaacaataattgagttgattttattcattatattagagactaatatagagtgattagcttagctatatctaacctctaaaagtgagtcaaatttgttaagtaaatttagtactattaaaggttggtaaagtagtctactctagaacaatcaaagaagatttgagcaagtcacttttcccatttagctccaatacttgtaagttatcataattaagcttggggtctcaagggtaatttatataattaacaagggcactatagtaaaatgatgacattatgattttttttcttttctttttttttctctttctacatggccaaaaataaccattggtgtccaagtttctcttatacaattgtttttgttttacttagagaaaactcattaaagatgatgaattaagctaggggcctcgatggtaatttctacaactaacaagggcactatagcaaaatgatgatattatgatttgttattacaatgcttaaaataatcattggtgtcttaagtttctcttactcaattgtttttattttcttcatttaaaaacttattaaagatgatgaatagtttcattatccttatttggtcttctcctttgtgaaatgaaatctgtttgtgaacacttcgttcctttttaaccacttaatataagaacaaacacaaagtcttccaactgtctttgatcaattcttagttttgttttgacctataatatgctgaaaataaaatagttctaaagtcctagagcatgtttggtattgttttctattttt

SEQ ID NO: 296711 - DNA, 3075 bp, Cannabis indica
aacatgatagcataactgagtgggaaaatataattccaacaacttccatatcaatatcatggttaaattcatcagtgaaggatatcgtgttaagaacttcttgtgataagctaacttggataaggattatggggtactgaagtcaattcatgttcttggtaatgttatccacttgcagtggttctcccaattgggccacagttttgaatagggaagtctgccccccagtattttatgtctataccttttagctgaatccaagttggtacattggttacttcctctttggtgaaatcatcaattggattccaagatttcataaccataggcatcctgtcaaagaagacatatccccgctacatcaccttatccctttgctccatattctggaatcaaatgatgaagatcccctaagcaagaagacacactttaaccactgattccttccatataaatcttacaaatcattcaagtatggtgataggggggattggctccaattatatagcagacaagagaaggctgcagtagttgacttccttagcaatatcttcaaattctatcttcactttactttttgagctttgattctcctcctcgatcttcgttttggagctcccaaaactgatttccaagttatgcacgatattagatctgagtattgggggagaaggattcttcccaacactaacatcttgagttgccctatttgcaacaatgagccaatcagagaaatcttggcgtaattcactcagtctctcaaagagagattcaatttcttcaggcgagaagcattgccctatgtactgttctattggttctttgtcatctggaatctccaattcttgaactccaagaaccgcatttatggatctggtcttgatgaccctatccgaagatgatggtcctatttttctttccttggatttcacttttcggccattttttccctttttccatagctctagtgaagcaacaaaagagggagaagagcgggaaatttttttttacgtatgtaattctgagtcttatatttattattagaagatcatgattgagatcatgaacttaaggattttactataaaataaaggtatgaaatctttagattaattactgttagtacggtccattagtattgtgaaaacatctgagcttgatccagattactagtgtggtaggacactttagtggaggtgttgtacatactagagaatatgtagagttggagaagatgtgatttgttaatacttgtttaaatactatttcttagtattaatcaaacacattaattagtgatcatatatacgataattttaatcctgagattactatgaacttctatatgtcatacatatgatcctttgattcatgcgtttaagtttgtcaggatgattaggctaagaacaattattttaaagattcaatcatatatatagttggggacatatcttaagaaatacaacctacagattgaataaagattccctaaaaggttgactttttggaacagaaaagattacgagcgctcaagttgcaagctagttgtgacacaaccttcactagtaaagtcaacagtactttaggaacaaaagataattaaaaaggtaaaataataattttattccctttaattaccaattactaatagaagatgaacaatgtatgtgctgtgaaaatttcaatatgcaagtatatgtatcgtcttcaagtaataaactcatgttagtgaggtgatctcacaaggactgtaactaagttctaaataattgaatctttgtttctatttaaaaaaaaatgatttgatgttgaaagtaacaaaaataatagaaataaacaaataaggaaataacaatcgtttaaatataaagaatttaaattcaattacatcaacttcctatggcaaaatacaatctaattacttttttcaattatatgtgatagtagaataaaattcaatctatattttcattaggacatatataatctaaatcatatggcaaaaccctacacttctatggtaaattacacataatttgtactaaccaaagaaatcatcctaattgctacaaagaccatacatgtactttcatctaatatcaaaatttgtgtctatttcactatagctagcataatatacactcactttttaaatttttcattaaaatcataaacaaatcattggtgataaagcaattataagaattaaacataaatgaaatagatgcaagttaaattttacacaaaatgcagaaacgaaaactcaactcaaaggaagccgaggggaataatttgtatttatactctgagcagtagaaacaccaatgggagagggacaggtggccctaatgttagaataaaggagaccacaataacagaaatacattgcgcgcacacacacacacacataaaactaacaataattaatacacagtaatcaccattaactacagtaattacatggatactatagcagagcaccattctgaacaccacccctcaaacgagagggtgatgatttcacaccgagttcggagaagagatactaaaatcttgagtgaggcagtttgtcatgcaatcagcaatttggtctgcaaatggtatctatcgaacctctaattttttgttgagaaccttgtcacgaatgtaatgtatatcaagctcaacgggctttgttcgagcatgatagagagggtttgaggccagggcacttgcaatcatattgtcacaccaggtgactggttttttcggctgaggaaacttgtttttcaagcaaagactttatccaggctatctctgcactaacttgggcaagggcacggtaggggtgagcataaaatctagaaaaccgaaaaaactatttaagccgacctaccgaacactgttggaaccgaaactgactaaaccaaaaaccgaaataatcgctaacggttaaaacctccattgaatggtctattttctttgggtaataaaccgactgaaaaaacccaaaccgaccgttatacatatatatatatattaatttattaagttttttttgcatgtattatacttactaataatatataaaaataa

SEQ ID NO: 296712 - DNA, 1261 bp, Cannabis indica
agggaagtataacacatgctatggtattagggcccacttaaggcccataatgactaaaggcctatttatctcaatcatcgagatctagttcgaacgcaaatgcggccttttataatgtgcaccaattttataaagcacattttcataaatacccaaaaaaatgaatctacattttttcaatagttttatggatttaattatttttctattacaaattacttattttcatagttagtcaagataccactgaaggtaacttatataaaaatccaaagtttatatttgagtttatttgcttaatatacccccttaattaaaaaaatatcaacaaaattcatttttgattatatcaaatgtataattatataaaaatatctaagttaaaattagagcccatatcatataaaaataagaaattttttaaattagagcataaaaatttaaattttcttagcgtgacttaatcatgagtaatgtcaattaagagtacacctatatgataaatataaaaaataattcttttaacctggagagcaaaaaacgaggacattgttattggcattaatggtggagatggatttgtttgttttagacttgctagagggaactatagcattcttggttgtagagccgatcttaaaatttagtgggttatatgaaaaaaaatatatttttgaggctttatttagagtaaaatatgatattttttaaaattagtaaagaaatgtgtaattttaaaagaagaaatttttttaggcccctaaattaagtgggttctagacacatgcctaatccacctatgtcaagagccggacctgattagttgatgggggatttttatacataaggaggagctgaggaggcagtgatggtaggtggagagttataacataaggtaaagacgatggtgatggtgaagaaggaggtggcgacttatgttgtggagagttgtagtgtgatgggggagaagatgtagtataagagtaaggcttatagtcatcactttcaggcacattggtagtggctattataaaacataatgccaaagcacatgctaaatgaggccacaaatttaccattttttagtacttgaaaaggaacaccaaaacacttaaattttgagagatatttgagaactcctcaaaggtattgtgaacaatgtcccacatggaataaatggtagagaattgagccatatataagaacatgggctactccactcattgccaattggttttgagatggaaccccatgattctca

SEQ ID NO: 296713 - DNA, 4762 bp, Cannabis indica
ggtctctctccaaatccaaaaatctaatccctcatatcaaaattatcctttaatttttctcaaaaaaaaatatcctaaaaaaataataatagatatttatactaaaaagaatattatagtaattttaataacctacttcctcatcatgcattctcccaaaaaactcttactctctactcatcatactctcactccatcctaccaaatataacctaaatttaattttattatttgaactaattcctaattagctgcataaaatcttagtatatattttgtagctagaatttcaacatgaacaattttttttttaacagaacgtgagcaatttaatatattaatcatcacgtgttgtgtgggtagtggtaaagatattatttctcacatgctctttgctgatgacagttatatatactgtcgagccaataaacgcaatgtaattcgcttactggatttatttgaggatgcctctaatactccattttctttagttctaatactcccatgacactcgacatagtgtctgtgggttacttggtatggctgagatggataataacagccttcatcttggcttttcttgtacaatgggccaaaataagactgctattttaagtttcttaaaggataaaatgcaaaaatgaatacgaacctgggaggggagatttttgtctaaagtaagtaaggaggttcttttaaagacggtggcacaagctcttcctagctatgcaatgtcagtttttcttcttcctttgaaaacttgtggggagttggaaaaataatggctaagaattggtagaattctaagttttctagttcccgtggggtcagttggataagctagaataggctttataatcacaggaacgctggcggtcttggcttttaaaatcttcatgactataatcttgctttattagggaaacaaggttggcgtttgttgttggatgataatattctttgtttagtcgtatttataaagcaaggtactacccaaaaacttgttttttttttcctgctgaacttggtaataattcaagttttatttggcgaagcattcacaagtctcaagatataattaaagcttgtgctagagtaagtattggatttgtcagtattgttaatatcattggtgatccttggcttccacatgatactaatcctttcattataactgatcacccggggttagttaatttctcagtgcatagcttgatgaaggttagaaggagggagtgggatgaggaggtagtgcaagatctttttgatgctcatgaccataatctgatccttgggattccactgagtgaaactgttagcatggatcgttggtctaaggaggattaagggttttattcaattaaaaatgcttaccgattccaacaacagccaaaacaaggttcagatatggtagaggatactaaaccctagcgccatctttgaaagatgaagatccttccaaagattcaacatttcttttggaaagcttcagcaggttgtttaccaacccgtgtgcagcttctgcaaaatcatgttcctgttgaaaccagctgcctgttttgtaatggtgctccaaagtgtattttgcatgtgctagttaaatgtccttttgccatttcttgttggaatctttctagtttagacagcaggtctttacatttcgcaaagtttggtgattggttttcgaatctagttatgagaggtttagctcttctctcttgaaggaggccgctgctattgcccagtccatttggaaggcacgaaatgacctcttatggaattcgaaagtgtgtttagctgttactattattttttcatcaaagattattttgacacaatggagatctgctcgtgataaacgttttgatccacttttagttccagctgggactatttatggtggagagcagtagataaaaatcaatgttgatggagcagtgtttgcagcaaatcacacctatggtggaagtatcgttgcctgtggtgttgatggtcatattattgaggcttttgcagtgtatcagcttggaaaagttcaacctgttatagtgaaattatgggcattaaggaggctctaagttgggttaaagaaagaattggagcaatgtcctgactgaatctgatagctttattgtaatacaagcgttgtcgtgttctattcacatgccttccacttttggcttaattgtggatgattgcaaatatttattactctttttttaatgttcgatgttttgtttctcaatttgaaaacagagctgctcactatcttgcacgtagctctcgttctttgttaggttgtctttttactgtaacgaatgtttcgccattattacaggacattataatgattgatttagctatttaaataaaatttactaccatttttttttaaaaaaatatactaaacaagaaaatttatacgtgataaaattcacaaaaaatagtcatttataattttttttggtttctaaatatagaagttttttttgaacaatgaacgaaatttcattgagaaaaaaattagcgttgagtacatcaaaaagaggagatcgaagatcctccctccaaattagctcaccatccaccttaagtgcggtcttagctaattcatgcgtagccatattggccgaatgatttgcatgaataagcggcgccttaagaaaattggatagtaaactaaaaaatacatcaaatagagagcctaaatcattactgaaagaaaatctcttaaaaaaaggcagagatcaaatctaaacaaccaggctcaaaaaaaatgagaggaagtccaattccatcaaccaatccaatgcaaccattattagagctacaactttcgcctcaaaaactgtgagatttccttgtgtccatcttaatccaaccaagaaagcaagaactgctcttaaaaaagttgatacctagaccaaaaacatcaagtaaataaatttagtaacttcatgcataaacgttaaaataataattttaaaagtacgtcatataaattaataatttagtaaaattttgaagaaagagaattgtaataaaacttatcttttgaaatccttgaatcttgaccaagtgagtaaaataaaaatatacctacataaaatatataaaatttaattagcacactacttaatggtaatattaaaatgagaatttttatttaaacaaaaaatattcgaaatattatattatgaagaaaaaatttatctttactaactgcagaacaaatcacaagtcactgctacttcacagcgtttttagggtacacacaaaataactaccactatatattgataccaaacaaaacacactgaacgcatactactatacttacaaaaaaaggcacaacttacacaaaaataaaccacttaattttacggtacacaatcattttcaatagacattaaaaggtaaaaaattaaataatcaatttaaactttttgaaagaaaaagctaagttatgttaaagcaaaatggaagagccattagaatctctattataagggcttctccaatgagactgtaaaatcccaaatatactagagtttttacacaatattactccaaccaaacactaagaattactctatatatgtgggagtctacaatgttccactattattagtgggacactatagaccactatatatatattttttttttactttttaataatttaataaccactttacacaataaaacaaataattaaataatttatttataatcaaaacttatattatattaataaaataatataataataaataatatatttttagtgttgtggttgaaatgtaaaaaaatttagtatcaaattaaatagtatacttttggtgttgatttaacactaaatataacttttaccaatggatcacttaccctaagactatataactgtaaagatattccccaagaaaaaaataaaaaaaattaaagaaaagaaaaaaattaaataccgttttcaaatatagaagtttttgaattatatatatattttaggtgagttttttaattatattagttttaaaactaataccaaaaattactcatttataatttgggtttctctttatacattctattttatgatgggtttgttcatatttattggctatttatctacataagttttcagttgtaactttaaagtttcttgttaaagttttgaagatggtaattaactatgaattttatttatttattatattcaatatacaaataaatataatattctattcaattttctttattttgacatgaaattaagtttagataataattatcataaaaattattctaaatttagtcaaaaactagaattgaaatattctattttttgaaaattcatcaactttattaaataaaatgtttgcagacataatggacaaaatacaattgtttcgtaaataaaatacaatatggaagaataagagcctttagtaaaactatcaaccaccttaatagcaaatctataaataaaaactaaagagagacaccgtgtgtgattaaaatttatttaaaaaaatctaattaaaatttttacctgaattttgatatgtattaaatcatgcccctgagttcttcaagttgttaaaaaattctctgagattgttagatttaagaatttttatctaatttcattcaattttgttaatttagcgattgtctatttactaaatcgtgctcccaagctagatatgagcaagattaaaggcaaaaaaggttttatggctctcaagctagatatgagcaa

SEQ ID NO: 296714 - DNA, 1376 bp, Cannabis indica
tttttttttttttttgcagttttcaaaaactccacgccttttacttctagtgtttgaccataacaccgagtgtgtcactaagcggggaaaaatttggtattacccgaagataaaatcaaaatttgaggaatatgaattgttggaaagtgtgaaggaatcccctttcaagcaattctttgagagagggccattacagtttttgggtgcacttatccatcagttgttcatgcacaagatcaagtcggataaggcagacgaagtacacttttatattacaaagaagagatgtcaattcagttaagccgagttcgctctggtgattgggctgaacttgttaactggacctactaagttcaaaattgaagagaaggtgaattcaaactgattgatagttgagtactttaatggggatccatccatctccttgggtcaattgtgcaaagtttttgagagttgtacagaaaaggataatgtgtacaagttggggatggtcttctttgtgatgggtgttctcattgagaaagatgagacgaccatcattctgccatttattattagaatcgctaacaacctcgagttcttttacgagtacctgtgggggaagatttctttcaacatgttaaaagaaactaagagtagagactttatagaaaaaaaacaaatggataagaatattcaaaagggaaaaactcagaaggattcaaaatactcgtcttatggatatactttggtgttacaatattaggcttacgagtccatcttagagcttggtgacaaattttcgattagaaaaatcgcatcgctttcccaaaatggtcattttggagagtaaggacgtggcacttaggaaggaggaagttatttagttgtttgccaataacataagttttttaattctttgtacttggtcacatttatttgtttatttttttttaatttcagcttaataatatttttgttttttttacagttgacagtgtactcattttatgttccctacccaacgaataagagtttctcaggaacgtcactagaggtaaagcccctctacttgtggacttggaggaactggaatcgggtagtgatggacaacttactcaggacagcttgcgtagccaggcctagaagcttgcacagatgttggaggagcaggcggacccagttcgaatctttagagacccttcaccaccacaatctccaccaccatgtctagaattagatgtctgttttgttgggtttttgtgccctaaataaacctcatttcaatataatcaaatttacttactaataaagatcatagataacatttttatgttgcatggttcacatgatttatttcatgattatatgcataaaatgtatgaattctatttaag

SEQ ID NO: 296715 - DNA, 5279 bp, Cannabis indica
atgtccaaatacatttgggcaattgcaaacagacaagaaagcctatggatgaaacgggtgcatagtgtctatctcaagaaagatgaatggtggagccacaatgcctctgttcattctagttggcattggaagaagcttgtggcattgaaaaaccaactgaagaataacattcacatacaacagttcactgctcagaagtactccatagcagcaggttacaagctctttaatcctcaagagatcaagctatagtggagtaatgaggtatggtcttgacttaacactccaaagcattgttatattttgtggctcactatacacagtaggatgaaaacaaaggatatgcttctgaaattttgattacaagtggaggaaacctgttgtttacgccaggaagaaaaagaatcaggtgtgcatctgttctttaattgccaattttcaagagagtgtcttcaagggattaaaaactagttcgggtggatagcagagagtaaaggaatgctccaacttattagatggattggcaggtcaaaaaccagcaaatttaaaaagctggtgttggttgcaacatgtgctgctctggtttataatatatggaaagcaagaaatgcaatcatttggaggaaagaggaaactgcagcaagtagaattgttgaggagattaaagagggccttaagctaagagtcaccatgttcatgcctaagaaaatcaagaaagaagacaaattgtggttccaaacactgtaaaaaaaacatacggatgtaactagatactgattgtttttggggcctctattgaggtccctttaggttgtacaaagatgatttagagcaatacaattcactgatttatcaaaaaaaaatatataaaccgtttataaaggatcattgattgtttagattgtaataatggataattcatagcgtatttatatttggtatatagagcgttctatgtaatcaatggtgaaatgacatatttgagaagattagagaattcaagatttgtttattaatgaagagacattggagggtctaattaataaatatatttaaacggtcattttatttaatgattaattataattattaaatagataaagttatcatttaaataaatagaatataaaaatagtagtattgaataaacaaaagattgtttcacttcaaacccatcgaccttgatgtataatttggtcaagggttgaaataaaaagcaattttatttttttattcagtctatcttattctaaccctaaacctaatgtttgtctataaatataatgtgatagcctttgatttaaaagaccaacactttagacactttcttgtgtaacaaactaaatcaaaagaaagacttttattttattctcattatatttttgaatttctcgaatttttttatcatattacgtgctccttattattaagaaattacccacacatattacagtaatactgagtatagtgattgtgtaaggttttctataaagaaaatttatatttgggatgttagattataaatttataattaacatgttagtaaatgtaaatcctgataaaatatttctaacatatttattatcagtctgcaatggaaatgttaaagtagctacttaattactctctcaagttagaatgacaatggtgttaatgaacttgaaacaaaagtcaaattgaatgatcactgcttcattgttaatccagaaaacaataggtattacaatttttgtaatcaatatatcgtttttacaatcatgtaagtattgagaaaattttaataataacaaaagtaagctcttagagcctagaagtcagaagtttcccaagttccctccgaaggatcttcccagctgcagattttggaatcgaatgtgtaaacaccacctttctgattttcttgtagggtgcaacctgcaaaaataaatatacattttcattgttaaatcatgctgaagagatttggtaactgcacaggattgacaaactagtagcaccaacaatggtgtttagacagcaagacgatgcataaaagagtcgaagtaggggaggtttaacttgaaatgggaagaaagtaaattaacaaaacctgtctagcgacatagtccataacaacttcctttgagagcaagcttccattctttctaaccacaaacgccactggtatttccccacattcttcatcttttgcactaagtaaaagcagaacaaagtgttggaacctcataggtgataaaagcaattggcagtaattaaaacacatttattcatcactaatttctagaaaacagcatacactttctaattgtcatgattcctaaatgtgcaaagcgattacaaaaatcatcatccttgatttttgtaaaatccagtttaaaatgcttaaaagctttcttgtttgtatactgccttagtgttctaacttacgctgccacggcaacatcaagtatctcagggtgggaaattaacacagcctccaaatccgcaggagcaatctgcagtaattacattttaaataagagaggaattatttttaactaagaataatcaagctaaaagaaactgatattgatcacctattaaaagtgttctatacctgaaagcctttgtatttgataatctctttcagccgatcaattatatacaaaaatccatcttggtcaaagtaaacaatgtctccagtacgtagccaaccatctttgtctattgtggacatagttgccactgcgttattcaagtatcctgaaaactcaacagaacaatttagtcagagaagtttgattattaagtaatgacagatttggcttgttataaaattaagcactttcaaatcatttaggcgctttaaacttcaaccattttaagaaaccaagaaagtgtttctttacctttcataactgctggcccccttaaccaaagttcaccactactaccgggaggcaagaaggacccagtagtccaatccaccactttggcttgcatattgggtgctaaaaatcctattgaagaaaaattatgaaacttcttagtattgtagccacgggtccctactgcagtcgattccgtcatgccatacccctacaaacaatcaaacaatcttaaagaggacattcctaatatactgacatgatttccagtggttggaatggtatgtacataataaactgataaccatacacataaacactgaaacactatctatcatatgcattttgagaaaactaagattccaactcaactaaaagtagtcatccaaacataatcaactaaagaaaaggataaacactatctatgttaaagaaaagtaacagttgatagagaaagcgaaaaaaattattttacctgaatgaaatcaacatgaggaaagatctccacaaagtcctctatgagttttctgcttaaaggtgctgccccacttgaaacctgcttcaaactctgaaatttttttccattaacagtctttgcggtctttgtcaaggctgttaatattggtggtacaacagggaagtgtgtcaccccaaatctttctatggccttcaccacctcgttgatatcaaatttcttcataacaacaatggttgagcccaaagaaaaaagtcccattacaaaaagagacatcccatatatatgaaacattggcagaatagctatatacacattcttcaaacttgagtattcatattgtgaagcctcaaacttcacaaaaagctcaaccatggccatgaaatttctatgagttaacacaacacctttgctagcacctgtggtgcctgaagaatacattattgcagctgtatcttgctgcctaatcaatggccttggaaccaaatcaaattcacctgaaataagcttagagaaagatgaaaaacgatcccagttcaaatccaagttgaaattttcaggtacctcaattggagtaactcccaactcatgcaagaactcgactttcccagactgagcaaaaccaagacaagccttagagtcagtaacttgtttctttatttcagtcttactgctaagagggttcattgttgtgacaacaccaccaaggtacaggactccaagcaagatagccggatagtaaatggagtttggtagcataaccaaaacgacatcgtttttggagatacccatagaatgaagaccagaggccatagactggaccaaccggtagagttgtgggtagcatattgaatacccagttgaagaatcaatgagagctgaaaccccattgtgctggtctgagaagatgaaagaaacaacatcaagaaaagggtctgatgggaggtgtcttgaggggtgtatactattgcaaatgcctgtttcgggtgaataccaatgagggaactgagacgcctcctcctctgacaaatggcgattcaaggagttattgtttaatgtggtcattgccgttggtggcagtctaagagacacaaatgctcttgaataaagcaaaacttagcgtttttctttactaaaaggttggaagagttttgttcactattacttatttatttatctatttatttatttgtatgtataggttgtacactatgtgagaaagaactgatacatgtgttacatacaaacacaagattcagtagcggttttgagccgcacggaggaaatcctaaaacgggtggcctcagcatccagaagaaaatgcctggtctattgtctcaagatgtctatatcgaatcaggaatctaaattgtgtgcatatagggatattttggtaaatgtcatgttttttcgtaagcaaggaaggaagactacaaattttattgggtgcaccctaaaatttagatgtaaaaatatactatatacatacatattatttatgacagtttgctataattagttataaatttaacacatatatattatttatgacagtttgctataattatttataaatttaacaaataaatttattaatttcttatgactttactataaatttagaattatacctttgattttatagaataccctatatatattgatagagtaatttgcggcataagctcttaaagtggccagatttttgtaactaactccaaattctaaaattttgttggtaaaacctcttaaactcaagttctgttagcacttagccctttccatccatttttgagtgttaagtgtcaggttagaatgtctacgtgtacacagtgtacacgtggcacagtttaattagtccacgtaacaaatatttaaaattaaaataaaaaattaattactttaaaactaaaaaataaaaaaatttctttttcctt

SEQ ID NO: 296716 - DNA, 1470 bp, Cannabis indica
tttattatttctattgaagcacatcatttttcaacaaatttatatttaattcttttttaatttgagttaattggtcaaacattgagaaaaactatactttacccaacaacaaaaaaaaaggccatgttattgaggtaactcattcgaatcacatgcatatggttattaaggggatcagattgcacgcttattgggttggtggaaataattttaggtaatcaagaaattattaacaagttgatgagagaggtaacatatatataggagtggtaagtggtaacactagacatgtttgaatacaataatttccgaaattggtttgtgttttgcatggaagtttaattatttttattttttatttttttgtataaataactcaaaatattaataagattatgatgaagtacaatgataaaaatatagttaaaggggtgaacatgtttcttttatcttcatcttcttttatttatttttgtaacatttggctttgcttttgcctacaaaggaaagagcataaacgatttggttgtttacttgtcggacaattaatataggcagtttctacatatctccatatcttgattaaagtgcttctctctcctcacatgcacaaaactaattctcaaactaattaattactaaaaatattcattttatttttccatctttgatcgcaggttgctaaatattattagtaaatgtacttcaaacattttgattactaaattgatttatatatatatgtatatatatatatgtatggagggaatctaacttgagaattaaactagtttcctaaaagtagacaaaattttaactctttccttgttgatatagcctatatatttaagcttggaaagttataatggcgtaaggaatacaacaaagtataaaagaattcggtgactacaattaaagtaaataaattcaaaactatataaaatatatatattaatggttttttttttaatgtatatgtattttttttcttaagaaaacaagtgattgtttggggaagaaaaatagttttttacaaagtccattaagggaggaaaaagtccaatagagtaataaagtgaaaagaactatgacacgatatcttcaaaacctgcaaaagtcgattagaaagaagatgataacaacaaacatgaaaaattaagattgaaaatcttaacctagaccaggtcgtgataagatttaactcgaaccagaccgagaaaggacatgattcaaactaagacgagataagtcttaacttagacccagttaagatagactatgtaaagtccttttttggcaagttagttgacaaaataatttttctatttatggtaagattgctatgcattcatattcgatttcttgccttataaattcggattgtagttgctcttttccttgtttggaaagttacactttcagctgaactttcctttgttgaaatcttctcaaaagagaaggaattctctt

SEQ ID NO: 296717 - DNA, 6926 bp, Cannabis indica
aaaaaaaaaaaaacttaccttaaacttttacaattagctagcggagagtgagaggaacgtgcggcccatatgcaacgcaagccaagccgacatggcataaactcaacactcactcgtcagtcctcactgacttcttcttccatttccatatccaattccaattcggtttaaataaagcatattctcactccttttcaattcgtcgttttctctttctcttttcttcttcttcttcgaggaaagtaaaaagaagaaaaagtcacccggaaagtctgttggggagtttgggtatggatctgtggtcagtgcaagtgaaacactgtatcaaaagccctgtcttgctcaggaactcgtttcccgagaaacccatttcatggaatccggcaaagtcgaaaatttccttgctgggtattgacgagaacagggttttcgagatcaagattaggtcttcttctgggtttcgttctttcgttgttcgagctgttgggaagaagaatcatggcaattcatcttcgtctggtacgccttgatgatcaccatgccgatttatttttcttggattgtcaactctttgttgaattttttttttcttaagtttgactttttgtactcttagataactgggaaaaggcgcctttttttttgttttccttttaaagttgtccaaaggataagcattgaaatttcgtaggttgtgaattttgattcagagtaaggaattttggataatgtgattgttcaattgtgtatttttactaatagtttctttagtgtatgaaattacatttaaagaagtaaatacttgaactgggtaagaatgtagagtagtttttggtacaagctgacgacattcacttcgatttccatagtttgagaacttaaaagcacaaacttggttcagttttgaactttgataggttattttttcactaacttgtgtgctctgaacgttctaagtttatgaattgtttttcacttgttggtcttatatttgtgaacctatgaagtcattttaattgattgtgactaagcgtattgtatgtatgtggttgtgatgttacatataggaaatggtgatcggcctagtccagaagatggtggaaaagaaagcaattcatctggttcccttcgtataaacttagattggagagaagtcagagcaaacctatttgcccgggagcaggtgatgtaaagctatatatatttatgtatttatagatagatgagttcaccaagtacattgagaaatctgtgctattagttggtttgttgtaatgtatctaatatactttgcaatatttcttctacaggctgagaaggtagaatctgatcctcagaacaaaggtgcttcatcccacgagtcaaaacctcttggttcaaagtgggctcatcctatttctgtaccagagacaggctgtgtcctcgttgccacagaaaagctcgatggggtacgaacatttgaaagaactgtagtcctcctccttagatccggtaccagacatccacaagaagggcctttcggtgttgttatcaaccgaccacttcacaagaaaataaaacatatgaaacccaccaatcttgatcttgccaccacgttttctgattgttctttgcatttcggtgggcctctagaggcaagtatgtttctgttgaaaacagggggaagagcaaagctgcctggttttgaagaggttatccctggcctatgttttggcgctaggaacagtcttgatgaagctgctgaactagtaaagaagggagtcttaaatcctcaggatttcagattttttgttggttatgctgggtggcaacttgatcagttgagagaggagatcgagtcggattactggtatgttgctgcttgcagctctaatctaatatacgggagtttctcagattcctcatcagaaaatttatgggaggagatattgcagctaatgggtggccagtattctgaattgagccggaagcctaagcaggatatgtagttagcgttcggcctgtagatgttcttaataaaaactaatctaatagtcgaactcgaaggaagagtggtaatgaaggtatatgcagaagccaaatgtacagaaagttcagtggcttagcagattagtagatcttgtttcttttctttattttcatccctgagaacttatttatgcatcatgtaaaaaaaaatccttcttttacaataaatttatgtttccaatcatctacaaagcaatgaatcagttaaattgtgcaagagagacagcagtttaatactttctttttctttttcatatcttcctaacataatgaatctggagaaagccaatggataatttacaatgtgttatatgaaacagctttttttttttctttttttacactatacaaagtgaatatctcaagctaccaaacaattaagggaaagaacaaaatatgtccactttgaaaattataatctgtgggatggtttcacttgaagagagaattattacaatatgtccactggttttcatttctgaatatacataaccagttcaatcttggtcaggtcaggacaggtctccgaggtgatacatctcttcttgcttgttcaggtctaccggtgagactcgattggtactaacagctgcagcccttttgctggtccttcttaattggcaacagcaccattatttggaattggagtgttgtttgttaatatattaacaagaaaaaaaacaataacacttgttcaactgtaattgtcatagcctttattggttctagccttgtcaagacgagctttacgtactgcttgttgaatttgtctctcgtgttctttaagtacatcttctaaattcccacctggaggaaccaaaggtccagagtaatggattctgttcttcttctgtacatatccctgcaaaagaaaattatcaatatgttatatttcaacaacttctctggttaaaataattgaaatagaagttaatagggatttttgtttcttccttttttttaccatgtcagattcttttgtatgcatagtttcactccttttagcagaagagatcatagacgattcgggttgtgacatcaaaggtttttgagatcttaagtctgttttattcctaatagaattatctactgtcttgctccttgatgatcctggctcagcattattactactactactactactgggatggaccatagaactagaatgagcataaccattattctgtctttctcctcttggtggttccattcgaaaacctgatcctccatcatctggggtactgctgtacttatgacttgatgaggttttggcattggaatgtttctgccaatatattacattacagttaaaagttataatctttgactgaacaaaattttattaatactctactacatcttttcaagcctacctgcaaagaagtgtcttgttcgtcttcgaattctggtgttggcaattggttggcatctcttgaaccccttctaacagattcaggacctcgtccttttaccgtatctgctctacgcctgaaacaaaatgataaagataagatgtatgagtatctatctcaaaatcaattggcaacgactggagttatatatataggtcttacttccttgcttcctcattgcgaagcttgacatcaatctccttgctcgggggatactttggtaaactagatggatcacaaggaaggggctctgttgtaaagaactgaaaggaaaaaccagtgactaatagaaagaaaaaaccaagtttggagaaagaaaagtctttaagaaatttggggacattgttaacttacatcacttgcaagtgaagttgcagcggttccacgatcttttggttcgattgcgagtagtttatcaacaagaggcattgcataagaagggaagtctttgaatgtttcgggaagacgacgcttggaaggttgttgaggcttgaagctagtagcatgtggtaactgtttttttgccagaaatcttctgatggtgaaccacaaagtttgaaaatcttatgcatttgctctacctcagttctgccaggcataattggtttgcctgcaaacatttctgcaagaatacaaccaacactccacaaatcaatggctggtccgtactgtgtggaaccaagaagaagctcaggtggtctgtaccacagagtcaccacacgactagtcattggttgattctgatcataaaatgtagccaaaccaaagtctccaatctttaaaactccattgttgtcaatcaaaatattggatcctttaatgtcacggtgcagaacaccacgactatgacagtgttcaagtccacgaagcaattgttgcatgtaacattttatctgtacaaatcccatatcatatcatataataaaattagaaaagaaagagtaatttgctgtcacaccccctcatatatgtattcatttttatgtagttaaatactcgaaactgtaccaattttaaaatttctgtctaatttgtctgttatgctagcttggttgcaagtttttatgtttttaaacgtgcccagacaaaactcatgtttccatacataaggaaactagtgtcaccaaaaagttaaagtattgctattacgcattagtagtgcccaatataattggttagcgatatttaattacgctgatagcggtatgagtggtctttttgcaattctcacaaattaggatcaggggttaattgtgtaaaatttaaaacataaggtttgactgcaaattaaataagagcactttagagcattacttactaataagaaactaattagtacctgagattcagtaaatttgattcctggggttgctgcaatcccagcaagatcatgatccatgtactcaaaaacaaggtataagcttcttgacattcttgaagtgactaaaccttcaagcttcataacgtttggatgatcaagtctcctcaatatatggatttctcttgccataaaacgaacactttctggatccatattaacaaatctaactttctttaatgcaacaattttaccagtttcaaggtctcgagctttatagacactgctgtatgttccttgtccaatctgcatatacatatacatatacatataattaagcctaaaaagagtcaaactttattaccaaaaactaaaagaaagtcaaacactttactttgtctaacttctcaaatgactctgctttacgaggtgtccatcctttaatggcgtctccggcaacggaggtcaaccacgacggccaaccagcctcttcattcgaatttcttccattaacaacactagctatcctagtcacctgtggttttgatgatttactaaccgagggtccttcaacgaccaccacaactctgttgtcttcttcctttggctttctgtgaatagagccatttgagatatgagaacaagtgttggctcttgatgttgttctagataaaggacgaacagagccaccgtccgccttaacttcaaccaagaaattttctctcttttgagatggaggagcgatcagttgaaccggatttgccttacccaattccttttctttctcgtatttttcggctacatccttttccgatgctccctttgagcaaatacaacccatatcttaacggtataaaccgtatgttttaaaaacaggggaacctgaatttgtatgagaatcgtcaatggaggcttcgacttgcaaatattttactattaaccaaatgggaaatcctgcattttcctgggaaaacaagagtttccctcaatagctcaatctgggtactcctcgaactcattaacaaatcaagtttaatggcagaaagttccaaacttttcacacaacctgaatttcgggtcgccggattttattgttttcttttcagatgttacgaaaaaaattgaataaaaatggatgatcatgtttagagaaaccggagaatgaaaaatgaaaagggcattaatggaaaaatgaaaactttgttatgattttgagatttggttgtgaatggaagaatgattttcggatatggttatgtaatgtgtccctagaaataaggaaaaccaatcgtttttgggactatacaggactggtttagatagcaagtaacagagatctttctcttaactaaacttcttcttctttctttttctttaaagaaaagaaaaatcacgtcggagttgagaaagctcgaaacaaagtagacgtgcatacaactatagtttgctggattacacgtggctcaatgtctgactatagcagattgggtcccatcccatttcaactaactaaacgattcttttttaactttacccaagctcaaacgacggtaaatatgttgtcgtttcttgtgagaaatggtcataattaatcaattaatttataaaaaggttcattatttttctggacaatatatttggtaatccctttaacataagtcaaccagtttaaatataaacataatgatgagctggtgtttatagaaactaaactattctctaattatttgtatacttatgattttaatttgtaccactcaattcatttttatataactcaatgtataatatcaaataattagtaaattaattgcaaatattataataaaggataattaaattcgtttttccacacaaataagtcacataacttatagtaaaataagagtacattttgttgttggaataatgaaagtataaaaataagaatgtaaattatatttgagtgaggaggctttagtgaagatagtgttatttattgttggtgatattcaacattttttttaggtgtgtaatgttggttctcgtcattttatctttcatgagtggaatattacagcacatacattagctaaactgtgttttaagataatttcaattatcttgggaaaaaaataggaatattctaaaaagggaaaaatattacaacaatactgtgggccggccca

SEQ ID NO: 296718 - DNA, 4422 bp, Cannabis indica
cccaatcagcatcacagaaggcaataaggtcagttgtatgagttctatggagatgcagcccgtgatcaatagtgccacttagatatctgagaatacgcttaacagcctgccaatgggactgaagcggattcttcataaattgacacactttgttgatgctaaaggccagctcaggtctagtaatcaagagatattgtaaagcgccaacaatggaccgatatagctgagggtcatcaaatggttcatgaccataagcagatagttttaaaccagcaaccataggtgtaggaagaggtttggcttcattcattttggccttagacaataaatccttgatatacttagcttgtgacaaatgaagacccacgagtgtgtgctgaacttgaataccaagaaaatagtgtagatttccaagatctttaagtgagaacttggaattcagcaaactgataatattggcaatggcttgagagttgtcacccgtgatgacaatgtcatcaacatagactaatatgattgttgtggatgatttggagtgctgaatgaacatagaccggtctgatttagaggatgaaaaaccaagatcagtgagagtggtgtttaatttgtcaaaccaagctcgaggagcttgtttgagaccatacaaggctttgttgagtttgcacaccaagtgaggggcatcgggcaagacaaaaccagggggttgagtcatgtatacttcctcttgcaaatcaccattgagaaaagcattattaacatctagttgtttgatatcccaaccatttgagagagccaaagatagaacaacacgaatagtaactggtttgaccactgggctgaatgtttcagtgaagtcaaaccccggttgttgatgaaaaccttttgccacaagtcttgcttttagtgtggagacactaccatctggattctctttgattctatacacccatttacacccaatagcctctctccccgggggtaaaaccacataagtccaagttttattctttttcagtgcacacatttcagtagacatagctccattccattgaggactttgcattgcttgctttacactagttggttctttgagagccaaataagctttaggctttctgattccagacttggatcgggtctgcatagtgtgggaatttgtagcagctgggacagtggtgtttgatgcagcaggtatggcagtttctgtggtgaggcccctgttgtcattgctttctgctgtaatactaggaggattaacaatgttatcagtactgaaattagaaggagatgatacaggagcagtgggagcatttgttgcttcaggtagctgaatctgaggagactgtgcagcagtagcagtagatggcaaagggggaaccgatctatcacaggatgttggtattgagtgtgatgcctgcaaagaattagaaagactagagatagcatttgtatgaggcaaattagatgcattatggtgtgctgtgacagatgcagaagtgggaatggttggaatagcagctgaaggataaaaggaggcaattgttgctgttgtaattggttcatgctgatgggatgcataaggaaattgagactcatgaaagattacatctcttgagatgtagacacgaccagaagtatcaagacatttataccctttatgattgatgctatatccaataaaggtgcatggggtagacctaaattgcattttgtgcttattgtaaggtcttatattgggatagcaagagcaaccgaaggttttgaggcttgtgtaatcgggttgaatgtgaaatagagtttcaatgggtgatttattgttgagaacaggtgttggaagtctattgtgaatatagacagcggttctaaaagcctcatcccaaaattttaaaggcattgaagcttgagcaagaagagttaggccattttcaactatatgtctgtgttttcgttcagcaagaccattttgctcatgggtagtaggacatgggtgtctatgaatgataccagcctcttttagtgtgtgtgtaaacgacctatactcacccccccaatcagtttgtagggtttttattttgtgaccaagttgcaactcggcttcagctttgaaatgctgaaatgtttttaaagcttcatctttggttttaagcatgtatatccaagtgaatctggaatatgcatcaacaaaatgaatataatacttataaccattgagagatggagtgtgagagggaccccaaagatcagaaacaactaactgaagtggtgaagtgtatgtagtgctagaaatctttggaaaagggaatttgtgtattttgcccaaacaacatgcttgacaaatggaattgttgtctttattagaatattgtatattacatgattggagcacagacttgaccactttttgagaagggtggccaagtcgattgtgccaaacatcaaattgtgaaatacaagcagtgttatttgaaacatgaggtctggtgcattgtgtaggtgagaaaacagtggctgtcaatgttttggtgactgaacttgaggttgagaagggttgctgtaagcaccagtaggacaaatagaaggcagcaagtgcagctgagagggattaaatgagtacaggccattctggtatgtcccagtcatcaacacagtgtgagaaacctgatccttaacaaggcaaacatcaggatgaaattcaaaaaagacactgttatctctagcaaacttagaaacacttattagatttttggtgatttctgggacatgaagcatgttgtttaaaatgagtggagaagcattatgagcattaggtaaaataacagaatgacctatatgtttgatagacaaacctgtgccatctcctacaaccagctgctcagatccttcatagggtgaattggaggccatgttgtgaacatctggtgtgcaatggtttgttgctcctgaatcgggataccagttggtatcgttttgtccagatgtgtgtgccacatgagcttgtggagaagaagcaggagggttcgattgaaaaccagtgaagcttttatcgaaccggtagaaacaatccaccacagtatgaccaattttgagacacagttgacactggggcctattagatgaattgcttgtcctgccgcctctggtgaagcctcctcgaggagcctgagtgtattgaggaaaagtgtattgttgtatgccatagccactgcccctgggattgtaaaactgagtgccacggtgtgatggagatcctctggcagcagagaactggggagaaaaagatccaaattgcagagggggtcgaggagggtaattgattttgttaaatcgattctgatatgctaggttcacctcaggttgttgctcagcctcagaagtagcaagatttgctgtaagttcaagatcttgatctgtcttctcaattctggattcggatgccagcaataatgcctcaatttctccaacggagtacccttcaatacgagtgtttgtcgaaatgacgaaggtgtcgtaattgctgggtagtcctttgaagattgcagcaatatggtcacgatcgctaagaacttctccgaccgacgcgagaagatcaacatgctgcttcactttcaacagatagtcattaagagacagtgtgcctttctttaagttctggagcttagtcttgaattccaagatcttagatgagactttgagcgtgaaatgtttttccagatttacctatatttgacgagctgtgttgcacccaaccattcgagtaaggaggctctccgtcatagacgataacaaccacgagaccaacaactgatcttgcacatcccagtcgataaattcaggattgtaggttgaggaggcacgatcggcagcattgaggaattgaggtggaggatcgtcatcttgaatgaacttcagcaaacgatttccccgaatcgcagctaggacctgctgtttccaaagaagaaaattatggtcattcaattttacggaaagattatgtgtaaagtgaacaggtgagaactcatcagcatcacgatttcgatttctctgcaagtttgaaggatttccaagattcgaggggttggccgagttttgagctgcaacagtcgccatattcgccgtcaatggtggaaatggctctgataccatattatggtttgtattccttcgattcatgatgaaaaagattgaacaacaatcaaagataaagatgaacaaagaacagagagaaagagaagaaagtcagagaaagtgaatcaaaggaagtcattgtattatctatcttttggttacacagtacaaagtgacttatatagatcacaggagagaaagaaatagagaacagatctaactgaaattagttagaaataaccactctgtactaactgaaataaccatcataacagaacaggaaaagactccctaata

SEQ ID NO: 296719 - DNA, 2869 bp, Cannabis indica
taaaatttaattttttggctaaaaaaaaataagcaaaaaagagttgtaattatattaaaaaagtaacattaattatctaataataatagtagtgtaattatgtcattttcatgtggaccaaaagaattgaaaggtgtaattgaaactcttcgattatcattttaaaaacaaaaagaaaaaattacttctaatttcataattagttgaataaatatattaaacctcttaattactctaaattacaaaattacataatatctttcaaaacagacccttaccaaaaacataacaaaatctacttgaagatataacatattatcttctattcatactcaagctcaaaaagttgagaactcccaaataacaatggtaaaagagaatttgagttgtctatctaaataaataaaaaaataaaaatcatcaaatgtcagaaatatgtgtattgagaaaaataaaataaaataaaaataaaagctgtcatcaattattatggactcccaagagactagccccatacctcactatataatatcttctatatagaaatattattttttattttttatacataaaatgacaacaataatacacaaattacagcccttttatgctttactcaaaataaactcttttttaaaaagctacaaaagtttatatttttcaagcttttgataaagtaatattgtgatggataatactcaataattaaaagaaaataaaaaagatcttctaaaaaagtaattattttgacaaatagatattaacataattaaaggtctagctttctcctaattatttcccattttcatttcaaaatgaatttaaatttatgtggctcattccctaatttgaatttaggaaagagtaaaacatactttgtctacaactacaactaaacaaaataaatgcacagaaaaagtggaaaaagaatcattaaaaatggagagagatgaaatagaaagttataaataattgaagtaaattatataaattgatatgtgaattttagttaaattttaaattactctcgtagttgttatgtgaattctaagtaaattttagtaaaaatacaaaatatatatatataaaaataaaaaaccccaataattaattgtaaaaaataaaaaataaaacacacaattgctcattttagaagcaaatgtttggatttggataaatgaacaaaaacggcacttcaaataaaaacaattatttcatgtttccaagccaagactcctgtaatgtcaagttatcataattttataattaaatatatttatgtatatgaatataatatggtgaaaaaatccatgttgtccaaaaataattataagaagtttcaaaatgagataatggggttttaatgaaggaacatgaaaaacacctcttctccactaattatgcaaaacaaaacaaccctattttagtatttacttcacccacatgaaatacatgacctacattcttgtattcttttatgtacaataaatcaaattaatttgtggttttaaactaaagaaaaaaaagtcttcaatataatatatattaccattaaaaaaaaaaattgctaggtgttaagtacttttttcggtgtcataccgatattagtgtaattaagtattagatctcatataattttaaaaaataattttcaatatcattaattaatcgtaagacactacctataaaaatgctaagttccactgatatataacaatactcttaacaaaattgtcaagctaaatattattcttaatgaagagttatcaagatgtctatttttactcataatcaattattagcaaaaaaatttatatatacacaataaaaaatacaacttgatgatcaatgcaattaatatgtatactatcaagagataactacaactagtgtaaatagtaatatatatattattgtgattcactttcacatgggtaagaaagaattagggagataataataatggtagtaactaactaataatactccaaatttatttttattttctcaaaataattaaaaaaaaatacactaagtccaatgagattgtggggtcaaagtagtacactactatcacatggtatgttaacaattacacaagactccattttttctttctaaaaggtaaaatctttctatggacaaagccttaaaagtaacaattcaaggatcctatgtcattttctaattactattcttggtctatttacttcactccttcaacatcaatttgttttgacttgaaaataattccctctctttttttctttcttctttttaattttttgattgtggtggaaatttgaagaagaatgacataatgtaacaagagaattatatagtcaactttgatataaaaatgaaatttgaaaaagcattctatatcatcattgtatttgttatgctagcaaagaaaaatgtgaggaaatgaaaaagaaaataataataagaaaaagttagtttgctttaggtaaaaaataataaaagttttttactagattattttatttatttttaaagtggagctgaaaaataaaattaaaaaagaaaaaaataactctaaattggagaattgattttgtaaataatgtgactgagattactataataaaatacctataaagtaaaatattatcatttctattcttcatgattataatatctcatattaatttcttacctacacattttagtagacaaatggcacacacattttttaccttacaaaatttgtgtgtaaaaaaatgtgacatcaaatgaaatatttgttaaagtagtgatattttttaatttctgtacccaaagaaattaagtataaattgaggaataactattttttgtatttattaattaaaaatattcttatatt

SEQ ID NO: 296720 - DNA, 3699 bp, Cannabis indica
gatcgtttaataaaattaacagaaacatgtggagaataagaagtaaatgtttacaatcattaacaaccacaccaaaaacagattacatggtgtgagaggtacgaatgacttgaacagtgagcatgctaacagtaaaataaagttttactactcaaaactatacaaacaaattattctcttagattaataaacacaaatgatgaagcaacgcgtctcttagctttaaatgcatttatatatataaatatataaatcatgtcaataaaaataaaaagctttacaaaaagaaatgatgatttgtagctttaacagcataaaagtgtgtgtaacttttgacacttgcaccatcaataatgtgagtcagtgaccaactgttacaatctattaaaatatatatattcagtcccacaaattcatgtgagaaataaacaatgtttattttaattaattcagatatgttatatataatcataaagaagaagaaaacagcaacaaacagatgtatgtaatttgaagaacaatactgtatgttggatttatttagtatccaaagctataacctcttatataaatatatataaatatgagtgcaattaatatagtgtaaaaataaatatttttaatatttttttaattaagtataaaaatttaattttttattagtaattttaaatttaatagtttagtattttaaaattaatatttatagaattattctaaatataatatattaattgtagtgaaaaatccaccgtcttataataatgaatttagcttagctggattattctaattgtggcgtgtttatttatgtcgttttcctacattattatcttgttccttaaaaaaaaaaaaattaataaaaagacttgctttccaaattcaaacttatatctttattcaaataactatataaatgaaaaactagtcatctaaagattacatcaatccaaataacttgaccccatttggtcagttttctggtacaactgacataaaattggcctaattataatccacaacaacaaacaatatataacataggaaatgcatttttaaaagagaaatttacgccaaacaacattaatttgattttatttgtaattttagctttgtttatattaatgcataatataccgcttatttttttaaaaaaattggacacgtatactgattatttatttttacattttaattgttctttcgtttctttttctttgtgtcagtacttcaactcacacataacacacacttcttacttccacatcatcacaattttattggtgccaaccatgaaattactatacttaccaaaaacaaaaaaaatatatatatatatataaaattactattatactctctataccttaatgtatgtagttaattaaaatttaattaaataagattcaatataacaactaaatttatagttcattattttttttttcaaatttaaaaattattaaataataaattatattctcacaaatttcttttataatacctttggatttttataaataaaatcaattttaagtataatagtaacccataaaattagttggtatattaattttattcaaatataaattttagttacttctttgttaataatttataaaaataaaataaaatgttacttttatcttgtttatctttttttatatcagaatatatatatttttcacaacttaaaatatgatttaaaattgctaaaaacaaaaggtaacctcaaagtatcttaaataattaaataacatagtatagcctaaacgttaaaaaataaaatcatacttttaaagtaactgatcaaaataagcaaccaaatgtgtattagaaaaaaaatatcttaaaacaattttttttaataaaaagtaactaattgatatattatttacatcaaaagcaactaaaatgttactttttttaaaacttacaaaacacataaatttctgaaaacgagatttttcaagttttttccactttcggtaattattttagatttcggtatttgtgctaacgtggcacaccggtatttgtacaaataattttcttaaaggtatttttataaataaaatcaattttaggtataatattgaaaagacccctttttaaaatggtccactatacatttttattggttttggtattttgagaaaaaaaattaatctaactttttttttatgattgtacatattataattatttgaagtattctgtacgtaaaagtttgagggttttgtaaaattttaacacaggcgtgtgaataaattctttgaacattgatttttatattgtgaattagtttaaatttttctaaattttatagaatattttaagtagtaagaattggacaaaaattttattctagatgccaaataaatataaaatgcatccatccacccatttgagagggtccatttttagtacagccacatttactgtaaaaacaagttacacatcaagaattatccaccaaaactagcttatatccaaacatgtatatgtacaattaaacaaatatgtactccaaacaatacaatgccaaatgtgataagagtatcccacattacattgactacatataaagaatattattctataaaaatataaattgctaattaattttgagatgaaatcaaatttgagctgaactgctaacactattcgataaaatgtgggagaaactactctcattcgagctgaaggcgactgtactcatggaaggccaagtaaagacgggcttaaaaggtgggacatgaggcggtggcatagtctccgcgataatctgacatatggcttgagtttgcggcctgaagctagcttcaggttgcgagcacgccaaccccaatagcagcagcctattggcttctccaacgtcgtactcaccgccaacgcgcctaagcctctcgtctacagcttcttcaatacgtccctcgcggtgaagcatccaaacccaatcaaccaaagtgaattgatccttttcgtgctgaatcttaacaccgggacttctcccggtcacgacttctaacactaccgccccaaacccgaacacatcagattcgggagaagctttgccagtgtggaagcattctggggccacataccccatggtgcctgggacaccacatagctctagctcagcgtaggagtttttttcattctccaacgctcgagctaggccaaaatcacccaaacgagcgttgaaattagagtctagcaagatattgctggctttaaggtcccgatgtacgaccttttggtcgtactcgttgtggaggtaatgtagcgccgacgccacgccttttaggatcttgtgccgatgttgccatgagagggtggtttggtttgaattgaggtgtttttccacactaccatttggcatataatcgtatactagtaaaagcttccctttctcgtagcaccaaccttcaaaaaagttataaattaacacaaggttgttgagtcaatttatccaagtaaaaaacttaattttttagaggtatttttatattttagtctagttttcataaaaataattttacaggctatactccatttttatatattttactttcttttttactcaatgtttataaaatatgtttggttgttagttctgttaaattgtgagactttgccattgttgttgatgcagcttataaatctagacaaataacataattatttattactgtt

SEQ ID NO: 296721 - DNA, 3073 bp, Cannabis indica
tttttatgatgttactgaataagctgtaattccaatattggcgtaaataagttgaactaaaaagcgagttaagttagtgtgacatatatgttagcttgtgataattgataccatgtctagctagatacaaagaacttagattgtgtggatatgtaatatactggcgtgaggttatcgactctccttatattgaattaatttttatttttcttgaaaaaaattgtattaattgctatattttcatattggcaactaatcactattgtagtttttataactcggatttagtagacaataatataattaatcaccccctcaaaaaaaagaaaaatatatataatcaatcacatttttttttgaaatgataatcaatcacattttcatgagtatactgattttttgtcaaaataaaacttaataataatctgatatagagatattatgacaaaactagttatattttctgtatctgttcgtgtgagaaattatcttaatcttaaagttgattatatttaaaaatcaaattgttgaaaattgagctcagtgtcttatttttattattttggaaaatataagatccattttatcatttaacaaaacagagagtttaattaatatcatttgcaaaataccaggaccaaaatagtatttactctattcttttttgagaaaacaattttctagtcacaaacttatcagcccctaatattctcgtcagtttttagggagaatgcaagttcaaagactgccactttccattgcccctctctctccaccactttcctcaaactatccccttcttcctatgaccaaacttttcttgtccaaatcaaattttccttatggtcctctcatattgaaaacaatctctaccaaccaccttgcctaagttaatgagtggagtatctgctaaacaaggatatgttgatggcgatggtgattttgattatgatgatgggttttacatgaggaagtgtgtgaagattgcaagaaaggctatcgtgtgtaccaagtcccaacctcttggtgggttgtgttattgtcaatgatggaaagattgttggccaagggtttcttcctaaagctggccagccttatgctgaggtaaatctcatttttatttcattacttttattattattattttttttattaggttttttagtactaaaacttcgtgaagtcaaagaggttaaacaaacaactttttgaagtcaattagttataataaagtcatattaatgttgtattgttacaaaagtaataaaaggcatcagaagatctgactagagttagttgacatcaagggtttgtttgttaaattctttgatttctaggtgtttttagtactgaaaaactttatttctgatggtagaggtatgactttctgggtatatttattaagtgggcatgaaaaactaaagcttatttgatcttcaattattaacctagtgtttgctatattgtggaagagataacgaatggtcagaacatggttccaactgctgtcttctggaaaagaggttctaacaaaataatgttatgattcttttctgaacacttgatagtgtttttgttgaagcttatgcttaaagaactagtattttgctcaagtaacttttctcatgttgagtaagggggcatgttctataggtatttgctcttagagatgctggagattcagctgagaatgaaatagcgtatgtaaccactttggaagaactccaccatgtactgaggatctcattaaagccaaagtgaaaagggtggtgattggaatagatccaaatccacttgtagcatcaaaaggggtcaagaaactcagatatgctggagttgaagttactatagggatagaagaagaactatgcaagagcttgaatgagccttttgtccacctaatgctcacagggaagtctttcatcacacttaggtaaataaaattaattggtacttttgattcttttagttaactctacaaatgagtaccgtattaaactgtcaagtttgtgtggcattctggatttcatagagttttcatatgagcattttaggtgtgaaaatatgtctcttcttgactaacagatactctctctcagtcagtggccagattttagaccagctttgagaaggatctacaaagtccatcggttattactcgaagttgctgcaggaatatgatgttgttatagtttcatctgcctcaataaccgacaagttattgattcctcaatcccaagaccctggagccaatgacccttctggatcattgcagcaagtaataataatggttctttgaataaaatctttgatttttcgatagaagtagctactaaggtgatagttttcagtaaccaagagatagtagaaccaaaactcattgagagagaaacagtagttttggatcaaatcaacttgaatgcccgttcttgaatacagtaagtgccaaggattttgtagcattttgttggatttgagaggaagtgtacatgatatgagagagctactgaaagagggttttgagtaaaatttgatgcgaaaggttgtgatagaagtgttgccccagtgggttgaaaaggatggtaagaactcttgtgttgcattaagcagcttggataaaagtttggacaacaagaaattgaagcctaaaatctcctgtaagagtgttttacttgagagatatttttgagtgaaaaatctcaaataagggtattttactttgaggagttatagttatgtggctcttctcttgttacaaagaaaagaaaaattgcaaataatagtaacaactgattttggaatttatattaagagaaaattgtggtaaaagtttcaaaaacatcaatttgatgcagataaattcttaatctcaaaaatttgtggtaataatcaccaagctcccaattcttgttagtctgttagtcctcattttaattgatccattaacttattcaaaattaccacgtgtcgaagtattattagttcaaataataattttaattaaaaaataaaataaataaattatttaaaaatcatacaaaatgagttttttttttctttttctatttatttt

SEQ ID NO: 296722 - DNA, 6397 bp, Cannabis indica
aaaaaaaattgactagaatacccaactgaatgtggaaagagattgaaggtataaggtttaccgaaactataaacctacctaataccattagaagtttagaacctttagcattttaataaagacaaaggttttgtaaaaacaaaattaatgaaatgagtaatgacaacaagtgagaagccacctaattccagcaaataagaaactgtcaaactttatttagtttaacattaaaaaagattttgctgaaaaagataaaatatacatacttgataataattcttataaaagcaaaacttcacaataaaggaataattagctggctctgactcccaaatatatctttattttcttgtttaaattaaaaaattataactacttcttgactaataatatatccttaataaataaacaaaagattttcagattcaatagtaccaaatgatacaatttaaaatgttattggtataattgtccctccaagttttggctttttaaattattactttgtttaataattaggttctagaatttaatttaattattaattaatgaattttgatatttctcataattatgatgttcttttaaagaaaaattagttttcattgttaaaataaattacaatttcttaaaaacataaaatcacaattctatcctacaattctcaataaaatgtcaaaagaaacaacataaataaaaagtatataaattacataaaaattctttatattttaagaaattttacaatcaaataacagtattcaaaacaagagagaatatatttgctattaaaaaaaaaaaaaaaaacaagagagaatatattaatcaacaatttataatttatattttaattataaagtattcagaaagaaaaaataatacaaatttaaaataatgaaattaattgctacaatttacttccatttttagaatatttagtcaattttttttactacaaatttactgatacttacctaatgactaaaatttaaaacaaaaaacattctaggacttaattgataaatgaagcagacaagaaggggcaatatggtaaaaacaaaaattaagattagtgttgggattgtgttagtcgtgccttttgtactgtgttttgtgttgtgtaccaaagaaaagaaaaagtcaattcttctcaattgtcagaatagaacaaagacacccctcctaaagcttatgcctttaatatcttcaattagtaaccaaagaccccatttcctcaaagatcagatttttatcatcatcacttgagttcatcacatcacaattcattcacatattcctctcataaaaattccaactttcatgaataccttcaattagaagaccaagaagaggaagacccagttctcagtattattccccctttcttcccctttgaaaaggtcagaattttactagtattgactttgattatgaaatgatcacatgaaaatttgaaaaaatcccaactttaaatatggtttggttttaaactatttcaacaacagaacaaaccatcatcatgagttgctttagctgttgtagagaagaggatgttcatagtagaggcatcgataatggacaattcatgcccaattctgcaccaggtgatttcattattcttcttctcttcttttcattttttggctctttgatttgtttgggttaatagttttaaccctttatatataggcaatagtggtggtcattatgctagagaagctgcaccaagggagatcaggactgttcctgttcaacccattgctgtgcctaacatttcaattgatgacttgaaagaaatgactgatagttttgggaccaaatccttgattggagagggctcttatggaagagtctatcgtggtgttttgaaaactggtcaagctgcagctattaagaaattagattcaagtaaacaaccagaacaagagtttttagctcaggttgttacttttattgatttgttatgatatgtaaacaaacccctttattctctctattcattaactgtttattatatgctttaattatttttcagatctccatggtgtcaagactgaaacatgaaaatgtagtccaattgcttggttattgtgtggatggtccacttagagtccttgcatatgagtatgcttctaatggatcacttcatgatcttcttcatggttggtattattgccaagtacttgtttgattttttccattatatggtctgtttgtttgcattttgatcaatttgttgagatgatttcgaaacaggaaagaaaggtgtcaaaggatcacaaccaggtctagttctctcatggtctcaaagagttaaaattgctgtaggagcagctagaggtcttgagtatttacacgaaaaggctcaaccccatatcattcatcgcgatataaagtccagcaatatactactttttgagtctgatgttgcgaaaatcgctgattttgatctctcgaatcaagcccctgatgcagcagcgcggcttcattctactcgtgttcttgggactttcggttatcatgctccagagtatgttctcttaaatcacaatactattaagctactaacaataataaagatattagaattgttagattttgtgccattgatctcttgaatcacattggagcctaaaatttatgttttggatggcagatatgcaatgactggacagctgagttcaaagagtgatgtttacagtttcggtgttgtgttgctggaacttttgactggccgtaaacctgtcgatcacacgttgccacggggacaacagagccttgtgacatgggtaatgatttcaacttaagtcctcatctactctaccagtagctcttataatcgagttttgtttgtctggtctaataatttcgatttttctgtttaggctacaccgaaactcagtgaagacaaggtgaagcagtgtgttgatgcaagactcaatggagaattccctccaaaggcagttgcaaaggtaacaaacacaattttccttaactaacaacatatgaatcacatgactttgaatcaatctaaccactttttgtttaaatttaccttccaaacagttggctgcagttgctgccttgtgtgttcagtatgaagctgatttccgtccaaacatgagcattgtagtcaaagctctacagcctttgttgaatcctcggccagcgccaagtccaggtcccccgcagtgaatcgccacgaatgtgaattttccgagtctccgaccactttatagtggaatataatgctaaagatttgttttgtacacatgatggttcttctattcaatgttttattagttttccttcatcatttggcctcttatggttcttaaattatcattgaactggagctttgtaattgacatgagcattctatagattgaattatacaaagtattgatgttatttgaaacttagtcttgaggatcataaccataacataaaaatgaaaactttgatattaaaaacagaacaagtggttccacagataatagatttcagttcacaaaaattcaaattccttaatagttatgatcacaaaaatcagttctttttttcttgaatagattttcctttgcattgaggggattcctagtaattctcacaagctaaaatgacctaaagaggggaaggaaaaaccccagaactgtacacacaaccagctgtgagggtgcccccatcccccacaaagatctacaagcaaagtaactcaaaagttcaaaaaaaaaaaggaaaaaaaaatcatcttcactcatttccgttcgctttgctgtacttcgtctcaaatgaaggcggaaccaagtatttcaaatacttaagaaaaatgcaacctttgccaattggcttatgttcatcaaattctatacatggagatgagctaaacatcatcagtcttatctccccttgttccttctgataggccttgtatctgggttgtcgctcttatctgtatcggaagtctctgtctgggactcggccaatgttgcattactcttacggtgtctacgagcctgtcaaatccaatcagatcatgttaagagtgttttgaaaagcatgtctaggacaacccaacatagaaaaatgactatatatcagttgatactctttcaaattgtttaagaaacaaacctctcgcggtatgggatattcctctgattcaagcattcgaacaacttgacccattttaggccttctgtcagcatcaggatctaaacacctcaaagcagtcaaaagggctcttttaaggtcacttgttgatggtctattatcgattttaggatccaccacctcttccgaacgcctatttgcaaccatcatcttcagccagtccactagattcacctacaagaagaaccatcctagcagatgttatattaaagaagaagtgaatgtagaacttaacttactatctatagaaaaacatttatgcatacctcttgtgatggtcgaccataatcaacggggtctcttccagtaattgcctctaagagcacaacaccgaaactataaacatcactcttctcatttaaaaggccagaattggcatactctggagccacatacctgaaagttaattaaaataacaaaataaaaatgaagttctttccattcatcatgtttgaagtcaatcctaatcttaatttagaactcttaaaagaagaatgactaacccaaaggtacccatgaccctagttgtaatgtgactctttccagcacccagcaatttggccaaaccgaaatctgatatcttagcattgaactcgtcgtcgatcaagatattgctagacttgatgtctcggtgaaccactttcggttcaatggcttcatgcagataagcaagcctgcaatatggaaatgtaaagccaaaatgagatgatataatcaaggaaaagccactcaaagcaaggtgtgtagaaagacatacgccttagcagtgcctaggagaactttcattcgtgcctcccaagtaagatatccatgatggctcatagctccatggagccattgctccaagttgccattgtttacatactcatataccagcatcctgaaatttaatgtcaagttataggctaccaaaaattgatgacaaacatataaaatcacaatgcaatgtacttcttccctgatgacccttaatcctagctgttaaccgttagtgtcttaagctacagttagttagcagcttgtaaaggtcttagattcattaaccaacttgtacaggatacaatacattcttactcaatacagttttctcttctctctgtttattgtttatgcttcttggactcggattgaagctgtgaattgaataaagcttagggagaattcttaacagtattaaatcatactcctaaaattttatgtcaaaatttagtcaataccaattagaactaacaagaatacacatcaatgttcaaccaacaagagaactccaatcaatacaaaaagaagagagaaaggttattagtacctgtgagtgccttcaatacaatatcccaaaagtcgaaccaagttcctgtgccgaaacatgccctatacgcctcaactttccactctgaattccttctcagcttgcctctaaaagatgattaaaaaacagcattgcaaaagcttacaagttataagcattacacatacaaaaatggggtgtagggaaaaatgtagtagtagagctacttattatacaagattacaacttacagattgttgagcagcttcttgacagccacaggagtcccgttaatcaaattaccgcgataaacaacaccatagccaccctcaccaatgacattttcagttgaaaaccaacctgttgcaacttctaagtccctcagtgtaaaccaatgaccccaaccaaggtgagaaaactcaggcaaaccagagagtggtgaaggagcactaacaggatttggtgaaggtttgtgaacagaaaccatcctgataccaccttgttcacaagattgagagcccataataacttccttctctatgtttgtaaatgagccagattggctactattgtctcccatctttgaatggatcaaaactttctccaactccttatcactaaatttatcatcaaaagtggcattgtgatggatgtttgcaccaacttgatcaactctaatctctttgatttccctagagagattaggaatttgggtaaagggaattgagctcttggcccttcttgatcttttccttgaagaaagacagaatgatagcactacaagaatcagaattataaacaacccaacaataatggcagttagttcccaaacccttaagcccaaaacagaagttttccgggataatccttgattgagacctgatgccattttctgggtgccaaaagttctttgctgcataatcaaaaaaaaaaaaaaaa

SEQ ID NO: 296723 - DNA, 3022 bp, Cannabis indica
ttgggtttaagcggaattcataaattttttatttttcggaagaaagataaaaagagaagatgatatcttcaggaataaacctggtgatgacggtcataggattcgccgtgagcatcttgttcatcgtcttcgtttgcaccaggcttatctgtgctcggattcatctcaatgcttctaggcgttccttccccattgcttccagatctgatctcagtattgtaagcttcatttccccccttttccctctgttttcttccctctattttcttggattttctcgtttattctgtgtttatattattgttgattgaggtgtatttgttttttttttttttccgcttgagctttattaaggaaaattatcatctgggtatttctcataattggtctgattatgtggttgtgattagtcttactatcgctttttttcttgttaagtttttcttcacatatgacttttttaaccctaatgaatgtatatctatgttaaatttgctttgagacttttgaatactgacttccattgcatttatactgttatttagatatcacaatttttatcattagtggatttttcgccatcttgacaaattttcttaggtgtttttttttattttttaattatgaatttatgaatctttgtctatgttgacttagtgtactcagctcaagatattgacgtatttctatgtgtctgttttctttactgtggtcaaattttctcccttagtaccagtagtcaatcctacttttgttattgtcatcataattggctatgtatttttcctgtaattctttttctctcattacaaaacacttatgggtgatgaatctgctatatgtctgtgaacaagtatggcctagtttcacgataataattcgtatgattgactgttagttcgttttatagcgtcatatatagtcttcagcaggatcctcccagtggaccatgtacttatgctgttttgttttttcattggtacagctggaacggggtttacatggccttgaacctgtagtgatagctagctttcccacaaagaagttcagtgatgcatttttctcatcttcagaagacgctcagtatgtttctttcattattaccattcttctcgcttttcgatttctcctacttttgtgatgaaaatttgattatgttaaggtgattggttatgtgcaagaatttgcatggtctgtctatcggaataagtaaaacttatttagtagtctttgtgtcataggcatggattacatatcaggggaatacattcttcttcctacaggtcccgtattatttgacatcttttggaatccttaattattaaaatattagggtgtctccagagtagtgaatcctgattcagatagatcacaattgtctgttgttctcataaaactaaagtatgagcacactaaaagagggaaaggcaaaatgagatggtgaggatgcacctaacctaacatgtattgtgagcatattggagtctaaaatataagtagatccagttttagaactacagcgttaaaaaaattaatccggtttaaaaatagtttgggccccaatgcagttgtcatcggttctgattgctgtaatagataaggacaccaatcatggaatggagttgtattatcaatgtatcaacagtgtattttcataattgaagtcttttaatatttattcctgaaaatattgaagttagtatagtatggcatcaatcatgtagttgcttgctgtactgtaatgctgtgtaccaacagtgtatcatattattatgtagtttttgttttttttcctgccaaacttatccgactttgtcacctaaagtgcttattcccataataattgtattgtaatttagtgcattaaatttttatgaggtgtgcaccgcagtcaactagaattagtacagaaggttatcttagtttatatgaaaaacttcattatttaattatattattagagtatcagttttgttgagaggcatattaatgcttagatcaacaacttagtgatcgaacccgttcttctgttctaaaatgtcccaagctaagctgctattcttctattattgtgttgcgtgtgcatccgcactcatgttattttttttccggcaaaggtttagtggcatttgtttgtaggaactaagtagttggatgtttagaattgtgctaatcacgctatatggggcgtaggcatatttatgcccagtaattcttcctagaaacttctgctgcaattaatttggaaatctcttaggtgttcgaggtgtgttgtgttccttacgaccatgaaacctgcagcttctaatgctggacatgtactatgtttctatcaaaacaggaatcaccatttctcataaaggaagtttgttctatcttggggccttacacgcaattcaatataattttttcaagaaagctagccatgcttatttttcctttgttcatataatatatattcagttatttaaatgattttggtattggtctgttgttctagcatctgatgttctgtctgttattcactgtctcaacgtgttattcttaatttttctaatggtaaaatggttttactgactaagagtaatcgtttagtattaaacatgctgcttaattcttcgaacttaacctttaaatacttattaatatattggtagagaaaattgtactgttgattttttttttcttttctgttcttattttctttgttcttcttcttcacagtaataaggaaatgaggaccatagaagcaaaacatcatccgaattgtttgttttcttttgagagactaaaaatgacctttggatttccacctaaatggctatgttctttttcatgtggcaggtgcactgcttgccttgaggagtaccgtgacgaagatgtattgcggatccttccttactgcggacactccttccatgtaacctgcatagacatatggctgcagcagcactcgacatgtcctatttgtcgaacatcgctgcgtgagtgtcctgatagaaaacgattgatgcagccgttg

SEQ ID NO: 296724 - DNA, 2086 bp, Cannabis indica
caatttaccttcacttggtctaatatataaagagagtgctctaatatataatggggagtgtctactggtctaactatgaaatgctttccattgacgaaaatccatttccattttcaacggaatacctctactcttctgatgatcttcataatttattcgggtatgtactgttattattattgttactgtgcttaaaataaataaataattaattttatactgattagcttgaaactttttggttgaacatatgatgtttaaaaaattaatcgtaaatatttgttgtttttaacattatttcagtggatcagattcatacttttatagtagttgggaatataattatcggcaacaagatgatcattatcaatatttacaagatcaaagctatctttatgatcccattcctttaatggaatattatcccacaacagtagtcggatttgatcccatccaaggtgatggcaaaactttctaccattaatatacacaaagatcttttcttaaataataataaatatttttactcattttttgtggttgtcactcgttgcagatgagtttttatataacgataataatggaattattgggttcggagtatgggatgagtttgggcttcttgggtatgatcaacccaatattactactagtgatcatcatcgggttggtgagaagccattatcattaatgtgcaatgataatattgatcgtcgtgaaagtaactatggagataatcatgatggaaaaggaaaggacataataataaaggaagagaggaaggtgaataataagaggccgtatagatcatcatcagtattggtaatatcagaagagaagagcagttcaaaaaggttatctaaggaagtattgtcaaagtattattacatgcctataacccaagcagctaaagagcttaacgtaggattgactcttctcaagaaaaggtgtagagaattgggtattagacgttggcctcatagaaagcttatgagcctccaaaccctcataaaaaatgttcaggtaccatgcccccatatgtataaatattcccatgctgccatgcatatatatatatatatatgtttattttcagttcattattaataattatataattatgatatatgaagttcaagattttatgactaatgatgcatgataaattaggatttgaggaatggagaaagtaataatgaagaaaacgaattcaaggtataaaaagtaacatagagttgttggagagagagaagaagttagtggaggaagttcccgatgttgagcttaatgaaggcacaaagaggctaagacaagcttgtttcaaaaacaactataaaaagaagaaagaatgattacgacgaccacgacgacgatggattattgtagtactactgatttggaggaagaagaagatgacgaaatcaagtttcctttgtctgactcattttcttccagtagcatgtactgatttccacttctagttctagcttcactacagggatggttatgaagttatatatatatatatatataaatatgtgtgtgtgtttgtgcatgtttttttctctttcattttctttttttcctttgtgctatagaattctgatttaggatatcacgtggcattaattttggatgaatatgaatggatgtcgctttgaagtcattttcgtaagtgttgtagtccttttgcttagccggcggcactagttgtgtaaaaggtttttattgggaatgtaatgtgaatctgtttatggtgtgtatagctgaactttaagtaaattattgctacaactctctttcaattattttaagctataaatattaagataaatagtggtataagtaacaaaattttaagtttgtaataactagcataggtatctaatatttgtaaaatgagaaatgttaaaaagcatgagtggtgctaaacaccttcttatgtgtcaatatcgctattggtctaattaagtatgtggtctcatatagtttaatataataccttttagggagtatcgctagccaatcacaagacgtctcgtcttaactaagggtgttaggcacactggtgcccaatagcaatgct

SEQ ID NO: 296725 - DNA, 2581 bp, Cannabis indica
caaatgtacgctggtaaaacttggccagcgtggtttgcaaaatgcgctggtaaaagttacttttaccagcgaagtagcgaactgtgctggtaaaagtgatatttcttgtagtgtgcgtgattatgtatagggtgaatatctatttattatgatgatgaagttgttggctatgaattgctatgattttctcgtattgcataatgtatgtgtttgtatctacttacttttcttattgagtctttgtgactcacaggtgcttagtagtgcagataaggggaaaataaattgtggttcaaccatgagtcagaggtcctccatcgatatacatatcaaccgcggtgcctcagttttcagtggacagggtccacccttttaattgtattttgaaaacgtaatcttatgttgtaatactttcagaataaaatgtaaaagttttatacaggagatccccgtacttaatttataaaagttatgtttttatttaaattacacttttttaaaactaatagattagattaagcaaagttaattatgagtattgccaaaaaaaaaaatggtgatttttcaccaaccgattgtgaatttcttttattgccacatttggtagtttagtacagctttgttcatcaaccaaaaagtgaatatgacaacctaaagcgacctcatttcataacttttaattttaaatatatagcccaaaaagaaaaaccttaaagattatcttcacaacattaccttattttacaaccaaaaaataaaataaaacaagtattataatatatagtgaactcccaatatatgttaacaccttgcatctattatacacaaaaacaaactaatagatttaaatacataaagacataaaaacaaaggctaattagtcgtagaaagaaaaaaacttaagtatttaactaaatagaaaaatattaaacaagggaaagtacttaaaaacaaatacctttactcagctttgctccaatttctttaattcatattattccttcaaatacttttgagaagaagcaaaaacatatatgtttttggcgaataattagaaaagaaaaagtatactaataataatttaaagaaaaacaaaatataataaatcaattgaaaaaacaaaagaaatgtataaatcaatggtcaattttcacatcaagggaggtggcgtgtacgtacgaacgtggatggcgatagtatggggtcgataaattcggaaagttgagagggacgtagcaattcaggacaaaaacccacgagactcactcacactaatattatattttatttttctatttatttatttatttacgctatgatatttattatctatgtttataagcaaagagaaaaatgaaagataggttataatattttggcgtgtgcatatggggacaggtttaatttacccactactacaatcaatcacacagtcaatttctttgacttcttaacttaagcatctttaatgggggacctacatgtttatgtcactttgattggtttttgtggaccactcttctgtttacacctaagcttcctcactttttattaattattattattttttttttttttggtatatatatatgccctcccccctttgtatatatatgacatacaaagccacgtacaatatgtgtatttattctttgtttggatatacatataacaatttcttttgactttttctcgtagtttctaggagtgtttaaaaaaatagccgatccaatttaatctgcataattaaatctaattcaatccgtaaagtacagatatttgcacttgtgcggattgaattggattagaaaattcaaaatccgcacttgtgcggattggatgttgattgacatgtaaaagtaaccgatccaatccaatcgacacatatttataaaaaaattaaaaaattatacatacaaataatattttaatgtaaagaaaataataatttaaaagtctaatacatataatacaatcatattgcaaaacttaatagataaaatgtatattctattcttatatattttttttaacttacaatttaaaataaaattaaatattttttttacatatacaagtttttttcttcctttgaatttgttatttgttattttatttatgtaatgtgttgttggagacataaaataactataatttattttattttgttgctagttatgtgaaaaaaaaataatttttcaaaaataataaataatttaatattaaaaagtaaccaatccaaagtaaccgatccaatccgtacttttgtaagattggattggattgaatttgtagctattgtgcagattggattggattaaaaaaatgaaatccgcatttaatgcggattaaatgttgtttgaccaaaaaaaaaactgattagatcggatgaaacgttaggagtttccatccaaactttcacaattaacactgtttctagtcttaattagattcagttataatatatggaaaatgtacggccacttatatgtttttatttagtaaataaactaagcatttagtaatttacaaacaaggtctatcatgtttcaaaaaaaaaaaaaagaaaaaaaggtctatc

SEQ ID NO: 296726 - DNA, 1439 bp, Cannabis indica
attagctatagcctataggagcatgaatgtgagctttttgtttaccttcaatgtctggtcttgaatgttcgagtcaggctagcttagttattttatttctatggccatcctggtatagaaacaatacctgtcaacatacttatgttagtgatattacggaaaataatgtaatttaaacatatgaaagaatcaaactcagagagagtcaaggtgaaaagtggattattactttttgcttgagaaaggaaatgaactttatattgcataaatttgatattgttcatctgttctgtattacttgtttcctattttaataaatcgatgcttactgttactcttgatggtgcatcattttaggtaccccttacacccaacaatcctacaaagtaagtgaatcttttccatacaagtggataaataagaagtggaaagaaggtttccatgtcacatccatgacaaccgctggcaaccgatggggtttggtcatgtccaggaatgctggatattctgatcaggtaaagactagttataatcagctccctaaattgctagaaatattatttagaagttccaacatttttcccggttgttctaattgatttcgaactactaggttgtggagctcgactttctgtacccaagtgaaggtatacacagacgatgggaaaatggttacagaataacatcaatggctgccactgctgatcaagcagccttcattttgagcataccgaaacgtaaattaatggatgaaactcaagaaactctgcgtacctctgctttccctagcagccatgtcaaggtaaggaaaactttcaaactctggtaaattaacgaaacatcaatcgccttatcgtgtacctcaaaatattttctttgtgcaggaaaaatgggcgaaaaatctctacattgcatcgatttgttacggacgaacggtttgctagtcgttgtcgatcgaagaatgtaacattaagatttatagccagccaaattttgagagctattatttgggatggaagaaaaggcgaaataccacacacttgttatgaaaatataccaatgtaaaaatgaacaagagagtgggaattggcattgaaatttgaatatggagagaaagaaagagagagagagagcctttgaaccaaagctgagtttcagtcagtgacttggaaatttcaaccaaattgtgctttttaacttattattacccaaaaaaaaatgttctttttattttgttccatccaaaaaaaagaacccgttttaatcaaaaaagttatatcattccttagatttgaaaagggaaacattaaaaaatgtacccgagtgaaactattgagaaatattaaaaataatatgtgaattaatattattatgttatggtaagtgaaactgaaaatggtgcatgtggtaaaatgtatttatttttgttgagatttttt

SEQ ID NO: 296727 - DNA, 3796 bp, Cannabis indica
aaaaagatggcatacatcattcttcaaagttctgatgaaacagtcaagtgtgcttttgtaagaaggatctcccatcattctcgacttaacctgaaaagagtacagaataattaattgataaaaactaatttagtgtacaaacctattgaaacaagaatgtaactaatatgtacaaacaagtggaccgtaggcatgtgggactattattatggattgagatcaagcatttgcgtagtatatctttgcctgactggatcctaaaggatcgtcacagtcatgtatgtttttcactataataatgtggagattagtttataattgtacagactagagctaattttttgttgaaaaaaagaaagaggccacttgtcttaaacttcccgcccccgcccccgatatgtattgataacctcacttatggcggaaaaacaaaacattttagtacaaattaggagaaagaaaaaacgcagaaaaacacaaaaataaacatcaattcttaatacatcaatgaactccactccctacagactagagagctaatgaaaaggaatgtgataagacccgagttttaggacaggtcataaatttaggaaaatcttactcgtgtaagatggattaacatagtgtcattcttctcattctccataaaaattggccccatatgttttcaaaattattttgacagctctttgcaatgctaagcttcaaagcattctcatgtcaaggtattatggaaagttaagtttccatgatgcaacaatacgttacaaattaactaccattaaacactaaatacgagtacgatttttgaattgttgagatatgttaccacatcaacaggtgagccaatacagacagcaaagaaacctgccccaagaccagcaaaaagatgtgtaacaacattatcggtaaaccctggtagtttcaaaatcgactgcattgaaaaaatatgattcagaaacaacacaaacatttatactaaaagagaaatatatgtacgtatacagcacaaaaggtacctgcttcacttgatcatagctggctagctcagcagcatttataatagcatttcttgctacattgggtccaattccagtccacagagccccaaagccttcctaagaatcagaaacaattagacaaaagaaaagaagtcagaataaaaaataagtttatatggagccaaactgcatctttgtgaatgaggctcatataggcaacctgtctgacaatggtggaataagcattcattgctccagaatagcgtctcggcaccccagggggaagctttccttctgattgaagtctaacttttacaagatcagtcggatttgcaactgtaatggctagagcacctattttgtagacaaacatgaaaaaaaaattatgagagagttcaatgtgatgtgtgcttgtatatattactttctcaacgaaggtaaaatgcagttaaaaagttcagtgtctgtagataatttattttacaagcaatgaaatctgctcaccagttgttaatgcagcaagtattttctttgttaaaggaacatctccaacaaagtcttgtcctacatataaggtcttaacctatctagcccacagtccattggatggaatcagatatcagcaagcatgtgaataaatctttataaaactgtgaagaaaacatctaaaaaagacctacaggttcatataatccaactcttaagcctccaaatagacactgacgatgcaacccaggtacaattcctttccatagtgctaatagaccttcttccctggcaatggtgccaactgttcccagcaaaccactgtactttggcaagggcattccctcaacggctttcttttggagttgaagcctaactttagcagtgtccaagggaatactaacaatctgcatcaagttcaaatatagattgatacctagaaagattataatctcttacagttttccagcaatgaactaggctaacattataaaaagatcataagtttttagtttaaaactacaataacagcaaagagtaattaacaattagatcaaaatacaaaaaaagctgactttcaaggcctttttccatcaaactgaaaagaattgagtgcaacaattcatttactcatcaaaattccaattaaataactttaatttgtaagaattgagaaaaggcattaacacagattatatcacaacatctaattcccataccatgcttcaatcaattcacacagacactggaatattaaaaagaaagtcgttgacttagaaaataggaagtagaaatcgaaagaaaagtaatttgaggaaaggaagagaatgcaaacgcaaattagattgagatgttgaaagtttaatgagaggttgattacctcggccgtacaagcggcgaaggcactgctagcaaaggttccagcgaaagatatgttggatttggggccgttatcagccaccatttttgagcttgagagaatgagcttattgaactcacaataaggatcaaacaaacagattaagaagcagtgagaaagagatgattagggcatttatgttaaggcaagttgagtttcgagtcactcgattctcgggaatcggaccccccgaaatcgcaggttgcgacaattgtcaccttttatttatttatttttagttaaaaaaaattatacattgtctatactatgaatatgatcaaacatgacagttatgctgcaaaaagaaaaaaaaaacaatgacagttattttttgtctttacattttagggggcaaactttgccattttagtaagaaatttttcttatttattactaggaaacaaatgaacttgtgggcttgtattttatttagagtaaatagttatataagtatttaaaattttatatttgtaagcgttataaactcaatgtttattttttagcggcatactaatatttgtaaaattgtaatttttttttaattttatcagtacaaactctgttattgtcttaaacagggcacatataagttaaactcttgatcattgggtctagatagaaatacgtagtatcagttacttccaaatattcttttaataaattcaaaacagagtctgtactgacgaaactagaagaaaattacagttttataaacattaggtacttatgccactaaaaataagagtttatgccacttataaacataaaactttaagtacttatatcgctatttatcattttatttaaagataaaagaaaaagttagtgctattattaatgaagtgaatctattacagcaacaatatgaagcatcgtctattaaatcataaaaacttcgtatacatgatgatctagagtttaaagtattagaaaccaatagtgaattagattcaactagtgtgatcgttaacgcctggttgagcaaccatcttaatgcagcagaaaagtatcacaacttctatttatttcggtacaaacctttcttgtattgatttggacaaggcaacctttatatgtccatcactatctctaacaatggcaccaattctaattgtactcgtcttttcaagaacgcagcatcaacattcaatttataacatctcctcgaaagagctttctaatgatgcttgattgtaggggtgttcataaaataaccgatctaatccaatccaatccgcacttatgcggattggatgttgattgacatataaaagtaaccgatccaatccaatccacacatatttataacaaaactaaaaaattatacatacaaataacattttaatgtaaagaaaatagtactttaaaagtctaatacatataatacaaa

SEQ ID NO: 296728 - DNA, 1439 bp, Cannabis indica
aataatatcatggagggcatgaatgtgaacaaaaattgctccaggtgatgttgactatggatgaggaagaaccagaggttcaaattgagtccccacctcctaatccaaattcgccaagaatggtggccacggaagaaacgcttgtaacgttgtcgttaaattcattggtgggcatttcttcagcttgtacaatgaagttggcgggtgacattgggaaacaacttgtcactgttctcatcgatagtggggcaactcataatttcatctccttggacattgttgcagccactagtgcccctagcacaaccaccacttgttatgggatttatttgggtactggcggtaaggttcgaacggagggaatttgtgcgcaagtggagttagatttgggagctttgagaatagtgaatgatttctttcccttagaatttgggggtcgggttgggtgatgaaatattgcaaatcaagtggttggagactttgggtaatatgcaggtgaaccggaagtcgatggtgataaggttcgatatggggggtagatggctgactttacaaggggatcctagcctatgtaaatctccaatctcactcaaagctatgatttattcagtggagcatgagggagagggattttgggttcacttgggagttatggagtcaaccaaagatgaccgggagcagccagcaatggcgctagcagtagccgctttaatacagtgatacgagctagatttttcgactccaacaggcttgctgcctagtaaagctagagagcattccatcatcttacgacagggagcatgacccatcttggtaaggccctatcgctatgctcaagtgcaaaaagatgcggttgaacaatttgttcggggcatggtacaaacagggatcgttcaacctagcacaagtccattttctagtcctgttttactagtgaagaaaaatggaatttggaaattttgtgtggactatcatgctttgaattgtgaaacaatggctgctatatttccaatacctgtgatcgataaagtcctcgacgaattacatggggcaaaagtgttttccaagttagatttgaagtttgggtaccatcagattcaggtggttgctcgtgatgttgagaagacgacgtttcgtactcatgatggacattatgagtttcttgtcatgccttttggccttactaatgctcctgcaacatttcaagccgtcatgaatgatatgcttcgggactttttgcgaaaatttgttttggtgttctttgatgacatacttgtttacagccagtctttggaggagcacttgcgtgatttcgagttggttttagctcggttacaacaccatcaactctatgcttatgttagaatattagctgtatattaggtgtaaaaagaattagggtaacttgtatttagtagtttcctattttgttggtagtt

SEQ ID NO: 296729 - DNA, 3868 bp, Cannabis indica
taaatatataataagaaatgttttacaatcagataaactagtaaataaatgtccttttgttttataatttagtttaacttttatagcttttccaagagtaaatttctcgatatattatcgaacaaaattagtacctaatatttatttagtacactgtaatttaaaatcacacatatttagtgttatcaacgcaattttttaaagaaaatattattttaaattctgtgttttgtaaaatttattgattggacattctgttgtattaaatgactatttaaatcctgtgttttttaaaatggtacaaataaactcgagcttaatttttatctaattaaaacttaataataatatgacatgaaggtgttattaccagattagttacatttttttgcatctgttcatgttaaatattggcttcaagttggttatattgaaaaaataaattgtcaaaaattgaattgacgatctattttgtacaattttgaaaaatacaagtttaaattatcatttaacgaaacagaaggtcaaatcgataatttacaaaatacgagatctaaaatagtgtttactcatttattaatataattaaattgtcttctattataataattttaagttttaatttaattatttaattatatatatttgagagcatatttataaaatttggacttatataggatactaaagtatgtaaaatgtcaaactaaatatgaatattataataaatatagagtactaaatttgtattcaaataaaggaatgaacactaaatagatatttaatattttttttaaaatcagaacatcatagataaaacaatgactctaaaatctcatgttgttgaagccttagttgtgaaatagaataacaaatgatacttctctattattttgaaataagattttcttagagtgtataatgccatcaaccataatattcatgaaaaatctacttttgggggtaatccttcaagacattggggtccttggaagaattttgtccacatttcatttcagcactgtcattgcttggttaattctttaacgcattctcttgctaaatttgcactctttcttgatagtgttaaattttggtggcctgatcttgtttatagtcttaatttgatgtaatttttgtgtaaaatgaagaaggagcgaaagatatttaatatttttttaatttaagaaaatagtaataataaaaaaaaaaaccaaatttatgagtaacacattttaattcttggacaaatttttgtaaaaatattattataagatatcttaaagcacagtacgagataaaaccatatattttaattttaacgagatactattttattagttgtttaatataattattttaaatataactacacaaaatatttgtaatgaatatctccttcaaggttataattatgcaaagtatagaccattaatacttgtgaataatttaactcctcagcgtttcaagagtatgtatatctaatggataaaggcataaatttttttttttcaacaaattaaaaaaattaaaaagagagtagtacatcatgaaaaaaagataaaaaaactatctaaactagttcattatctaccatgagtgcatgcaatgttaattcatgaaaacgaacataaattagggacatctcaaaaaaattggtaagtaaactagtaaaaaagaaaacacacaattgttttaatttgaaaggggcccaatttaaaattttggctcaaacctcccaaatgtttcggctagcatgtacttattatttgggaaagtgaatgattgtaatgtgttgagactaactatgaaagattgttatctgttttggcgattggttggcactactaaaatggagaatgtgactggatataggatcaaaatttgatcagaaccagtgtgaatagcgtgactttcttttagttttacattttactggtttttagtttttttatttctgctgtgctgtttgtggtgtccttttgtttgaaaatttcaacacttacaacaacttggaatagcaatcaggatcagcctatcaccagaaaaacaaaataaataaataaaggattatcactattataatttttcttctcatttgagtgctaattaataattataactcgcacgaaaattggaggtgtacgtacccaaatgaagatatggctagaatttcaaccaaatactatagtacaatttgcaaatatatgaacataaatatgtagtgagtcacttcccctagcatgaactgttcccactaaattttgtgcaagttcaacaaacaaattgattttgttgatggagctaaacaaagagtttgtgactttttggtcaatcattcagagaatgatttccagcctttttgggttgaatattgcggctgaaaatggaaacgcatatcaccaaaaaaaacccatttcatttgtacacatcaagtaacaaaatttttaaagttggcctttcctcagaaaatcttggtagctgaacaagagagttgactctcgttacaccttccaagcctaaccagttttgatcttcagttacagcagcttcactattcccttcaagctcagttgggagtcttccataattgtcactttcttctgatgatcttactgtgaagttcctttgcagcgatggctctgacttttggccatcgtctgattcaaccgcattacccgaatggttactttgaagggttgctgaagaataacactgatcttcatagtctgattcagagtccattttcccatctagaaatacacatactactgcacagtcatccatcttcgaagttggatatttgagtttccattcacgagcagctgagttaaccaaaattcttgcagctgaagaccgagttggagctgtggagactatctcaaccacctcctcgttgctcaagacatcccagacctgtaaaaaaagctaaaaaacttttagaaactactgactatattacaagctttcaaatgtctgattttaagggagatgatagtatgcatgcatctattgatcttgcacatgcaaacatcctacatgttctactcatgtgtacatttcattctaatttccaaatcaacaatatgatggaatctaaaatcacatgcaacgagagtgagatggccttattaaataaacactgtgcttggccccaccaaaatcagattatcagaacaacaattatgtggtgttctgtgtaagcatgttaggaatggcctacatacaactatgttgggtcattaaaagttagtactgcaatatagtttataaactcgatttgattaacagtaaacaaaaatgtgtgaggggacaaaatgagcagtattagttgttttagatgcaagtttaccccatcagaagcaataactatgaactgatctttctctgtaagagttcgatgcgagaattcaggaatcgaaattactccatactctttcaaacagaaatcgccaaaggctcgagccattgctaggccaggtgcatcatcaaatggcaaccatactctgggaacttcaggttcatcttgcaaagcaaagacccttcctttgcatcgtttaatcctttcggcttcccctataaaattttaacaccaaatcaacaacactgtacataaatgagctgaaattcaaaacactaatgaaatcctattcttgtcttatcttactcggcagatcaggctttaaatcaacagtcaactggactgcaaccatggaatcactgctgtccttggatcccataattgcccgagagtcccctatataccccatgaaaagatttgacccctggaaagggacaagaattaaaaacaacgtttagttaacaaaaaagtaaacaaatatcttccctactgctatacctgtttgac

SEQ ID NO: 296730 - DNA, 7367 bp, Cannabis indica
gtgaggacccaatggaggcttgaagcggggacgttacaactgctattctcatgggtggtaatagtggcatgttgagcagccatggcaggcatgtcgcaaaggacaccaaatagggtctcaccacagtgggtcgggacattaggattcagactagaagaattgaattgagcaactgaagagataaggccctgctccattcccagaggactaacatcagtcatgctgccaagagaagcaaagacagaggatccagccccctgttcttcagtagaaagaaactgactcactgcagcaacaagagattgatccacattagtattagggaaagtgagttcatcaaggggaaaagagttggagagatcaaatgggttccttttaaagtttgacttggcaagggccttcagagggattttataaggcaaaggaggaggaaaagggtggtcatcatagtaagtgtatgatcaaacatcccatagtgaaaacagatgtttgggagattctcatacttaaagttgagccatttttcacgatggatacttttgaaatcaacgagaatacccttggtaatgggcttggaaatgttaataaggatcctgaccctaaggaagaggccaaaaactttaaagaggctgatcttatcaacctcaagaaaatccccaatcattttggccagtttaagggatttctaaccaaatgggatgaaatggacttgaatcaaaaagggtgaatagcaaagttggttaggtaaaaaggtatcaagcccagtaggattagcacaagtaaccaggcaatgatcaaaattccatggttgaccctcaaggacccttctcatgtccccttcacattcaaactcaaccataaacatagtcgacccataagcagagaaggttagaggcgcgcgggtacttgactggaatggatcaaggggttagaacacgaaacacaagacagaaagacttagtaggttggttactccccccccccccccccaaaagaaaaaaaaaatcctccttaagatcatgaacaatcgcttctttgtcagtgaggttcaagatttcaaacatgttaagagctaaagaatccatgacaatgaacaaagggaaataggaactcagagaaataacagagaaatttaaagtcaacaggctgaagagtaacgaacgccttaagacccaaatccttaaatagagaaagagagatatgtacctagagatggataacttactgaggaaggatgagaagagatgctgtaaccgtcttttcaatatccctaagcagactccatagctggtagaggtaatgattgcctccgtccttggatagctcaaaacgacgacatccattatggtggaacaagagaaaaaaacggaaaaaaaataaaaagacaagaaaaatcccctgaaaagaatatgcgaatgatacagtaagatctgaagcaataaatggggaatagtaataaatgaaacacagagaaaggaaaagtcaaataagagtgcaattaatgcagaaagagaaagagaggagagaaaagcaatcgtcgaaactaagggcaagaaaacaaaacaagaaaccaatctaataacacaaacgacaccacaaaggtgagagtacaggattagatccaaaagatttgagcaaaataggcgaatcaggaagaaaaccagaaaaactcaggatgtaactcgctagaaggttctagagctaattggatggctcagcacttctaaaaaatttatgatagaatgcttgtgcatggcagaatgatagtattaccactttaaaattactctccaccatcataaaagagttgtcattagctaaaatagtcactaaggcaaacttacaagttgtcgcttctccaagaaaagggtctataaacataaatttcttagtagtcacctaaataatatttgtataatgattcctagttactctcaaaatcatcttggagttcaaaccaactgccacattatagttgatctttgtctaatctatcgaaaggggagccaagcatccttagacaaattattgagttgatttaaacttgaaaagacgcatattctacaaatgaattggttgtgttctactagtattacttttattttttaaaatggtaaattgcggtataagaactaaaagttttgaatttgtatacgacataaacctaataatttttttagcaacataagtacccaatatttgtaaaattatattttttttctagtttctttagtacagactaagagtgttcatcaaactgctcacaccgcataaaccacccgaaccacaccacatcgcacaaaaaatacaatttgaaatcctttgtgctacggttgcagtttgcatttttaccaaatcgtgtggtgcgatgcagtttgtaattttgaatttaataatcacgattcaaactgcaccgcattatatattagaaaaatactaatttttacattatgatttctcttttcatatatgagcaactcatatgcttgcaaagtccaagccatacaacaaaatttaagaaacatccatataaattattcttattttttattttctaacttcttattgttaacgcagatttttgttaaccaataaatgagtctttatgtaataaataaactctaagatattaatgaacaataataataacaattatataaatggcaatataaagtttttaacgtggttttgaagttaattcttcatactccacgagtctatcttatttctaagattttatgaagtgtatacaatatacaaaatacaagatataatttataaattatactctatctttctgaaattggttgtcccccattacttaggttttgtcctcatttataagagtttagggtgacatttatttctttgggatcttatccatgtaacagactataaaacgtggacaatccccacattatatatttacaccacatgggataataataaataactgctaaaactgctctttgtctttatctataaacggttatactgagtgtacttcttcatctcgtaacacgaatgatcctcttaggatgcgtcattccgaaggtaacatttttggcatctaagtataatctgggacatacttctcgcgtccttaggtagtgtcgaaagaggtaaatgcaaggcactatcatagtgtgacaacaggatgaaatatactgggtgtatttcccttagtgtttcaacatactcacaagtatgtgggttaatgagctgcaagctcttagagaattcattatctaccctttccaacatgttgttgttctattatgtactccgtgtattctgagacggaccttttatgctgatttgttcatcttgctagtctcacaaagtggtagctattattcatagctcacccttatctttggaaggatgagttcaaatatttttaccaattgtattatccgaggcaagtttattgaatgcatttatttctccataacacaagtcgatttaacttctaaccttttaatacatgtcgtcaccatattacttgcttgagatatgggtataacaattgcctcataaaaagtactttttagacttaaaataattttttaattaacagagggtacgatcgtatttttcctttttaaagaatatgcatgcttcattttagtagttcagttctttgaggaaaacatcatttcaatatttattaatctgactcttcttttcccaatagttctcatccattcgatcagtcatatcattacgatcgaacaatttccattgtttggatataaagtcagcattttccccgaattttgcccttaccattttttagagctttgaaggaactcaaattccatcacttagttttatctaaaattgcatgccctatttatctctcacatacttctttcgagtttctgccagtttttctcttcaacctcaatattgttgcaaaccagaccctcgacatcaaaagttctcgatgaggaattcttcgagactttcttccttccaacaaaccattaagtttattttcttcattgttcttttgactattcattcttttcctattttttccatatatttctgtatcgccgatttcttgtatgggattatctttataagggtttttaacaacttagggctagaaatttagggttacacgattcgcaagtcctgaatttttatattttgtatttccaaaattttgagacacattttttttttgtgattaagataatacctcattctgatcaagactacgaaaacccaagccttgtagaagtcgataatctcaaattctaagctattgtttttaaacccaagactcataaacctcagtccataattgagttgaatgacaaaagaattagaaagcactcccttaggtctagtcaagaagagacgccggcttactataggcaatttatagatgaagttattgagagtaaacatcgttatctacgagaagcaacttggcctgaattgcccagtttagtaaaaatttccttagcgagactattatttttatcctgagtcaatattttttttccaccaagtgatcttaattttgatattatggcttctaaagctcaaaagtccaagatgcctcaaaatcccgatgttacctttgaggcaaaacttattgagtctaatatataaggtctatcacatatgtgggacctttcttacaattttgcgggataaaaattgacaacaaatttatagttcattcactggagaagggcaagcatagttgtcatcccccagctcacttgcaaagcggttctgggtgcagtactagtaactcctcatgtattggagcgtggagaattgaacacatcaaggctagagcccttcttccccttcgccaatatttcaaggacttctgcgactatcttggaatttccccttttcaatttattcccaacacatacaggatccttgcttgcttaaagtccttgtaccacatcgtgggctgggtaagcccatcccctttggttccacttatttttacgttgtcaagtcctatcctgggaggaaaaattgtgtaggccgcttttattatttaggagcacatagtggcgaccataaaatgatagtcaggctaccatacaagaaagaatttaagcaggacttcttttggacaagcggccttcaccaagctggcaccactgccttctgactattacgtaagtcacacattttctttatcattttaattctgacattcttcaagcttgaaactcactggttatttgctatttatcttatttttcaacccatttgaagagacccactctgaccgtagctatcagcatcgtcacgagaagctcgtcattcttccaattggtttgtgagtggctgattttttgttgaaatacaaaaatttaaaggcttgcaaccttctcaaaaaaaatcagagtaccatggacataaaagacagcaggtattcttcttgggaataagtccctgacgaggaccgagattatgtcgctcgtacccactacttaaaaaatataaccactcgggaagtcgtcgaggttgaagaaggggatccccaaggtaacacttcttacttttacgaatggtcttctaccgtccctaggactgagctaattgttttagtgaaatttaaagataattaatacaacctttttatctagaattgtgtcgacttgattacacatatgttcgatagttggtacccaaagttttatgtccagttgactagaaacagttcttattatggaatttcagaccaatatggtttaaatactcatagggatgctaatggggattgggatatgtctctacttaattcttttgacctttctatgatcacaggttctatggagtttagtaattataatagcaattcctccccgcctagcacttttggcaactatttaggtaggagttttgatctcgccacttcatatttatcttcactttatgagttttaaccttttttttgtttctttctagacatggatgacttggaaaatctcctctgcagcctcagtgtctcggttaagcgagataaaaaatgaagtgtctctaaggcaaatacttctgaaaagcaactcaaggttcccaagaataagggaattagtaaaaagaaaacttcctatggcattgttattgaaaagaatattattgccccagctgatcctactcctgcctctgcacttgcgagcacagaaaagcaaaccttggggtctatccaccaagttaccttttctacggcaagccagaagttatgtagttggactccacttgtctgttaccataagatgttgggaatgaaggttccaaggcctgctcatgatatgtgactcaatcgtgtcaccattttaggacttttcaatcagatgactggaacctaatcaataaccgtgcctacaacgacctctaagtaaagagtattgatctcatgcgattggttagtttctcaaattcttacttttatcataccttcccctacttctctttctaacttcatattttatgcaggcttcttttctagcatttatggctcacctgaaaagtcttcaaaatttaaaccacttgagcctgaagcttcgtaaggccaatgaacaccgcgagctactagttactcaatggaataaacacccaaacagagattactcactttaagaagaacattgaagatctggaaaaattacagaaggcactgaaggcagaggttgagaacttgaaacatcaactacttgaatccatccaaaaagccaaaaaaataccttgagcaagaggaggaagttggttctgacgaagaaaatgaggctcaggctaccgaagaataagaagatgacacactctctaagtctcttaccatgcagacttagtttatttaacattatcttttgaacaatagccttctagtcgaaaaatcatttttcccttagtggcatttttatctatgtaagtaatttttttatttttttggatggccaacttaccttttattaagctagttttatgccattttgatatatatatatttttcccctattttatgagaaatttttgtttgagttttgattattttgaatatattatgtagtgttgctcatgaataagcttaatttacataactatatcaaaacatttttcttccttgggttttcgcatcaaatgaagagacttcctcctactccattaggatgactttccccttttcctctgttgggtgtacatccaaagtcccacattggctagaaatgagaaggatcttcgatatataaggatgaacactatctccattgaacatataataaagattatattccattgtgctgacaacactataatctttaaccaacacatatgttctggacttaaaaagaattcatacattatatacatataatcatgaa

SEQ ID NO: 296731 - DNA, 3235 bp, Cannabis indica
ataagcccctacactatttcatagtgtaacaatattacactatatattcaccgactgtaccgtgtacctgcaatagaaaaaagtatatatatataggttatggatttaatcccttaccacttttttttcagaccggtcactcacttaatataatttatttatttagtaaatttacactttcaagaactaattaggtttggaaatataagctttctatgaaaaaaaaagaaaatagcaaagaaagtctagttttgaatccactacacaattttaaaataaagtgaaggaggtacaactcaggcacaatattacaaataaatagagccaaaaataaacataagataagatatgatgtgatgtgatttacaaataacacaaagttacaagtaaatgacacaaacaaataacttagaagaagaaatagagcaacaaagcatgaacaagtatcttgccactttgttcaaatgaaattatttccactcatccctagaactcgttggttagggccactagtttaaaaagagatgaatttaaataccaattctacaagaaaaaccaaacagatcaatcatcatctttcgattcgaatgactcccatagggggcctagatcgacattacctccggaaagtataatacctatgtggctacaatccttgaatgcttggtttttcttgaaaccattggatagaacagcagctagaccaattgctccactaggttcaacagcaactttcagaatctcataacacaatttcatggcttctattatctcattatcttccacagttatcacatcatcaacaaaatcccgcacaatgggcctgtgccaatagaaattgagtatctaagttatctagtagagtattcaagggcataaatatgatcagctgaagaattaagaaaaggagactccataccagacaaatgaaagcaatattgatagcagataacttttaaagtgatattttttaccaagtaaggtctccaaggaaagctcgaagcccatcagcaacagtgttggtctccggtaatgttattatcttaccagcagctttggactgagcagcgtcattagctcctttgggttcagcagctaatattcgaatggctgggttgataaacttggcagccaaagccactcctgatattaaaccaccacctacattttcgtttgacaggccaaagaagactaggatcggcaatcaaatatgctaaaagaaagacgcaaaattcaacttttagagctaaaatgcagcaaacagaccgcttatgggagctataatagtgtcaatttgtggagcttgctccaaaagctccaatgatatggttccctgtccactgtaataaactataaacacatcaagaagccttgacatatgcccacaagaggcccaagccttaactctatacaactacctgaatcaattgatgaaacttaaagagtttaagagcaagtagtacaaaatatgttcatggtttataaaagaagtcatcactgtgaattttaatgttgtcttagttggtcatacagtgtactatcaaacaaggtcgatcaagaaaacactaagcttaagttaataccttatgatacggccatcattgtaaggatgtagaagaactgcgccagtttcttccaacaccttggctgctgtgctctccctagactgcatattgggctcgcacccgataatctgaccaccgtaccgcactacattctcaactttacattttggagcatttttcggtataattatatatgcaggaattcctcgcagttttgcagccaaagccaatgctgcagcatgattaccactatattttggacaaccataacaggtctgataatcgtagaaaacaaagggaaaaaaaagaagaaaaagcaaaagcccatttatcatcacaactttaaatgttatataggacatcaagaataggatcacacatttttcagttacaaaatatgcatgtgaaacacataatgagcacagaacaaacctgctgtgggtgatgacccctttagcagcctgatcatcactgagtgaaaacacagcattgcaggcacctctgaacttaaaagctccactgcatagagatagagaggaaaagtttctatttttcagcttaaaagcaatgactaaaatgcatcaataaggacccaattaccaaacatcacttggaaactgtttctaccatcaaagcccctcaccccttttgataaagttcacatttgaagtaaagcctccttcctgaaagagcatctaaagattcagaggaaaaaacaggagttttgtgtatgaatgagctgatacgagcttgtgcttccttgattgagaaaatatcagcagcatatttttcgtccccattttttctttctacttccatctcaaaacacccaaatgggaaagacaatgtacagaattttcacctccaaaactgcatgaaatatgaaaaaaagaaactcttataactcctatcatagtttcccaatgtgagcttgaacttaatctaaaacatatatgctttaaagggttaagcagcgttaaatgagttgaaaacttaaaataaaccaaaacccattatttattcgttcaaaataagtacatagacaacataatacatcaccaattatcagtatcaaagattatgcgatttgtctctaagttcctactctgagtttcataaaattctcactaggttttcaatattacctgatttcgatgactattatcaaaaggaggaaaagaaacgaaagtatgagcaacaaaaacttacgatgtttggaagtaaagtaatcaactcttgaagcagcactgcaactcctttcgtcacttcacacagttcctttttcggggttactgggagcatttttccgttccgtgcttctttaggcttacgcttactgaaaaaaatacgatgtcgtttttcttttagaaagcaaacaagttatgtcgttttgtagtgatgcacttttttatatccaaactagagaactaatggataacatttgttattttattttttaatttcaataattttcagaatactatataatattctatattatatcagtaatttggttaaaaaaaatagtattttcaaaaaaataaattttttatttttaaatgtacataagttttacaacaaatttaacattattctctttcttttgaaattataagacattattgtaattaaatattcaatttgaaaatacatgtgctatcttttttttt

SEQ ID NO: 296732 - DNA, 3093 bp, Cannabis indica
tgttatgttttagtcacaaataattttttattgtcactaaaagtcacattaagtcacaaaaaatttatgttgtgactaaaaaattatcactaaaagtagcagttttttatagtgtttgtacatgtcatgctaacccgactcatatttatttatgttttttaaaatacgagttttgttgttccatgccacagaaaaatatgggatgtgtcgtgccaatatttttaaacagtaggcccagcacagcccataagcccgatattttcatatcgtgctcggattcgtgttgtgatttactcgtgtcagcccgtatttcttaaataggccatcctattcttatatccaggctcgaattcgtgcttttatttttatattaatttttttataattactaaactatatgtatattttataactttagctatatttatataacttctcaataatattttacagataatcatatacaaaaattattagcattattagaaattgaatatttacttataaatactcaagtttttatattacactttataaataaattgatatacttttggtattacatgttttaatagttttggaatcccaaaacctcgagatcttcgatgaaacaatttggtggtcctaaatataaaatccccaaaccccaagacttttagatatgagatccctaatgcccagatctgacgattctccattttttatgtgttctctatttctctctcgctctttctcttttctctgcgggtttacagcttttggcattctcatcgtgatttggatggtgtttggcgttctttgtagatggacaatgttctcgtcgtgatttgaacaacatttggccttttctatagataaatcttgcaccgccaagaagggtattgaagctttcagtttaggtgggcacgatgtggttactgggaacatcaacgaaattgtagaggggtacaataaaaggaaggttacatcgagggattacagggtttggatattgacggaaagaatgatggtattgatgatgaggttggggaagatgaagataaacccattgaaggttatgtttgatactctgtttgtctcttttctttaggaaatttaaattttggtaattaggtttaaaacggatgtggtttaaaatctgctctataaatttaaatatgtatatatttgtgtcttattatgtagtatatgtatttttttttcaaatctgttatttctctctctctcccttatctaccttgagagagatataccagatgaattggtttaggaagatgagaacaaagtggattacattcttgatttgattcgggcatcgtaagttaggtttgttgagccattctcgaaggtggaaagcgattttgggttatgctagacatgatcgatagtttttggctattcatggtaatttctaatatgctttcagggtttgtggttgttcgtggtcactgactaagaatagataagtttcaatgacgacaaaagcttgaggtagccttagcagttctatttcttgttgtgatagcagtttcagacgatggtgcaccaaaatgtagcggcgtacattgtgggatagagggatagcaattatactcattttggccgagtttgttgcgattaaacttttttatttgttttgttgcagttatactagttttggctgagttttatacatgttaatttattagtattttttttattaacgaccacttattattattattattattattattataagagatacttaatagccttttattattattattattattattattattattattattattattattattattatttatttatttttttttaaaaaaatctattgtgttattggtaaagtgtatcacgttattttaatttttctagtttatatttggttattatatatggaggagttcttcactacattttgagacacttatatggattaaatttttttcttttagtttgtaattaatactctcatggtaaatatttacttttacaaggactaattattgattttgttgttattgtagggagtttcacaatcatttaagtagatgcaatagaactaatgatagttctagattgtcagttattcacgttggagttgttacattaaagtcattcaagcagaatcattagcattattggtagttatgggttggtctctcacactcccctcttgattttgtggagtctaattgtttagctttggttcttactttttctaagtgctcttccttttgtaatgagctagattttttattagatatttttgctagtttacgttttaattttcttaaggcatctctagttcatgtttgtgccataaattagcagtacatgcctagaaagccctcatcatctgaagaaactcctcctcacttccctcattggcaactcctttgccctttccctcaacggcagctggatggacaggtcaggcagcttgtttttcttcagaccttatcaccattgggatctccccccaaggaagtgccctactcatgtctctttgaaaagccctctccctcttggtttccttcctcttctcgggaatcttatcagagggagcctccgcctcaggctatttcctcttagtccctttctttttcttagggaccttactaaggggagcagaaggcttgttcgtaggatacaagttgtacttaataaagttctccttttgtggcaagggtagagatattacgcatgttagcaagcaaggaaaggatgtggttggccctaccctaagcttcaaggtggggattattgggattttataccctaaataaaacccatttcaatacaatctgatttattatcaatagaagattagaaattatttatgtttacatgtagttttcatgtttatggtttaatgagtacaaaatctgttaagtccagaacatatagttattcacaattacagtgatgtcaacacactggaatgtaattgtgattatatgcttcaaaagataatgtccctgattcatcagtgcactggatttacactgatgtgataattagcgataaagtatacttacaccttggataagtgttatgttctttccagaacattggcaaagt

SEQ ID NO: 296733 - DNA, 7201 bp, Cannabis indica
cactttatctgaggatgaatccaaatccattcttaaaaagatacaagcaaggagatacctgcattccatgactcttttttcttctactactgcatgagtggtttcgcgctggttgttcgggaaaaatctactgttgaaaatttggaatgagcctgcagcaaatgttcaagagcaaattctcattcttatctgatcaagtcaaggatgcatctttatcttcaccattgcaatccaaaaataagaaaatctttcactgaatctgagcctagaataaagttaatgagctctggcacaaagggcaaaagctctttttcattcatcttttggctcccataatactagaaagtatgaaacatcatactctagtgttataaatctgcacatctattttccagacaaaataaagacatatcaacatatttctgatgaaaaccattctggttcagttcccaatgatccaaaaccaatggatttcatatatttgttccataaggctctcaagatagacttgcagaaccttctttacagttcagttcatttagctcaaaatccttggtttcttggagacttttacaagcgctttcaactaatacagtttttgtatcaaatccatagcgatgcagaagatgaggttgcctttccagccttggaggccatgggaaaattcacaaacattagccactcttacagcatggaccacaaattggaaattgatcacttcggacgagtctcctttattcttgacaagttaactgaactgaatgtttcaatttctgagctaaacacaaacatggatcaaattatgaggaagcattatcaactatgcatgaatctgcatgatacatgtaagtcattgcataaaatgttgtctgatcacattcatcgcgaagagctagaggtttggcccttgtttagagaatgtttttccttaaaggagcaagagaagatcataggatgtattttaggaaggacaaatgctgaaattttacaagacatgataccttggctaatggggtcgttaacacaagaggagcagcataccatgatgtccatttggcgccaagtcactagaaatactatgtttgatgaatggttgagagaatggtgggagggttatgacatgtctgaagttgtagaggactcaattgtggttccttcaacagtagtcactgatcccttggagattgtctacccttatctttgtgaagctactgaacaagaaggtaaaatcagtagcgaaaataggcagcttatggagaaagattccattagtgatactgtcaagcaaatgggggattgtaatgtggatgataaatcaaaggattctgatttatgtgacctcagtaacttagaatacaaaggatgggatgagaaaaagagaatggaatatgagattgaggatgtggcatgtgaaattaaaccagctcaatttttccaagctgctcagaaatctaagtactatgatttacttttgaaaatgaatcaagaggatttggaggctgcaattagaagagtgtcaggtgactcttcattggattctcagaagaaatcatacataatccaacacctgctagtgaggttagttataagcattctagtgttattaacaactctttttcatacttgaacccgaaaaattaacctcttttttttcctcaaattaaaatttttaagatgatgaatgcagtccttttccacttgctgctttgcataatctcatggaaagacagtttcctttttcatacattgattttttttcttctttctatttctatactatttgatcagtcggtggattgtgaggcagcaacattctcttcaaattccctcgagtgatcatgaacaagagttcccaggccagcatccttcatatagggatccacttaaattgagttatggttgtaaacactacaagagaaattgcaagctcgttgccccttgttgcaaccagctccacacttgcttgcgctgccatgatgaaatcactgaccatgtcatagataggtatgtcaaaacttcactaattaactacacatattacaagttcaaattcatttaaatttgatgtttttaatgtatatatgtgttcaggaaatctgtaacagaaatgatgtgcatgcaatgcctgaaaattcaacccataggtcccatatgctcaacagtatcctgcgataaattctccatggcaaaatacttttgtaggatttgtaaaatatttgatgatgaacggtactatatctttaaatcttatagacaacacttaatacatttttaagaatgttattattaacttttttttaatcaaatgaagaactgtctgaactgaacagggaaatctaccattgcccatattgtaatttgtgtagaattggtaaaggactaggtattgactactaccattgcatgaactgcaatgcttgcatgtcaagaacactattggtgcatatatgcagagagaagtgttttatggataactgccccatttgccatgaggacatcttcacctctaatttgccggtgaaggccctccaatgtggtcatttgatgcattcaaaatgttttgaggtaatatttccctttgctctacttgatttgactacttggctgtaaatatactaatttaagctttaacagtattattgagagctttactatactaattttttccatatgcttattctaggcctacacatgtacaaattatacttgcccaatttgtggaaaatcactaggagacatgcaggtgagtaaagctaaacatattatattgttatgggaaattcaatgaaaaaagggtttttcttagaataatcaatatcatatattagcaccatatacaaattgtaatgctattgtgttgcaggtgtatttcaaaatgttagatgccttattggctgaagagaaaatcccagaggaatactcaggccaaactcaaatcatactatgcaatgactgtgagaaaagaggagaagctccctttcattggctctatcataaatgctctttctgtgcctcatacaacaccagactcttgtgagtttttcactttacttagtttgaataattcacttcaatgttgaaactacaaaggtgtaaattaagcagcttgtacaataattaaatcttttttacttgttcgtagtatttgacactacatatatggttcgaataattttagataagaaacattttttttcctcctctcacttcaattgtaatattattcattgtttagagagccatgacaattcattctttattaattcaaggccaaattatagaatcaaagttttgtcaaaaaaaaattatagaatcaaagaaataagtctgctctcctatttaacttttgattatctttatatattgctaaagaattttgtttgttacatatttattctgataagaattataggatttcatctcaaaattaattgataatgagtagagtagctcgtgttattatatatgtttttatatataactcaatattatacatttaatccatgtgggacaatgttatcatatatccctcctcaaaatggtgactatttttttgcttaccaatcttgaatcaccttatcacaagttgtgctatttgctcgcttatggttgttcgaatctcaagtcatgcgactggctttactatttggataggtgtggatggaaagcttgttagggatatgactctgatacaataataagaattatgggttttttatctcaaaactagttgatactggctattggtgaagtagcccatgttcttatctatggtttaatatttatatattaaaaccatgtggaacaatggaacaatgttattcaatatattttaatgaataactattgtgtattttttaaaaataaattttatttttataatacacatgacaaaattaaaagcttaaaaaatgtttgttaggatctcgcattgatcaagtatgggattggttagatataattatttgggcaacctcatctcttaggctagttttcgagagtgagttctacccaagtagttgaatcaatataatttacatttacaagatattactttggattaaatttgagttattatgcggattagattagatccaaaatatgacacctatactttgtacggattggatgtactgtgagaaaaatagtacaggttggattggatgaacacccctagacataaagtcttggggaggaatcttacgcttagccgataggcaatcaaagagacaaagacggataccttaggggtcatctgagagtggaagttgaaggggtgtccgagagactagcctacgtgtcactcctttgacaagaatcccgagaaatatggcaccctatcccctctgtgaggcctcaaaagggcgcataacaaaagaaaatcacattttgtgctaacaaccattactttgacattctccctcacaatgacagttcatgctatgctatgactatcaacatttcaggcacatcagactttctccttcttttcctctaacgttgtcaagcgctattttaccaccactgtataccagaacttttgactgcacacgcttctcccatttgtaagtcatttaacatatattttttttagttcattcatttttatactggtaattgttctgtaaacatagtattcatgttgcgtgaccgttgtttgagggtttccaccggccattctccgtttaccctttctttgaccaaggctaccctacttgagggttgtaaattgcgctattttcctttctcttttcgcccattgtactgtctttgcatggtgcaattagtgcccgatgcttggcacaagaaattttttatttctagatatgccagtgtttggagggggcctcttctcagcggttagggaactgatattttccctttttaatttagggtttgtcatgggggataactgttgagtacatctatttttttttagatgagcgaagttttgagagatctccatgcacatggattctacacgtttgatcgagaagttctcgaactacattctaagaaaacgatgttgattcccagagccccttccaatattttatcgcaaagacgttcttcatggcctagttttgattatcgactatgttcaccgagccaccggttgggaggctgatgacctgcactcatctttgggatgtgctcatcatcttaaagtgattatcgaagaaaatgggatcatgccccaggaagctggagtatttcatcgtttagctcgagactcggagattcccaaccataattatgaggggtttggggcatggagccaaactcatctcatgtctggggtgagtctaccacttcaaaactatttcataaatttcttagtttttgtagggttagctccttatcaactcattcctcaaggctaccgtatgttgtcaaacctttttatttcttatgtctctcggggttggagtgctcccagcccgtagaaatcttgtatttttatgaacgtgtgtccatttccaagaagggggacagatttaaggacaatttttacacgttgcaacctcattcgcccaacgagactgtagtcccattcaatttctaaaataatgtcaaggactttcgtcaccaaattttcttctactttggcttctgggcttttgagtgtttagatctactgattgagtggacccagattccacccttgttgcggatagctcttactcaaatcttttgcaaccatgtcgcggtctttgcttcacttagcagggaggagcctaatgttggggacatggtgaccactactaactatcgcaggactggcctcttgaaagctcatcagtctgttgaggacacaaacttgtctagggactcttgccccaatgcccgtgacaaggaggcagagaagatgctctgattcaagataatctaggaagctgagatgaagtacagagcctaccgaagattgaaggagtagaaatacatgattgctcgagtccacaacgtagctgactagagatgagggaaaaagcagataaaaaacttatggcttcaagaccgtcctttccttttcctatcccaaactttgggaattttggagcaagtacgtctgacatcagtaagcctcctttatccttaagttatgtaccttcagttcaagattatgctcgtgccaggctgactagctatgacaggaggttaaataggttatggatgccccactcccggtggggttatagggaaaaagagaggtacttttttacatattggagactttttgggtaggtcccaaatgggatcaagccttccgatcttgattcttcttgaccacttttcttatgtcacctcaagctggttcctcccttcaaatagctttttagggtatgacaacaccaacaacttaatttatgaattttttagggaagagttagaccatacgggtaggattagttcctcccgcttgcttcatttttgggttttatcatgtgatcgcatatttctcatgtccttgtctttatcttgcaactcaacccatggatgagactttcgccttgctggacgcactggacagtcctgaagcaggcaagatccttccatcgtggatttttccaaggtcatagtgtctcccggaggacctccaaaaattgcctccaacaacctagaggttgtctttctggatgaagacgaagtgtccccaacggaccgtaaaggcaagcagaaagaacttgttgattctaggtttttaaagaggctcaagtcatccaggacaccctctcaagacactgattactcagggatccccactgaagcgactcttttcctgggtgttctgtctattcctctgactcccgtccatccagataatgctcacttgcagctttgtctagccaagcataatttttccatgaatgagcaaaccaaggaaaacactgaggtggaggctctaaggactgttaaaaattattttactaggatttagatttactaacatgtatgtttgattattaactatactctaacaccttaaatatgaattttctaatacgatgaaataaacacataagagattaagaaatccttacattgatggcaacagaataataatgactccttccattcagatctagcccttgattcctttctgtagcagagcattatcaagatctgaacttgaatcttctctccttcagtttggttaaccacagtcttccacactatgattgagtacttgacttgatat

SEQ ID NO: 296734 - DNA, 1321 bp, Cannabis indica
caaaattgataacatgcactcataatgaattaacagtagtataaacacacacaaaaaaaaaggaagataaggttaataaaacgtactacctctacgagtaaaaaaagaacaaaactatagccattaatatctcatgactactttgtgtacgtaatgctctgaaaagttacctgaaaacctaactctacggtaaatgatgtacattttgagagagagagttttcgtaaaaagaggtgagatatatataaagattcttttgagatgaaatatagggtgctgatgtgggaaacatgcatgaaagagagggaagattccattcagatcacacactatatggaatttaatgaccaaattgggtacccctcccctactctcaaccaagtaataaaaacttctttattaaaaaaaattactctaatatatttccatcataaaaaaaagatagaaaacaattgtcccacactaaagaatctttcatcaaaaatattctttcatattgacgtagaaacagtctccactccactaagtatatgtatatattgtttatacattattagcttaattaattggtaattggtatacgtattatggtaatcatggtcttaaaatagaaattagctagactagtggggaacaaatactagctagcttagtttggtttatcgtactaaacatataatcacttttttttattttcacatagtactatttattgcagtcatatcataaaattgatcaacctttgaaatcattattcttctacatatgacgttcattattattatataagtggatatagcaattatacttaagatatggacgaaaccgttaaaaatgatttattttcttcagcttttgtttttttgtacatgataacatataaatcgatttttgtccctacgcatacaattaatgagattttcttctaagccatttgattttgtgctatagccgtaaaggaattcacagtcagcaaaataatttccatatatatttagagagagaattttctaaattttgatcatttgatattcgtactaaaacactatctaattggaggtggggtatggtggcttccacaagagatgaatataattaattcacatcaattttcccatttctttctttcttttcattattttcttcgtgcgtgtttgagttcatttcctattcgaattttctagtctttcaatcatttatttatattattaatcaaggtatatattaaataaccacgtgttacgtaaattagtatttcataatgtattaaaccaatctaaatgtgccaactcaactaattattttttttaaatactattaa

SEQ ID NO: 296735 - DNA, 2831 bp, Cannabis indica
aatattattaatttaaaattatgatattaaaaaaaactaaaaaactaaaataaaattaacatacgtgatttgacacgtaacatctatctagtaattacataatatatcgatagtaataaaattattattttgagaattattatcatcaattttataaataaagaatattttttaattttttttatttggtggtcaatatttcattttataatataataaaacgaagttatatcttttatcagattatagagataattatctcattttataagataaaaaaaagtatattataagagtgttacattttggactaacattgtcataagtaagaacaattaagatcatagtggatctaaacttgtgaaatgagtcataaaattggaagaacaattttattttacaaggcttatgtattcagaataccttgattcttgggtcctccttttctttgcagaatcactccgatttgggctcttcaaactccttttgctccgtgactggattatattggactctagaacttttactttttggtttgtttgtctaggagcggcactgtatccggtttgttcagctccgaacccgaaaaaagtagcttgtgcagatggctgcacggaagtacttggtccataaaccgtaggagttgtgaaggtagttggtggtggtaaatggatggagttgtcatctgcgtagtttgggcatttgttacatcagtggaagatgctggaagtactccgtaggcttgggtgtaagcttcttccaagtttatgaatccttgggcccttatcaagaagtcagtcaaagtgtctgccttcttgcgctgaagatctccccacaacaaggattcagttgccagtcctgatgttaaggccatcattttcacgttatcagtaaccttagtttcagcagccacatccatcatgcgctgaatgaacttctgcatgatttctcttagttgttgcttgatgctggtcaaggaactggcttccaaatcatagtcctcgactgctataaattgttttgtgaacaccacttgtaggtctctccagttgtggatcgatgtcggaggcaacctcttctaccaatcctccacgaacttgcttaatgttagtgaaaaaaacataaacattttgcattatcactgtccttggcgactagcataatgtggttgtatttggacaagtagtccctggggtttgtccgtctttcatacagttccatctgtggcattttgaagcatttcgacagtcgtgattcaatgattttttcacacaaagctctatatcttcttcctagagtctgacatgacacctctttatttttagaaatcttttctgtgattttcatcaactcctcgaccttacgttccaggtgttgaatcttatcacttaaagattctctttcgcaaacacgatcattgatgtggtttctcaaatccttcccgtggggtctagctttttctgctttggctctttctttcttctcattcaatcttcttcaaagatcggtcgtggagagacttctgtcgctgccatccgataccgaatatacctcatcaacgtcatcatcgtggttaatggaatcactgagatgaggtttatctttcagggactccagctttcgaactccagcatcagtcttagttttctacacgactcagcctttagaattagtccggacaccatcccttgaatcatggttcctttctttttctgttggtcagcaactttagacttttgatgttgcttgatggaagaagtattctttagattttcagcagctattcctttcccatatttgtgaaggcccgaagttctaagatcttttggatctactttatcaagagcattagttgttggaggtgcttatacatcggggactcatttagttaaggttgtctttacaacctccatcctggtcatcttcttgagcaatatctctgttgaattctcactaagagtttcaactctcacacttatactcgagaatcttcttcatctacagaagattcttcataaaaaactcaaacccaatctctctcttttctcactctaactctcaatcttatctgaactgagttctaaatctcatgtgtgtaaaataacaaggcaagatggtatttataactttaggatcaagatcctaaaatcggtagttgtaagaaacgaggttgttaagttaattagaaataactaacttaatcaactcctctttgagcgaagtctccacgtcaactttagtcttagtgcatccgggaacatatttgagcttctaaactcacagacctaaggtacttactgacgaagcttccggataggataaaaccaactggagttgactatccaaaattacctttcaaggagaataactagctgtctgaaactcctttctagaggagggctagctattttgaagactgaatccaaagtggatatgatagacatccgaaaactccattccgaactcaactatcattctacaagacttcttctagaatgggcatgttagctgtccaaaaacaatatccgaaagacaaataacttttcatgaataacttataaaaatctttacatttgaagaaattataccacatacacactgattttttttattaacaaaagatacatagaattatgaaataaaaagggtattttgagaagtaccaggaattatcattttttttattagagacttgtttgaattagctcccacattatgaacataaacataaataattatttattttcaataatatatttcactatttagtattgatttttcttcttaataataataataataataataataataataataataataataat

SEQ ID NO: 296736 - DNA, 7064 bp, Cannabis indica
tagggcataaaattccaacagtattttcttagcttcccccatgtctttcatctcgaattcactcttaagttgacactttaacttgctgatctcgtgcttgtctttgcctactattagtatgtcatcagtatacattagtagatatatgtttgtcaaagtaaacacagggatcatagcagcttttggtgaattcaatccaagacatgaacttatcaaatcgaatgttccattgtctaggtgcctattctaggccataaagtgacttatgcagtaagcatacctaatttggattgccattgtcaaatccttcaagttgattcatgtagatcttctcatctaaagtgccatgaaggaaggctgtcctcacatccatttgatctatttcaaggtcttaatttgtagccttgggcatgataactctaatggatgcttgcttcacaattggtgcaaagatgtcattgaagttaacaccctctctttttgtgaagtcctttgccactagtcttgccttaaatctcactgtatcagtgtttgtcattccttccttctatctgaaccaccatttgttgtcgatcaatctttaacctggtggtctatctacaactgaccatgttttgtttttgattaatgacgccttttcttcattaatagcttactattctctattgctttatttcaaagtttccttgtatgtggttggttttgagttttctaggtcacttgctgcaactaatgcaaatgtagaatagtctgcatatcccagctttgcaggggatctaatgttccttcttactttatctctggccaaaagatagtcttctaagtctccctgggtttcttgtgattgatcatcagtttattgagttcgactttcatctgtgttgttggtttcatctgaattggtgatttgatctacctcaagattgaccttgttggatgtgtcttctatttgcaatgcacgttttgacaatggtttcattgccatcccctcttctgtaaaagtgacatccctgcttataatacatttttttgaaacctagttcaaggcaccatagtttgtatcccttaacatcctctggataccctagaaacatacacttcactgctctaggcttcaacttgtcttgtgtcacatgtgcataagcagtgcacccaaataccttgagatgatcatagttctgagcttctcctgttcatctttcttgtggtgtcataaagttgatgcttgttcatgcatggaaatctatttataggtaacatgcaatattcaaagcttcaccccaaaatttttttctctaaaccagcacctttgagcatacatctgaccctctcaagcaatgtctgttcattctctctgcaagaccattctgttagggtgtatctctcactgtcaagtgtttggaaattccctctttatcacagaaagctttgaattggttggaacagaactcccatccattgtttgttcttatcttcttaagtttcttgctagtctaattctctaaaagttttctccacttgacaaatctattgaatgcttcatcattggtcttcaatatatatacccatacttttcttgagtagtcatcagtgatactcatgaaatagtatgcacctccaagtgtaaggattcttgagggtccccataggtctgaatgtacataggccaagcgctcctttgtggtgtgctttcctacagtgaatttctatctgcaacttttaccatagccacattcttcacagaaatttagtttgcatgacaccctccgctttagatttcttgcttcttcaagtaagtgagacctctttcacttacatgtccaagcctcgaatgccataaccatgtcatgtcatcatcacctgcatctgtcacatttgaagttagaccagtagctgatttcccattaagaaaatataatccatttctataaattactttcataatagttattgatcccttgatgacattaagtgaattttcatttatcttaatctagcagcctttagaagctaaaacactaatagacgaaatatttctttaaaggtcaggacataccttacatctatgattgttctttgagctccatcatccatttgcatcccaacaaatcttgttttttgaatggtgcaagctttgttatcaccaagtaaaatagttcctcatgttgtcttctcaagtttgtagaacagttcctttgaaggacacatgtggaatgaaaatcctgagtcaaggatccattcttggcaagagtcagtgtttgacaccacaaggacaccaactgattcatatccatctattgcaacatcaacttgtcccttttattttgtcttttctcttttcagtttgttctttagagcaagacactcatctttgaaatgtccctctttcttgcaatagaaacactttttgttagtagtgtttcttgaatttgtcttggccttttgattccctcaatcaccaccatgctttgaactcttatggcccttcttgtcatgtctccctctgacaaacaatccttctccattgtgctatgttttatcatcagatttgctttgtatttccttggaattcaatgcaacattcatttctaacattataagagtatcttttccataaagaattgtatcaacaaaatgttcatataattttggcagagaacttagtaggattatagccccgatcctcttcatctaccttagcactaatattgttaaagtcaagaacaaccttattaaagtcatctatgtattttctaagctccttgccttcttccattcttaaagagtacaatttcttcttcaagtacaacttatttgccagcgacttcttcctgcagatggtggctagtttatcccatagtccaagggccttttcttcatcagcaacttctcttagcacttcatccccaagactgagaaggataacagagtgtgccttagtctcaatttccagtttcttctttgcatcttcaacagtcggtagggcttctgcattgatagcttttacaatgccttgatgtactagtaatgtcgtcatctctatcctccaaagactgaaattgttggctccaatgaatttgtcaacttcatacttggttgttgtcatttcttaactgtgttcttgcagctttgaccttcaatcgaacacttcttgatctcttcaatgtgaaccgagctctgataccatttgatgtgatttaaacaatcacatatatgagaatcaagaaagaaaaacaagaatagtagcaaactatctaaacaagtaataacaacaaaatttacaaatcataaaataagaacttaattgatactcgatcaagttgcaaaaaaaaatattcagccatggaggcacttcttctcattcgtgaaaacttgaattcgattacaagttgatagcagctctcaagaacaatggagataactccttacaattgattctctcactaaaagtaactggatcaaatacaccagaactcaatttacaaccctcctctatgagagaataactcttacatacaagctaccaacttttctaagaacaagtgacatgagtctaataactggatctctaactgtattgagatctctactgttatgtctatatataggcataactgtattaactaattatctatcgagacaatgttagtaattagatgagagaatgtgtcagctaaatactactatgacttagtttctagaccatattacaacaatagacagaaacactgagcttataagaaccatcctctctgcataagaaaggtttctcgagctccaacttttaattctactagtcattttatcctattatttattaacataaaaaaaagtgaagggtatttaatttgtattcatttattaactatcgtccatcttattatgataaaattgaaaagaatataatggaaagactacgttatgtaaaatttatatttcgataagcattattaaaaagtcatatattatatgagcacaatttagtagtgtaaaaactttaggttcaaaaaaatatactaaatattcataagaatttattagatatataattgtggctctcttttatctaattaatcaatgaaaaaagagaagacaatacaatgttggtcttgtcgtgtttaggatctttttgattacataatagcagccacaatttgtaattgatcatcggtcaaaaggttcctacttttatgtcttctcccactattgacctatacgactcagcatccaactactataaatatttatatcaacacccttttaaaagctaagcacccccaataataatataagatcagcaaattaagaattaaggtagcttgaaatcaaattatggctactactactactagtgttcatgacaagaatgagttggtggaagagaaagctaagcaccaagcaaaagaagaaggagaagtagtagtagtcccaaaaagtagtccattcctttcgaggttgatgagtagcactagtactccactagtggccagccctgtgataaagcaagccattgcaagcatgcaaggttacatggaagatgttgggaacttcactaagctagagcctcacgaggcttggctgcctattactgagtccaggaatggtaatgcttattacgctgcatttcacactctttgctctggaatcggtgttcaggcactactcctcccccttgctctcactctccttggttggtaagtaaatccacataattaatattatttgggttacatatatgttgtaatgtaatgtcagagtgggctaaacataaaatccaaaacaatttatgacaagttgtggccaaaataaaatgatggtagagcaatttcttttcttgctagtggtcataagttagatcctgaaggaacttatacatagaatgaaaaaagagtgggtggattcgaaccatggtttgcatataaaattaattattcttaaccaattgtacaggacatggggaattatatgtctcttggcggcttttgtgtggcaattgtacacgttgtggttacttatacagcttcatgagtcggattctgggatgcgctacagcagatatctccgcctttccatggctgcttttggtacgtaccttaacttttaatgccagttgctatttcacattttaaaataaataatgctatatattatatatgagaaatactaagataataactggtattgatgtaagataataacttttagagaatatcgttaattaatcgtaaaacatcacttctaaataatgctagtcactgtatttaataacaatattctatattatatatatatatatatattcaatttgagatgtattggtcggttacatgaacaaaataatgtgatatttaatattaaattacattaattacagttttaccctatcatctgaagtagaactgaagaccatatagttgcccgtgccccatgacaattctaagaacactctcatcacctcttttaaaatagctaattctttaaaattgagaaaagaattagctatttgtaattagagtttctatacgattttttgttacaatttaggttgcagagctagttacaataggggtttctatgtaaaaataaaaaagcccctataaaaaatgaacacccacctgtatgatgaccaaatttgaccggttcgtggattgcaggtggtcaggtcaactattttttttcattttattctaatatttatgcttgcttgcttcttcactacactatacatcgaaagaacaaaaatttatcaaaaatatatataaaataacacaaggtgagaatgactaatatatatgatttgaataaaaaaattagagattaggtatattttaccttacaaacagaagagagtgaacgggaggaggagaggaggagtctagggttgtgcatgatggaaagagggaggaggatgaatttgaggccacatgcgatggagagatggagagattggggggcgaggggcgtccgaacggtctccagacccatgaggccatgagggtgggtgggttgtgggtttggaacctttgggtctctcgcacggcgcaaagaaaaggaaaggggaactcatgggtactggctaggttaggttatgattttaggttttttagtttaggtaagtaattaaatgtaataacaaaatatatattttttaaataggagcggtcaacggccgggtatggattatatattcagacctgagcatgtgaaaaattcgaacccgatcccacctgttggtacctcatgtgtcaacccgacccacgcatgaatagcaagcttttcctttatttagggttttgcgggtcgggtttgggggtgtttggtgaagggggtagggattagatgtgggtgaatgtgtagtttacttgttgtttggttaaacattttaggtgggtatgtgtttgctttttgtggatcccactagattttaaaaagtaatcttaacccatttgatgacttgagtattgcattcctccacatgttaactcttcccacactttattaggctaatcaaaactagggttgttcatataattcataatctatggtttcaaatcccaactaatttagaccaaactatttgagatcagactaaataattctgttgtcaatggtttagtcaatttagaccgtttataattctctggttcggtcatggtttaaaaattttcacatgtgattccaactaaatcaaattgcctgattcttgatatatacttcatatgatttttttttactgaatattgatatttaggaacaattttaggtatagtattaataattatctttatattgtgttaataatatttgtttttattgttatttacatttaagtattataaactttaaagtaaaaataatttagtaaaaaaatattaaaatatatacaaattacaaattatagttttaaactaaactaatctacttttaagtggattgatttagttttttttttcccatctgatccaatccaattagtaattggattttaaaaatcatcatctgatccaatccaatccaattagacctcaaaatctaatccaatccaatccaattactaattggat

SEQ ID NO: 296737 - DNA, 8176 bp, Cannabis indica
aaattactcttaaaataataataattattatttaaaaacgggtaatttgcggctaaactctctaaacttttgagtttggcacgatcaactcctctactgaatttttgaaagtaaaattccatacaaactctaattatacatactgagtttggcactgtgtctatttagtatttaacagccaaaaacttacaaaaaagtggagatcaaaacaaaattgaagtttgaaatattttattccgaaaattcggtaaaaagattgatcgtgtcaaactcacaagtttagagagtttgaccacaaagatttctatttggtttaacttcacataaattatttacaattttaactgttaaaacttaatacaaccaaatgcttttagaaaaattcatatctatgaattcaaaacatcccaatttgttcaaataaaattctacaaatttgcacaagttcaaaaaaaaattagcatgctttaatactttaatagggaatttcacaaactcttaccataattttgagttatttaaaagctaattagaacttttactttttaaaatttgacataacaaaatcatgttctttaaatttttctgatcgttaaaatttatttcgaactgttagattttgtcaaaatttgaaggacaagaatccttatatatatgatacaaataaagaaggaaattaaaacaaaagccaaaaatagcaataaaaacaggtgactttattggcaaaaatatctaattctaatgcacatttagacccatttacaaaaaagggtaatcatagtcctttcactactgtctgttaatctaaatatagctctttctcactctacctctacctctctctctctctttacattcaagtgtacacaattatatctaccaactatttctcctctaaaaataaacaaaaatatatcgccacgcagagctcggttcgataaaaaatggctttgaaaagctttgaaatcttccagtgtacgaggaatcttcgtcgcttagcgctccctttggcaaccgaggtttctcagttacacgacgcgaacccatgttccaccgcacataggacagccataagcccaacggcttatccaccaaacctctcggtcgttttgattagctgcattggtagcagttggtgaagtgaaagctgaagtttgccttaaacaccttatgcactgcataatgttagatcaatgaattggttagctgtaaaaacatggttatcaaaagaattcgatcgggaaaatggtttaatgtcgaaccttgtaccaaactccttcaagaccagtcttccatactgcagtaacaacatctctacgagatcccattataccgagataggctccgaggcctacagatgtgttaagtccaaaagctgcatctctttcggacattcttcgtttccttggccacaagccttgagtaccgtagtaaacatcggtactttccactgaactgaagtcaagtgggtgagtcgaataagtagatggcttgggagtgtcatccaccgagcccatatcatctggatcagaccatggcccaccaaacatgttccgcctgtgccactcttcagctggggggtggagttccaattcccgaagtaagagaccagcagcatcagcacctctaggccttggcatattctgcatagcccatattatcgaattagaaaatgtaaggaggataccgatttctctgaaaaataaataatcgaaagaacaataactatacctgcatatgaggacccaaggatgcttcaacaacctctggaagaacggtataattaccgtcgatataatgcaagcgcacctggatgttgctgcttccaacctgagataccggaagcgggtgtaataggcctgctgttcgtctacaaagatccatcagtataaggaataggactttaacctacacagaagcagaacatgttcatttcgttattgagatctgcttatacaaacaacttctaattgcaacacagaagtgaaagaaatcaacggtacctcttcaaaagtatacccttgaccagcattaccggaacccagtcttgaccttccagcacttccttcttcaaccccttttgctccaggcacaacctgaccagctcggtttacctgattttcttctggtctggctactgacgatggttttacaggacccgaacccatttcttctactttcccaggctgaccagactgaggcttttggacatttgtatcggtatttctttgtgcattactacccatatagcgaggcagttgcgttcggcgaaagaaaaaacaaaatagtaaaagttggcaaagcctatgaagaaaatgacagtcgccaataagcctaacggctggggttccaggaaaagttcccgtattaatgctgatcggcatgaaagatgatggaccgcttattgggttaggagctgagctagacacaccaccgtcattagtgctactaatcttggcaatggcaccttgtacccaagcttgcatttgggtacttccagtcgaatttgttgttccattttgactccctaacaaaacaaacaatacatatattatgatcttttgtacctaaaaagaccgattttgaaagaaaaaaagcaaatgcacactgaccctgatttgttgcaggtgatgcagcactttgagtaggacttgtaaccatgttacggttacttccggtacctgcagtgacagcatgacttgccaacgtgcgacagaaacttgcatagcgccttaagcgtgtaataaaatgtgaagctagatcaagaactgcatcaacataagcctgcatcacacgggaatcattgcaacaaaacggaaaatcagaattattgcaaggacgggactactgttgcatcaatatggtaatcttcattttcataatatgctcttaaagatatgatgtaaaagattacagtaggcgaaacctcaaattttaggaatcattagaatccaacaaacaaccgacaaagttcaaaggcaataaaaaagtgaagaatttcaatcattaaaaaaagcacacctgaatactggaacagagtgctggatcaacagccattgcttcgggatcaatgccagacaaggtctcgccagatgcaatccatggctcagctaccagagcagaaggatttatcaaagctgattcaattcctttccccagcatatcgagtaataaccttgcttgcatatccagaaccattgcccggacttcttgagcgtttgtgccttccaatagtctgcattttatcctatctagactctgcattaacagtttaaaataatttagccaatcgaaaaaaaaaagaaattagcagtcaacgagatcagaaatttatgtgatatgcaaatgcatgaaaatcttacactgaaagaaacttaatgttcttagaataatctattttcgacaaaagaacaagaataagaaaattgcttcctaacaaaagttattctttatttatacacactactggagtattacacatttagcacaattgaaacttacaggaccatactgttgcctatactgagttgaaggaagagaatgaaaatccgcatccaagaccgcaataacactgttcaatgaaactgtagcaacaaaaaatagatatcagacactagctactgcacatcatatagagcaaaagattcgttcttggataataatagcataaataaaatcgagctatttttttaccaatgccatcctcggcagcactctgtgtacaaccgacagcatcccaccaatcaactccaaccataagactccaccaaaatctgttaccaattaaatcacagatcatcaacatatatgcattcaaccactcttcttacaaaagaagttcacaattgcttacgaagaatgagaggtttactatcattaagaagtagtacctttctgcaattgcacgttcccaggttgatgagtttgtcttatcttggccacttggaacagcagggggaagaacacgaataatcttcaaaatggtacgatccttactggtatcgtgccaaacagacgcagaacaacagctcgtagatgaaaatgcaggagcagcaattgcagatccaacatttatctgatagttatcaacaggtgcaaagcttgggccagaaaaaatgtgaaccccacctcggagaaaagaaacagcaatctcaccaccatgtgcagaatagacaattcttgctagagttctaacatcacttggcaaatcgaaaggatcaaaggttactcgttttgccttctccgcaattgaatcgggtgttggtgcagttacagttgattggtaacacttaaagtcattagttggctgtatgcatgtattcactttggactcccaaactgtttgcatgggtgcctgcccaccaaaactagaagttggatttccaaatatttgatgtagaacgacaggttgaacagatgattcccagcgttgcactctccatcctgtaattgaaggaccctcatccggatcataaggagacatgtattgccctgcatgataaaaccagaaatcatactcaaatagcatacacctccacatattcaagcccatcttgtttggctagctaataatcctttcggttcaaataagctaacataaattcaacttaacaaacccagttacatgttaacaagaaaggacacccaaaaatgatttataaacataccctatcaagcaccgaagcacatataactttctccgcaatgttttaaacaccagaaccaggttttatttttcccaaagaaacgaggaaacaagagaaggtcacaattgggaggatttcttgcctaaagtgtacaggtttggaaatttaaaaaataattaaaccaaatgaaatcaacaactaagtattaatcaaatctaaaagattgtttagaacaagtatacaagttcataccctcaactatgacaacagctataacagaacccccgcgtgtgggatcaaaggcaacggcagtaactccagacccccaagtagtagttgttgcagattgagctgcagcttcagggcttacatatgcagaaaagtttgaaaccggggagcaatgaagttgtacagtttcacttaattctgaatctgtctgcttctttccgctctttgcttcagataataaatattcttgccagctaaacaaatatgcagctaaaggcgagaaacctgcccaagaaggtggattgattgaaggtgggactccattgctcgtgactctctttgcagttgtctgaaatccatttccagggccaggagtaacctcccaaacaacaacagtagatggatttacgattggaacacctgcaacatgcatggctccgctatctgttatgatagcatcagcggccatgatcccactaggccctgcacccaagagtcctttacttgtacaaaaccacttggctggagcaatactttgattaggaggccattgtgaccaatgtagttgaacagaacccgaagagaaaacagaacaaacacaaagaaaattcggccacctagctgaaacaaaaacaataaaccagatcagatttaaaatacgcccagatgtatatttaagttgatttcgaacttgcattcagagaaaaaaaaaaagagttgatttcggttatgacgagtgctgaatcaaaatacataaggaaacaaaaaccaacaaactaaagacctctaaaagcaaatcattatcataaatcggtaaaaactacataacaactgaaagagaaactacattaagcaaaaaacctgaattttgagactgctgtgaaataaatttttcttcaaaagttgactttgaatttgcaccagtactcgattttgaggaaagccacctatactgattcatcagatagcaaacaagattagacacctaataccaaaggaaatttattaaaaaaaattagaatgtttcatgtagctgttgaacataggaaataggtatacatacgaaaaagaagaaatcagagctaatgtagaacaaaaataaagtacacgcattatttcattgtaggacaaataaatgaaaactgcctaccggagatacccctgataaccatttcgtaacgacagcaatatcctgccgccattggtgctcacgttgccagcaggtagcatcacgtactacatttgctgaaccctgaaccgataaaaacaacataaattaaccacaagggtctctcaaatgacatatttttttagcagtgtaacagaaacagcttacctgtgaaggctgagtccatatggttaccctcccatgaaagttggcaattagtaaagcacgaggacaagaagtaggcgaccattcaataaactgaacagaatcacgaggagaatctgtgacatatattcaatattactcataaattatcaattatgactaataagaatgcacaaacagaaataatatggcttgccaccttgcatgcctcatcccacgtccgtcaataatttgcaaagttttttgtttttgttcttttaagataaaataatgtgcagagaagttgatgaagcagatttcaaacatttcccttttttggctcgatgagttaccatggaccaaacccaccaaacacagagaaaataaaagagctcaacattgtataaaataatcagctgctctcaattcaaagcaacaaatgacagacattttaatcaaccttgttattaaaatgtctatgaatcaaatatgatattcctaatttcataaaaatatcttaacagttatctgaagtatctgatttataattgaagcacaaacacatagtcatagacagtaaaaaaggagcaacatttgcaaagaagggtgcgtaatacctgctacaacattgaacacttcgcactcagttggtcgttctgggatcacaatatgaatggggatccaaaatggggaattcgcggtggaactatcacaagcaaagcattaccgataaggattataacaacatttagaagaaaataactagatagggtttcatccgataaataaaaggatcaatgtgggtgagaaccagacagttttcttaaaagagaagataatagcaaggtttttattagaaaagcaataaatgacaacatatcttatcaacacagactacacagtaatttagcattatttaaacagaacgccttgactatggcctcaaactgatggactaagaaaatagaagaaaaggaatgaactaggttaaccttggaattcttgcacatgtttccgatgcacaagctatcgcattcagcttaccacaccaagcaaccgcactgaaacaagcaaatgtagaattgatgagaagaccatctcactttataacttaaacgcataatgagtattagtagaaaaaaattgaagagacaggtcttcgagaaacatgttcattagggtaagtcttgtaataaaaaagtgacccactatgattacgagacgctagctaaaaaacaacacacgtgcaaatttatatgcaccaattcttgaaactattggaggagtgcttactgtgggaaagttttcacacaaatgtgttccactctaattgtaaaatgcttactaaaaatcataaaatcatgcaacagtttttaccatctccaattataaaaagaagaaaggcttttcttcaattataacatttcataagagtcttcaaaattagtagtgtttaacaaaattataatatcaataatgtttctctatcagcaccaattcctatcatctctattaatgaaaaaatgaacgcattgaccggtttctgtccaaatataggatttcatttcagccctcaaatcaagcaagtagcaaatatcaacagaattaatcaacctccctcttcaaaaataaaacatcatactatcatcatatcaacaagggtctccttctatcccttaaagcatatcaagaaaattcctttccattctcaacaacaaaactctcatttgtattatagctcctatagctaggaaaacctatggttcagcagttgcaaatagtattaaaacggttaaacctctaagaaaaagcagaagagggacaatcattgtgccactcaactctaaaggctttgttttgatcaaattaaaagttggactctgaagtgtactttctgcccaaattcacaatctggccaatataggctcgtttaaattcctcattagattcctcaaaacacataaattcccacattaaacctcaaaattca

SEQ ID NO: 296738 - DNA, 3539 bp, Cannabis indica
taaataaaattgctgcaaagttttaatgatttacctgctcttcctgtgcgtccagatcgatgaatataagcttcaacatcacgtggaggctcgcactgatgaatgaaaatcaaaagtaagaaactgaaacatgtacaggctttcatgactatacaaagacagcagagcattcaaacctgaataattaattgaacatcgttaatatccaatcccctagcagcaacatttgtagcaaccaatgtcatgaacttgcccgacctgaaaccagaaagcgtgatctgcaaacaccaaagttaaataaggcagtaaggtggatatataacaaaatgtaaaagacttcacaaaaacaatattatcttcatgctgagctgaaacaattttctcaacaaaaagaaacttccaatttaatctaacctcgcgctgagcttgttgtatgtctccatgcaaagctcgtgcaccgggtagcaacccagaaagctcagatgcagaatcttttgtctcagtaaagacaattgtacggcccgcactgaatgtgagaaacaattatagttagtaaaccataaatcacaataaatgaaaacttaacataaaaatagctaacctgctataacagcgaatgatatctggaataagttgggatctggcattacttgaacaagggataacaatatgtcttacatttgtgctagccttcatcttttcgttaccaacaagatctgcagttttcttacttggtttaagaaacctagaagcgatctgaaatgcaaattagagaaattagtcacttagtttaaaggtgcaatagataaattccaatgcttcataaaaaagttgcattttatgaaaaataatttgcatactagaagtgaattccaaaagaccactgaaaattttggttaagaaacttacctctttcacccaagaaggcaatgttgcgctgaaaagtagggtttgaacttgagttaaatccttaacctggcctgtaagaacaccaaaagaaaaagaaaagaaaattaacaaatgcaattttatatgaaacaaaatatataaatagaagataaatgcttatcctctgtaataaagcctagtcagaacaagaagatttttagtactgaagaggcagtaaggtaccgagaataagttcaacatcatcaacaaatcccatcttcaacatttcatcagcttcatctagaacacgaaacttcaaagaggtcaaatcaagattttttctctccaggtgatcctgcgccccaaaaaaaaatacttgtcatcttacttattcagaagtacagagtttcatccgatgacagaaaagtcacatactacatatcataattccaggacgaagataagaaacaaaaaggtacctttacacggccaggcgttccaataactatatcaactcctcttctaagctgaagttcttgagaacggaaagctgatcctccatatatactgcatgcagtcaaccccacagcgccaccataaatttcaaagtcagcatgtacctaaaatcaagcaagaaaaggcaataagtgatggttaaaaagtggcactaagataaaatataaaatgagtatttcaagaacaggtcccatggactgcactgcacctgcacagccagctctctagtgggcaaaagaacaagaacactaggtgctttcccgtatccagtcttgcgtgatgatttagcaggcccatttgttagagactctatgatgggcaacacaaatgccaatgtcttaccctgcatataacaaagaaaagccataatgtaaatagccagtttaaacttttctgggtccaggacaccaccattagaaataaatcaaaaatcggtttacattgtttttaaagagaagctagctaggcaattaatattgcaaacagttttataacacagccacaacgtttgactgttccttcaaagtttgtcaattccttttgcacataaattgtacgaatatcttcgtctaagcaagacttcataaaataaataaataaacgcaagactgaaattacctgtccagtgcgagcgcggccaaccaagtcacaaccatccaaaactatatcgaaagtcatagcctgaatggggaacagtgcctcgatacccttctccttcaacttagccttcactggttccgatatcctatactttgagaccgcattaggatgctcctcgacctttgcttcctcaaccaccacctcttccaccttggccttcttctttttcttcttttcactttcaacctctccgttcttcaccttcgaattcgcggccggttcgacgagttcagagcttgtctcgcttttctcctcctcatcctcaacatcagaagcttttcgcttcctgctctccttcttgctcttagactccttcttagtcttcccggcggacaaagggtccgatcctagagtttccattagggtttggttcttcaccttcttctccttcttgtccttagggctggtagagaccatggcgtcaacgagacttatggaaggcatgtatgaagctttagattttctcctgctatggaaatttgtagcagtcgaacgctgctgcaggagaatgaaagaggagttaaagaggttagggtttttgaaatttatagtttaagcagcagagatcttcagcctttggattaataagcccttccaataccctggactcagccgttggattggacttttactctattaattaaagaataaaatatctaaccgtccgttattccaattctggaaaaaatatctaggctattgaaacgacaacgaaacttgaaaaacaacaccgagtcacaaacgacaacaaacacacatgacatatatattggcgatcatattgctgggtgggattttaaaaaagagtaatcgtaaatacataaatttaattatacattaatttttaatgataattatatctaaattatagttttagaatcttctaagtagttgacagattaaatattttagaagtactgttctaatttaaaatttagacttctaaaaataaaaaatataatttataattaatatgtttaaatattatcattcaattatatattttacaaaatactaaaaaattccaactatttataaaaattgttattaattccaatagaataaaaaaaaatgataaaaaagaaaaaagaatataaaaggttttaaaaaataataaatagcaataataaatagcaatatagttatttttagtttttttttttttacttaaaacattaatagaattagaaatggactttgagaattgagatggaagtgactaatgacaaattgctagccctttcaaagttaggtttattaaaattgggctttaaaagcaaaagtataggggaaataacataaatatgggattttttgttaccattttacttttttatggcagaaaaaataaagagaaatttacatggtatactaatttttgccattattttacaaaaatactgtcatgcgttattttttacttttttaccgtatttttttataagtttcatactgcagtatattgtgttaagttt

SEQ ID NO: 296739 - DNA, 1627 bp, Cannabis indica
cccatttttgagaatggtgccacgcctcgttccttaagcatctcctgtagagcaatcaaacataagtgtaaactgtaaacatttttcgcatctccaagctttttatgaggaactaggaaactacagcaattactatgtaggtgcccaagaggggctcaaacctctcagatcttgtagaagcaaaccacatgtctgaccatttgagctaccctcgtaagtggaaaaaaacttaaaaaactactgaaaaaggcattacagtacggaggacaagatatcctcctaataaaaccatattacaatcaccaaagctttaataaaaaaatttaccaagcaaacctttttattctagtagggccagattttttttcttgaagagaaaataaaaggctcaaaatagaagactgtataaatctgtcaagatacgaagttaaaaagaaagaaaagaaaaacgacaatgcaccacattaatcacacatccaaaccccttcaggtaaagaatcattaaaagattatttttccagagcagacaatgtactctgtttgtatatcattaaagtttcatccagagcaagaagaagaagaaaagtatacatcagaagaacttaaacacatcagatctccaagaataatatatttgaataaatttctagacaaattcaaattatctagacaactagagcagtttcattaacacaagtaaaggatttctgttaaaaaaacatattattgagatcactggtgtaattgtaaaggatgtctcctatacaggaaacaaaacttatgtaagtatgtataaacttaatgctgccagttcagtaaatcaggcattaatcttgactgtagctaaaacagaacagaacaggataccaaaatataatcctaatattacatttctttcaaaagtttgcttacagtgcattggggacaaaacatctaaaggaagcatgcaaacaaagaagcagctgcagacttaccttaaattgaagaatgcactcctcctttgtgggcccactgtctacatcttctgaatctgaagaagagtctgtcacatttccacctccattggcatctttaagtttatctttgctgttatcactcagttggcctttagctgtagcatcaactgccttagagccatttggttctgatgccattccagactgtacaggacttggtgaagaagtaacaggagctccaaattcttgcagcttcttttttattaagtctaaagcagacgatgatccttggacatttgggggtctaagagccattgcatcacgaccacctgtgttaatggcaggagcattcaaaattactggagtagattctttttctgccaatacattagtatttggcactgacaaggaatgttcttttggaatttcaacatcctgcttcttccttagttctgttacctcgtttggaatctgccagctacttacctgattgtggaaaaaacatcaaacaaattagtattgaggcttaccaacaagttatctctacagtgatactataacataagtaaacacttctacactgttaaaggtttagcaagaagaaaactgtgacaaaccaaccaggcaaccaccatttttctgtaaccaaaaaataaaatctattgttaccc

SEQ ID NO: 296740 - DNA, 3010 bp, Cannabis indica
attttaggttactatatatatactaaattaggcaaatgagagaaaagaaaggtgtattttcattccatgattgaaactggccatttattttaaaataatacaattgaaaattaggcaaatgagagaaaaaaaatgttttatataatatataagttgaaaattgttttgaatatatgaagaaaataagcagatgagagaaaagaaagattttatataacatataagtttatggggtcggtaaaaatatgaaagaaaagttttaatatatacatgtatacgtattagaaaagttagatatatttttttggaatttattttttattttcttttttttaaatattttatatttttagaaaatattaaaaaattaagagaattaatgatactaatgtggtgttgattcctaaaaagagaatccggatagaatgggtgacttaaggcctatatctctttgtaatgtgctctcgaaaattatcacaaaggttttggcaaatcgtatgaaacatcttcttcattatgttgtgtctccaaaccaaagtgcgtttatttctgggcggttaataacgaataatgtgatgatagcttttgaagttgtgcattatttgaagagaaaacaaactgcccgagatggataaatggcattgaaacttgatttgagtaaaacttacgatcgagtggaatggcattttctttgtgccatgttatccaagatggggtttgacagaacttgggttaatttaattcagcagtgtctttcttcagttcggtatcacattgttagtgggggtctaaagttgggacctattgtgccttctcgggggattagacaaggagatcctatttcaccctacttgtttctggtttgtgctgaaggtttatctgctcttatcagaagatttgaagagagaaggtggttacatgggtgtagagtggctaatagagctccgattatatctcacttgatttttgctgacgacaactatatttattgcaaagccacagatagagaatcagatgaagttcaacggttgttaagaatgtttgaagtagcttcgggtcagcaagtaaattatgctaagtcctctgtattcttttctacaaataccacagtcacatgagaacttttatttatgctaggatggggattcaacaagcgggggacaacagcaagtatctaggtttgccgagccttatgaccagaaataaaaatgcggttctaggctatctcaaagacaaggtccgccaaaggatttagagttgggataataaattcttgtctcgagcggggaaggaagttcttatcaaatcggtgcttcaatctttacctacttatgctatgaatgtctttttattaacagaggagatcagcaaggacattgagcgtatgatgagtaaattttggtggcgtcctaaagtgaaccaggacaaggggattcattggatgagttggaagaggttgggtagaggaaaagatgaaggcggcatgggatttaggaatattcgggattttaatcttgctcttttagccaaacagggttggcgtttgttggtgaataatcaaagtttggtagggagaatttttcaagcaagatattttccgtcgggcacctatcttacagctgtgattggtaataatccaagttacatttggaggagcattcttgaagcgcaatttgttgtcaaaatgggtgtccgtaagtgcattgcttcgggttctactactagtattttgagggatccttggctcaatgatgagcaacaacctttcattatgtcttctaatccaactttggttaatcaacatgtgtcaacgttaatgaagactacttgtagagagtgggatgacgaggtgttgttggatgttctttgtgaccttgattataggttagtcaaagctattcctcttagtcagtcggttgatgatgatttttggttttggtctaaggatagttcgggggatgtttactgtgaggtcggcttataatctgattcaggaaaataaaggttcccggggccaagctgataactctgggttttggcgttctctttggcagttgaaggttcctccgaaggtgaaaaaccttttatggcatgcgtgttccaattgcttacctacttgttttcaactgtctttgaaacatgtgcctattgatgttacttgtcctctctgtcatggaggggttgaaaccgtcctgcatatacttgtggagtgccctttttctcataattgctagcgggctgctgtaattccggactttccatcggttgcttctaattttgcaggctggtttgatgatggaattaaggtgtggcggaaagatgatcaacatagggctgccatgttgtgctggactttatagaataaccgaaataaagttgtttgggactcaaagcactcttcgattgaggaggtggtgtcaacagcttctcttaactttgtctcttggagtgatgctcaaaacaagtactctacctctcctaatgacttgggtcatgagcgatatgttgagtattggactaaaccggagttaccttatatcaaagttaatgttgatggggctattttctcggaagaaagtcgatttagtttcgggatggtggctagggatagcaacgactttgtgttggaggcagttcaaacttgttgttcgggttcttggggtcctctaatggtggaagcattgggtctaaaggaagctctgagttggatcaagaggaaaggttggcatcatgtaatagtggagaccgattgtcttacactcatcaatgatattaagaatgctaagtctttagtttctccttatggtttagtgctaaaagattgtattagtttattaacctctttaatttcaattgaatgttattttgttaaacgatctgcgaataggcttgcgcatgcttttgcgagagcttatcttttggaggttgatcgtattcttagtggggtttctttacctgcttgttattcttccttagttttggaagactcgttttgaataaagctttgaaa

SEQ ID NO: 296741 - DNA, 2373 bp, Cannabis indica
ttatcaatacaaaataaaatattatgtgaggaaaggtgtaagtataatacaaaccaaatcaatgtaaaagaaaaagggacatcccgctggttctctaactcagtctcgtactttaattgctctctaggagtatgatttaacaaagtctatagagaattgttctacaattgctcttcaccataacaacagctcaacattactcagttacccatggacccctccggtgtttgcaaccttttcgaagaagcagttcaaatatctcaaagcgatattacctttagtctgaaccctggggaagtcgatgaaccccaggaatcgaaccttgtactgcttggcaaaatcattagcaggtataaacttggaaaatcagccattcaaggctctttaaagctatcgtggcattccattaagcgctggagatggaaggagattgatggtggattgatacaattcacttttgctaacagggatgatgctctgaatgttcttgcgagacgtccatggtttgtctgtgggtctcttattgtcataatgccttggccctcctggttaacacctgctgaggtgcggttcgacaaaacacccatttgggtgaatgtggaaagcattcccccattttattggaatctatccaatcttaaagaaatggcttctaaagcatcccctgtcttcgaactccctcaaggcatagaagatgcggttgggctgagttccttacggttcagggctacgattgatctaaaccagcctatcttttctgggttcttcctcagacgacaaaaacttaaggatctatggatccagtaccggtacgagaaactccctaagatatgcttcaagtgcggacttcttacacacgatcaaaactcgtgttttaaggcccctacggtggttaaggatgttgaaggtaattactaccccatgtttggagcttggctcaaaaacgatgcccatgaaaagtcgactttcactactccgttggccaagtggttccaggactgggttcttcaaaagcaattgggccgtgatccagtccttaggaaccgaatgaaaatccacaaagccatccaacatggggaatcagctgaaattagagaaagtcggcttcaacttccggggaaaaggagaattgtggaagactctgagctcccggccgaggaatcagccaaccagaaggttattatccaattacccctggttaatcttccgggtattggagaaattgccccatttggaggtaataccaaaaaagctattctgccagagagaaaggtacctgatacactcacaacctcctcagtcacgcctgccaacgatggctccatgaacaccaagcaagatgccgttttaggggaagacaaaaacaactctatggaaagtcaccaaacctctaactcaaaagagcaaagtattcctctgaactctgagaatgagacacaagcgacaaaatctatatgtactcctttcaagaatccgaagctcaataaggccaaagtagacttgggcccctcttacaaagattctccacttggtacccaggcccgttgggttgcatctccctctaaacaaatatgggcccaacccaaaggaagggaactactcatgggctctctaactatagataaatatcatagggaacccaccctattcaacccaattcttgaaattgaagattttagagtttatgaacactcctctggcccacgaaagagaaaagcatctgatggcatactattccatcccctccccaacacagtcgaaaccaacttaatcactcaggagacttcaactaacgttcaactggaacttcttcagcctcctaacgtgacggaagacgttgataactcccttatcaacacggagtttcctccaattaatggagccacgggctatgatctgggaaatcacaatgcgactccaccatctagacgcaggggcaggccacggaccaaatctccactagtagatgaagctagtagtagcaagaagaggagaggcagaccagcaaagaataagcaacacctaggggccactcctaaggcattcaaatggcagaaaactacaaggaatgggaaagagcagttcaccacaattaaacatcactgggaaggtaactcttttgacctcaaggtgaatttagataaccatttcgtagttgtagagaaggttacaaagccgaacctgaactgtagcattactgagattgatgacaatgcacagttgaatatcgctgatctaaattgctcccagaatgtggattttcaatttggggctatggagacttgcccggaaaagtctccaaagtcgccatgaaagtcctcgcttggaactgtcgtggtctcgggaataccacgacagttcgtcaattggcgg

SEQ ID NO: 296742 - DNA, 3049 bp, Cannabis indica
aaatcactttcattgctatgttcagtttcctaatcattgcacttttactttcattggcttctatggggaaccgcaccacaataattgcgctaatacgtggtaacttctcaactgtcttggtgatactgtttataataatccatggcttttaataggtgattttaatgcttttctttccccatctgaaaatattgaggggctatcaataaatgacccttgctctttttttttttttgaactttcctagatacatatactcttaattccattcatggtcatgacagcccctacacatgcactaataaacattcgcatctcacccgcatacaagaacaactagattggggcctttcgaacctcacatggatatcctctttccataacacccaccttctccatggagacttcttggttccgatcattgagctttaatcctttttcttaacaaaattgagactagttgtcatccttcgcagcaacgtttccattttgataacagatggcttgccgagagcggatttgaggattgtctcagtcacgcgcggaatcaaattcatgatttttagagccatgaccatatttccaatatcgctaacaagcttcaacattgtgccctcactctatccaagtggcagaaaacactagggcctcccctacctcgacaaataaaaaagttcaatctcaacttcaagccgctcagaacaatccccaacaatcaaattcccagattactcattgtcaccaactctaagaggacctcgatagacttctctataaagaagaagaatactggcaacaacgttctcgcattacttggctaaaactcgaggacaagaacactcgctactttcatcaatttgcttcctctcgccgagccaaaaataagatctgctccctcactcgccttgatgactcaattgtcactgatactcagggcattttgacaacaattgaacaacattttactcaactatttaccagcaaacaacctacaactgagcaaatggactatgtcctttctggaatctctaacagacttaccgatacggaatactcatgcctaaaagcacccttcacggttgatgaagtccagcaagtcgtattccagttggccagtgataagtctctcggccctgatggcttcaatggtacttttttccaaaaaaactagcatttgcttagagctgatatggtgcacgctgttcttagcttcttgaataacaatgtggatttatcgactatcattaataccattattgttcttattcccaaaaagagccaccctcaagccatcacagattatcgaccaattagcctttgttctataatgcacaaaatcatttcccataccttggtcaatcgcctcaaagtaattctttgtcgaattattttgctagcccaaaatgcctttcttcccaatcatttgatctttgacaatatcatcatcgggcaagaagtcactcactccttaactcatcggaaacaaggtaaggttggctggatggcattaaaacttgacatggccaaggcttttgaccgagttgaatggagcttccttaggagggttatggaaaaattccacttcccctcaaattttaccaatcttgtcatgtcatgtctttctgccgcttccttctctttctccatcaatcagcaactgtgtggatccgttatcccatcccatgaaattcgtcaaggagatcctttttccccttatctcttcctattatgctttgaagacctttcatcgctcataacctaacaagtcaatcaacgtctcccctggaagcatactcttggccttaagatttcccggactgcaccgataatctcacacctctttaatgctgatgacaacatcctttttagtgtagcttctcccatcgcagtagctcaaatcaaggatctccttcatgcttacaacctagctttgggtcagctcgtcaactacgacaaatcatcgctctacttttcaccaaacaccactgaccttgttaagagtcagattacttccttgctcaatgtgcctattcgtgactctatcgagaaatatttgggcctacctcaatcttttggccgttcaaagaaagaagcctttacttacctctaagatcatgtgtggaaccatctaaacaggtggaactccactttcttctcaaaagggggtaagaaattcttctcaaatcggtggtttaagcgataccatcctatgcgatgacttgttttaaactacctcactatttccaccaaaagctggaagccatgatggctcaattttggtggggaggaactgaccacaccaggaaaatttattggaagaattggccctccctttgtaaatctaaatttcatggcgaccttggtttctgatcaatgaaagctttcaatcgagcattgttagctaaacaggcttggcgtattcttcaggctcctacatctcttgttgcacaacttctcaaaagccgatatcacccgcactcttcatttcttgactctgggaaaggacatcccccttctcttgtctggaatagcatctcttggggaaaatctctcatccgatctgaattacgtaatattgtagggaatggtgcctccataaatatttacaaggatgtctggattccgggatatgggaaactacactatcttcagccatcacctacccttgacagtaaggtctccagtctaatttccactaacagagcttgggatacacaccaactccaacatcttttccccagggatgtgtgctaagatatacaatccatccccctccttcaacctctaggtcaagatcgactctattggttccatactccacatggatcatacaccataaatttgggataccaccaagcttacaccattatccaccaatttgagccctccccctccattacaactaaacaagaaaagtggtggaacatgatctggaacttaaaggtacccctcaaaatcaaacattttatttggcgtgtttaccatgatgctttaccaactagtgttgtaatatcccgaaaaataaaataatatttaaatagacatattt

SEQ ID NO: 296743 - DNA, 2466 bp, Cannabis indica
aaaaaatcatattttattttaaaaattatatacaaatatattttgtgggctgaatagctccctaggccccaagtggatccatctctctgcccatactagaaaggaccatacatatctaataattaggtcgacctagctacccttatcataataaatggttgttccttaaaaaccctcaaaggaattataatattaaggccaaactccaatttttctctttttttttcttacaattgttgacaatttttagctcaatgaatagatcagaaatattatatttaagtctatataaagataacaacacaacaatgttttttttaccatgtaaaaataattaaattaataatatcaataacacatttagtttcaataaaagtactagagctcatgcaacaagaatatttaatcagaagtacttatatatatatatatatataataatgtctgtcctgccattaacaatgaaatatatgcgttagattatgaaaatgctgtaggggtttattagtaaattataattggtgagaaagtctataaatatgtagctgtgtagttcttattgaatatagattgaaaaaatataactttggtttaattgaagattgatactgtcttgaaaaatgtatttgaagtttagcactgactcaaaaagtgtatctcgatacaattgattgtatatcgatgcttttattaagagacagtgtcaatctcccaattaaatcaaagttgaatctattttctcaatctatattcaataatagttacacattacatatttataatttttctcaccactcacaatttactagcccttataacattttcatagtctaacaatcaagctatatagaaagaatgagtatatatatatatatatatatgtgtgtgttggtatgatgaggatgattatgttcttcgtttgatcctttgttgattactgttcggttttgaggaagattcctctgcaatatttgtgctatatttatatatctcatttgatctcatctcaccatatcattgtatatatacatactcatctactacggacgtacaaactaataatatatatgcatgcttggaagaaaagcttataatgtatacacacaactattttttttctattattcatatttgtatatggtattaattagagattgaagaaagagaagagtagcagagactactggatgcgcagtaccaatatttaataccattgttttttagtcatttgatttgtacgcaacacacacagatgccttttctctccctctctctctttatatatatatatatatgatatatctatatttaacacgtaaaattatacttatatccatcaattcatttctacattacaaaatatgatcatgcaatgcatgatctagaataatattccattattgttataaaattaattggaaataatttattagggttttaaatattaattaataatgaaataaaaggagaacaattaatatataagagtgatattattaaatttaaaagaggtaaatcaaagagaggcgcacgtgcgtggggtagagtgaaaaatatgtacaatattatatgtatgagaattgagagatagagaaacaaaaagaaatggattggtttattactttgcttgtgtaaatcatctcagagcccacacacacatacatgcatgtacagtaataataataagtacccttcttattttctaaatataaaataatagagaaatactgaaagctagcagcagtacttaattagcacctttatgagaggtgtaaataataatataattaattttaagaaatatcatataatatacagtttgatatatctggcttaattagtaattagtataactcctgcacatataccatacccatttgccaaatatatgtacaaagtacatcttaacatgccttaatattttctacttttaactctaaaatattctctctctatatatatacatacattattactattattattccaattcccacaagcatattctacttcattaattaattgatgatatgagttgagacttgagagaaatatatataatttatatatatggcagcatgcataattaattggttgcaccacctaccttgtcaacagtaatacctacctacttctactattaatattactattgctattatctatatatatattactattcatcaactctaactactattaagtattaatgataataataataacttacttttctacttaattatattaacattcaatttttaaaaaaaaaattatattaacattcatttaaacaaaactaaatatatattgttgtaaaattacttcactccaagcagagttatcatgattaataacagcaaatactacaaaaaaatcttatttctagtcacaataaaatttgtgattaaaagtaaaaaaaattgtgactaattataaaacatcattcttatgttatgactaaaa

SEQ ID NO: 296744 - DNA, 3513 bp, Cannabis indica
actttctgcacacccctaattatatattttaattgtaatttattattatatatttttattttaattgtagtttttctttttctaaaaataaataaaatagtccaatttattcttaaaccaaacacatgattactttcagcaaaatctaatcttgttcagtccaatcgagtctaatcctgcatgccaaacgggccctaagaaattaataaagtttgtgccagatggaaatgtaatagtttgttgctagtgcgtgctgctgttatagcagacttacctttccctttctaatgtttctttggttgcaaaataagaaacaggaggatactaaaatagtcatagtgtaatcactttataaccttaaaaatattaaaggtgagattgtaaggaattattaaaggaaaacactaacattcatccacactacaaaagacccttgtaacaatataaatcaatgggtagttatcagcagcatttaaggcactgagaagacccctttttatggtttatattcacaaatggtatcgatatataaatgtacagccaattttaaagcaaagtacacactgcataacttgctatggtgaacaattcatcctccacttccgaaatcttctttaatctaattttgaacctctcaatattgggggccactagcttgtaagattcggctcaaggcaggacttggcaagccataataacccaggatcgtttcgcttcaacactagataagtttccatctttcccacttcgtctgacacgagatcttcgtagaagccaatcgcaaccaaaatttctatggcagctgaaatcaccacaacaagtagttaattatgtggagaaacagttgcagcatgaataatattgcaagaacaagaggaattcacaattagatcctttccagatgaaggaaaatcgaacatcctctgtttgaatgttacttctcagataatgagtgcttgctaaagtaaaatcctacaggagttaaaatacatacctttgtagttcgcaatattcctttggattattggattggcctgcaatgcaatattccatttcccagtcaggatacattataatgaaacacctaacattgcaaaatcaagcctcatgaaaatgtaaaacaagggtttatatactagtacctttcgcagtctcctgaatttaatctcttctggatgttcaatcacattgctgccagcagttaacaaccttttagtaaaactatattatatcataaatgtgtaacaatatatgtacaagctgatacggaaaagttaccttattatcttaaatagagtttggagaactatagtagcctgtgattggcctatctcagcccgcagacccttaatggccttctgcaaacgaccacaaagagctgcaacagggtcttgaattctttgtaattcttcatcgtctggatctggttcgtcaatttgcattattgacggttccactgattgcaccaaattatcatcaggatcaggttctgtgagcatcgtactatcttcctgagactcacttggatcatcttttatataatctatgttccgatcattactaattaaggatacattatcctcaggtctcctaacgtttccatgttcaaaattatccatcttcacttccaaatcatcaggatcaggttcatgaatattcttctgtccttgtacattcatttccttagagtgaaatgttccaggttcagctacaatacaatgcttcaaactagtttccgattcatcaggatcaggctcaaacttgttctcatggccagaataatcaggatcaggctcaaacttgttctgatagctagaatcatcaggatctggctcaaactcgttttgatagccagaatcatctggatctggttcaaacttgttatgaaggccagaatcatcaggatcaggctcagacttgttcacaaagccaaaatcgtcaagatcaagctcttgataaggttttgaacaaacctcattcaaactacaagtattcacttcttctaccccaacattcattctagtgggcaagccagaatcatcaggatctggctcttcgtggacttcagatattcccagactataggtggaagcattttccatacggcgataagcagcagccactgaagccatgcgagcattttccaactgatccgaaacatttcctccaagcttttgggaaaaatgactacctttttcatcataaaactcttcttcttcttcaaaatggtcagaatgcctcactccactcaaggtgtgacttctagatcttgtccaatctaaactatcagcttcttgggtaagctacaaaaagaacaaggatagatttagagtaatccttgatgaagcctgtaatggaatttagaattgtataccttgaaagaaacgatgcaacaaatcacaaccatacctgtctatttagattaaaaaagtttgcatcatgttcggagtacaccatgtgagcctgaaataaagataggaacagttaagcaaattccaaaacagcaggtgatgcatagacagcataaccttttgcctgcatgtaccagaacatgtgcaatttgaaatgcacacaatcacaatttgattaaattatccttgcaagttgttttctatttgtgtgtgttaacaaaaactgagcttacaagttcatggagaagagttttcttgatactcccatactttctgaaacccttcaggtcatcagttcgaagacgtaaagatatttcctctccattattctgcaacagcaacaaccaagaaaacatggagcaaaatgcaaaaaaatgtaacataatattttttttaaaaaaaacaagtcaggattataccttgttaaagccaagtacgcattttggacttatgcccacatagccaactggagccatttcagtcataatccccacacgccaacgatgctacgaaaaagagtatcatcagatttgacaggcaacattataaaccccccattatatttgtttatatttgtttatgttacatttattcttagaatgcccttttgttacaaaaatatggtctacaactatataatgagttttgggtttcttgggtgctgccctggagtgtagaacaggtcttaacacacaagctgattgtaggcaagagaagagttattttatggaggacatccatcttggcattgttatgggcagtatggctggaaagaaacagtagaatcttcgaggggaagatcagctcagctgagatactttgggaaaatcagattgtggactgcgacttgggtctatagaacaaaacattttgaggatctctctttcctagatctgtgtcgagagttttttttttgtatgtattatattgatatggtgtttctttgtgtcgccttttagtttttgtttactacagtttttcctccaccacaagtgagggtattaaataacatagcggggggaggtcggtctaggacaagcgacctctttctctttttaacaaaaaaaaaaaaaaaaagattgcaacattctagaattaacac

SEQ ID NO: 296745 - DNA, 3571 bp, Cannabis indica
attttttaatttttttaaataatcgtggaaataaaattgtgtcatgtatacactgtgtccagtccaacatgacacttaacacctaaaatagacggaaagggtaaattgctaacagaatccgagtattgggaattttaccgctcaaatttaggttttagaggttaaatgaaaccaaaatgaaatttttggaaattttgccgctatttaacttatatataaatatgaatatgaacatgagtaccctaaaaaaaatataaatatgagttgtaaaattaattcaacatcctaacatggtgcccaacatccttagagaattaagtaatagcgagattcacataatttaaatattgatatgtgaggcctgatatttcatttagactaacagccatatagggtgttaacatgttggtgtgaaattgagactttgtttgtgtactctaaactaaaattttgcgtgaaggttgttcctaaactaaagatgattgatcattcattcaataatattatatatttatatataggtgtttcattcttgcaacaatgaagatttcagtttgagctatgcttgattatccaaaattgggatttcccacaagtttaagatgatgtccctcgccttaaaaccattcctagtaagatattgcaatcctagagactaaagagcatatataatcttttgtttgaattattgtttactattataataccatatatctactctgagaactgtgacttgttacattagaataaatgacattcatataacacttagaaagcaagatcaaactttataaataaagcatgtcacttgagagtttttaagtgatcattgcctagtacaaaactaaaacccaagtgaaaacaaaggaaactcataataccacaactctctaagaaaacaaaacaaataagaaaaaataccacaaaaaagaaagtaaaaacaagcaaaacttcatggtcttttaaccttctgctagattctaagtcaaattattcttgaaacaacagcaaagaggctgcaataatggcattgtcttcaacagaatcatactctctgaagccaacatttcatccaattacaattgcatttatataagataaatttattcccacaaaagaaaaacacatcagtttaacttccgtacatactcatgtagcaaaagaaataacatagagacaaacttccccttacacacaactatgcagatactcactcagtttctgatcatcatctcccttagtcttgttctagagatgtaaacaaaccatgccaaacgcgtccttgggatcaacatttccccaacagagactccaataacaagcccactcataagtcctgccaaaatgaatttccaatctacttcaatcccagaatcagaatcatcatcttcattggaagttgatggtgggagcagtgagtctccacatttctttgacagtggttctccgcacaatccttcattaccctcaaaagagttgttctcaaatgtatggaattggttctctcgcggtataagacctgtgagattattgtaagacacgtcaaacttttggaggaattttagatcagttagttgctgaggaatctctcccgacaactggttttgagaaagatctaacgattccagctctgttagtgtccccaatgatggtggaatgcgtccgttgagcgcattgtttgagaggttgagtgagtaaagagccttgaggtttccaatgatttcaggaatttgaccactgaaattattgcttgatagatcaatcacagctaggttcatcgggatctttccgtagtgtgttgcaacacttttcaacacaaatgttgttgaataatcatactcatgaaatccactaccaaagacatccgtgtagggcataaattctagtgcattcatatatgtcaaattggtcatcctaaaatctttcatggcattccaagataacatatattcaaaaggaattgcccctgtgaaataattgtgagacagatcaataatttgtaacattgcaaactcactcgtagtattttgaggattccctataactccgtgaaatttgttttccctcatcaaaacaactcttaattgaggaaaactccccaaccaagtggggaacacatcactgagttgattgaaagagaaatcaagatactcaagattcatacaaattgtgaatggttgatgaagtttcccttgaaaatgattgtcactgaaatctaccattcttaacttactgtccagcttacattgaagaggaatggtgccgtgaaaagagttgtttctcaaattcaaaactaacatggagtcactaatcccactgcccgaacaaagtggaaattgtccactcaagttattatttgacaagtcaagaaccgaaatagaactcaaattgcatatcggtgagggaatttgaccgcttagaatattgttagagacatcataatgtataatagatgatggtggaatcagaagttgtccttgcaacaagttagattgcatgtcgaaagcacgcaaattagaccaaggtagaatagttgtgtagttttgaaaccctgttatccagttgtacgctaaagtcatcacttccaagctttgaagacttgagttcatcagatctttaggaatttggccatgtatatggttattagaaaggtccatatatacaagattattttgatgaacaataaaatcaggaaatctgctcaagttacaagaagccaatgatagatactcaagctttggaagtgtggtgttaagctctctttttctttcttcattgagtaataatgaaatcatattgtcgcctagacctagagtaatgagatttttcagtttgaggaaagaatcaaacttcaatgtgccacttaaactattctctatgagaatgagatcttcaagatttttgatattggacaatgatggtggaactgaaccagtcaaattgtttgaagttaaaaaaattgatgttaattcagtaagatttccaaaccacgaaggaatgtgcccagagatatgatttttttgtaatgacatagtggaaagtagggtgagattttgaaaagaagatgggatgtaaccggcaaaactattatagtcgagactaataaagttaagttggcttaatttacctattgaagatggaataggcccatacaaaccacaatgcagtagttgaagctgtgtcaaagaagaagacaagtttgctaaagaatcccctagttcatacctcatatccacataatttagtacaagagtactcaatgtagttaagtttttggccagtcttccaagattcattttttgaagtttcaagctcgaaagtagttgaccgttaccatcaacgttacctgacaagtaaaggtaagacaacttagacaaaagtgaaagttcagatggaatctcaccttggaagaaagaataacccaagtgaagaaatgttaactctgaaaatactgctatggttgtgggaattggagagaaagtgaagttattataaccaagatgaagaatttgaagatgaacaaggtgaaagagagtgttgttggagtggatagagccgtagagacaagaac

SEQ ID NO: 296746 - DNA, 9147 bp, Cannabis indica
ttattctatgaaatcgatacacatgaatcactattttctacaatattgaaatgcaattctatcaatataatgccatgcttgacatttacactcaataatagcttattgctatgaaacaggaaagttttttgcaaaagtttgagctcccggaacctgctctctgtgttggaggatatctgctagttgagcttttgggcagggtccaaaaacaagaaatagacgacttatattatatctggtacacaatcaatatgtttcgtgatttgttcgtttacaatttttgttcttagtgcctaaatctattagtttccaatgaagttattccagtgcttttcattaaagcttctttagacgatagagtaatattaaggtacttaaacataagtgtaactttagatattgagatattgctgatttgctatatactgcagctaattttgcatatcttttcctaatcacatttttcttttaatcttttacgaaccatggtacagtattgctcatgttcaaatcgttggaagaccactcttgcctacttttgatgtcgaaatgcatgaaccatctggaaaatgcttactgaagcattattcagaaacggtgagtctttcttaatatgtgagtattatgctgggagcatatggtgttgagtagatttcttttgtttacatgcttggatgtgttttttgaagataacaaactcatgtaaagtcatgtccgagaataagtgggttaaaatagaaatgagaactggaatagatgattagtatacaactttatttaaggctgaacgatcttttgttgttgttttattcttccttctttttcctttgaattaatctgagttattacccaaatctaggaaattgagtgacagctttggaagtatttcaccatcaatccggcaagtccagcctctccactgaaactgttactctgtgcaccacaaatattgtcttatactcgatcaaagttgcagaaagggaggttttttgattgccaacgaaagctatttatatttattttagacatctgtagatcttccttaataataatttttatgatttgcagatgtatcattttagaagccaaatttcaattaattatgaataatcatacaattagtgtccagttagtttaaccaaattgaagtattagacctcgaaaatgggaatattgccacgattgatgtctgtttttgacattttcagaagcagtcgaaatgttaatataaacaatcggaaaaggcaacattcacagataattagtgaatagcgtatgtaaaacatgtaaacatgttaaatacgaaatctgtttgttcttaggtttttgtccaatagattacacttgcaagacttgggcgacaaccaaaaaaaaaaaagaagaagattactaatgatcctacggaactactgaagtacaagcgggccaagtcaccacaaattccatactttaaaaattaaaaagaaaaagagaaccataataaaaggggtaaagaaagcagctatctcaattgacctgtacaaagatatattatgccccacttgtgcggcctggatcgccaataattagaccaaattttgttagtcatgccttccagccataccccatgttatcgtcaagatcattgttgaaaaacccgttttctgtgaactcatgggagatgtcggtcgtgatatctccttgcaagtgaagattctggggcaactcgggtgttcgctggtggaatccattgttaccaccagctgaagtgtcactgtttgatgcagctttaaaactgttactcctgcttgggggtgcgggtccattacttcctgctacattggcagttgtagttgttgctacagctgtggccgctgaagtgttacccccataacttgaaccattcctcaccccattagcatttcctccagaaacagactgttgttgtaccactccactgttagacgacatctcctgcatcagttgctggatcatctgctgctgctgcaaggcttggttgccttgaggggtctgtggatggttctgttgtagcatgttattagcactcaacgagcgctgctgctgctgcagctgctgctgttgtggaggtaggtgggggctagagtaaccactagcagatacgtgctgcatggatcctggtattaaagaagcagccccttggtaaggtgatgatggactttggttggaattgttaaaggatgatgatgcctcttgttgtatggagttgggatttgaattcatagagtttgacctcattagtaaattctggtaattagttagtgccatagctgcttgtgctgaaccacttaaagcccctcggtttaccatttgatgattgttgttcatttgattatttaatccaggatgcaatgccattagcttattaagagtattcctgtccgttggcataccctgaacactcgctaactgctccatttcctgcatcttttgcatttggagtttggcggcactagaatgtcgaggataattctttaacccctctgccaaaaagtatcaacgaaaaaatccaggcaaactactgttagaatcaatgattccaatataatataaatatatataaatcgaaagtgaaaggaccagcccttcttccaaagttaaacatctatatcgagttgaaattaagactgagcaaatgtttctaaaacagtcgattcaaatttaaggactccgttgagggaagaaaaaggatctaattctatcaggaaagagaaacaagcataggtcaagaagaaagactgcaatttgcatgtacagccatgatctcttcaaagtaactatcgtatctcttccacccaaacaaaaagaaaattgtttaaatatatatatatatatatatcaatatccctatatatcttacgagttacaaagaatcgatataaaccacatcaaaagaatgaaactttagaaaaaggaagaggagtttaccaataggcccaactttgtgctccccgcagaaatcaatcagatctttcatactattcacgacctcagagatctatttaaaaagtcatcataagaaagcctcaaggcaaaatgtgcacactaaatttcttgagcatagaaataaacattgtacctgcaaacacctcacatatcttttagagaaacccaagtcgttcagtgactgtagctccaagctctttgccagctgtcgtccagctgatagtaccctgaagtcattcaacattaatttcacccctttatacaaagtggatcacaacaagtttcaaacttacaactgcagtctgtcttacgatccaaacaattgaaacaagagtatccaagagctcagccaaaagtaagaaagaataatgtgcagaagcccctaacaggatattaatcctatttaacagatcagcatcttaatataaatacctttttcttatctttgaaaaagatgctcaatcgaataaaggcatggtaaaaaatattggtttaataggaataggataccttagacgatgtctacttgttgttacaactccaagtgtttttagatttctgattttatgatagttactaccagccagagaaagtaataaaaagatcttctagctttttacttagttaaaaccatcactcctaatgaataaatgaatctctgagaaaataagcgctcatcataaatgagaaaatgaacaagaggaaaaaatgattcactatctcacatgttgctgttcgtttgtaaatcttgctgagaaaccccatctgatccactttcagcaattgtattttggcacttctgtgcaacctgaaccagctgattcacctgcaaaagaaaaataaaagaatattaacagttgttaattcttagcaactcaaatatacaagtaaatatgagttcaaacaactcatcccaaagtctttttgcgcaaaatgtatacctgcggtgcaaccaaccttcgaggaagaagttcttcatggcgacgagcacaaaactcccaagataagatctggaaatgcatgaaatcagcaatatgagattacatcggagaaataaagtaataaaacttaatggcaaagcctttgacctttaaatcttgtgtaaatatgatacgaagtcggccctcacgaacaacacgaagctgctcatacacactttcttgtactgcttttccgtactccaacatcattataccagttggggatctactttcacgtggcaagtccaaaaaaataagctcatcaatgactccactgccaaacttaatctcattaagtctagggagcacttcagacgttgcctctgcaaataaaatgccccagcaaaaataaactcagacaaaaaaatctaataaatttttggaaattattcattcaccttaaggtcaagataccaagctaaacaaaacatgagcaaaatattgcaacaaatataagaatttaaatcggttaataatgctaagaaccatccttacaactgttaccctgctatgattcctgtttgatgttcttaaataatgatcttataatatattacattttcttgtggtaagaaactaacaagtggcagtctaattttcttaccaaaaccctttccagatttagaaccacaaatgtcacactgccaagcatcctgaaaaagattttaattgttataatcaccaccacataatttacataagtaagataagtaattaaatcacacacacgcctcttttctttctctctaactgtctctcttaaccgaaaaaaacaaaatgcagccagagaaacaaactgaccatagctgcctggggaaacacaccaagagcatggtgcccaacattttcatataaagataagcaccatctcttttttgcacgaggagagtagtactctgcaacaaacttcctccaatatgcaatagtattatcctgtcaaatacaaatcatcttaaaaactaattacgtaaacaaaacaattttcaggctagaaaaaataaacatgcaagttaaattttttgttagttaattcaggcgtgatatttttcaattaattggaaacaaaaagaatctgaataaattaaattaaggaactcacagctggcctttgccgctgatgatatagatattgcatcagtcgccgagaacatacaccagctacaccaccatccaaacggccgtttaagttcctagattgtggctgctgcatagcttgctgctgctgcagttgcctcaactgcatctgctgctgctgctgctgctgctgctgctgttgttgttgttgttgttgttgctgctgcaattgggctctctgcaactgtggcatagactgcaacatctgttgctgttgccgtaatctctgctgctgaagcaaagcttgtaactgtggattgcggccttggaactgcatggagtcctgtctttgcaggagttgctgtaacacctgatgttgcagcatatcttcctgctgcttcatatccaaccggggtttcttttgcacctgggataaattatttggatcttgaaggaatgatccaggaaggcgcacacccattggaagtgaaacttgaccagtttgtgaagtgggtaatgatgtagcactcgttgctccttgttgatgctgctgactttgctgtacttgttgagcattatgatcctgatgagaactctgttgcactacagatgatccatccataaccgatgacccagagatgctaatgttatttgatgaaaatgacattggtgatgctggtacgcataaatatgactctgtattgatgcttgcacttctctgcaaatgtggacctcctgaaagtgcagaatttgcatctgtgaccaaagaacctgccccaacactaggaccagaacttcgcgacactgttcaacactgcacttgttcactgtacccagaaaccggacccaaattcgaacgcccagttccaggaattgaattagaagaattcgcgaagggatgagctcaagtgagagttaacaacagcttgggactgcccgtctccttgaaagaaaattccagaacttgaggaagattgtgttagccctccagccacccgagaaggcaccatgggaggcaccgcccctggatggccagagtctaaatagctctccagagccaggccttactagtgttttttacaagaataaatatgctcaaagccactgaatacaatacacaagcaaaacccacataaaaaaatccccaataacagcttataaatacaacatctctatgtaaccaataccaacagaaaataattttcgtttagtgtttacttccaattcaccaaatagataatgtcaccaaagaaagtaacactattacaaacctaatggcacatactacccactaatctttttgagctttcaacaatttctcatacggatctaaaataaacgaatatgagcacaatcattagcagggggaccatcgaatctaaaattagaaactaggccatattctaaaacagctctaacccgcataaccacaccctaaagaaaacgcaaagaagagggaacaagccctaagcgacaaaaaaaccttgatttttaaacataccccataaaaccctaattttttcacttacccagttataaacattaagtgagcattaacaaaaaggctctaaactgttatcttcgaaagtagaaacgcaaattacttcactacacttaccattaagcaaaagaaacccaggtttggcctaaactttatcctaatatccaagaatcaaagtccaagatcgaactgaaagcagctaaaattcagcagggaattacaaaaatccccaaattaaacacaacccaagttataaacaatcaaaataacactaacaaagcatgaattaagatcaaaaatcaaaaagagaaaaagaaaagcacaacactaaagtttcaaagtggtagagatcgatcggagcagtccaagttaataaaaggaatttagtaaattaaataagaagaaaaaatggagataaaaataatgtaggaaggtactaaccatggaatcgggagctgaaaaaagcgaaatgttgctttatttttcttattttggggcttaattaggaaactggaattggaagagagaagggtagaatttcgggtaggctgtttatatacctagcgggaattgcagtgtttaacggaccggttacagccgttacccaaccctacagttaccggttacttcctgtaagaatgaaacgtgtccaacatctaggtcaggcacatagtcggtgaaagattgctcggtggcagtacaaaggacgatgatgacgtggcctaatctgatttgttgattcattggaacgggatggggtttattattgacgatcgtactcaaatactgattagtcttttgcatgagtttggatccggtgcatcgcattacctgcgacccaaaaaaagaaaaacaatcaaagtacttttagtagagaatgaacgctgaggtggctgattatgattggttgaaggatgtgatatttagaaaacgtggggttttgttttaggctttgggctttgggctttaccttagacgtagtaagggttaattaggattggatttaggataaagacaggccgtcagattgacacgtgcgatgtaaaacaaaggcctcgcacacgtgtgacttcttctacctctgccctcgaatctaatcaaaaatattgttttcaataatttctttctttttttttttgggctggtgcggctttagtttaatatatatatagatatatttttatctcgtaagtaatcatatatatacaaatcgggaagtttttgattcgctaccagatactctaatttcattccattttttttttcttttttgaaatgcataaattgttgaaaataatactttccttttttttctttttgataaataaataattattaattgatattagtgtattttatatgccttgacttttatttaataaggtcaatattttatttttggtatccaaatttttgaattaatttcattaaattctattgaatatttatatttatgaggctaaaaaaaaaaaattaagcttaggaggtccaatgatgcatgcgttttttaagagatacatgtatgtacgcaaattttgattatccatgtgttgatcatacttaaatggccattaattacatttacataaatatttatttgtatatatattttatgaattccataggcatgcaattattgttattttctttagagaggcttgcaattttttagtacaagaaatatattttaacatgtgggttgcttaaacagttcctcagtcaatatttacaaaccaatatataataataattgtattattttaatattttaactagtcactatcttatttttctttttaggttttttatatttatttatttaactttttttttttttgataaattattgatgagtacccactatctatttgaatagattctcttctaggcaattaacatttgaccatcatatctattgtcagcctactttagggggaaaaaatgaactacccacaaattaaaaattctcattgcattattagttttatattattgtatattatatagccctcattagtctttaatataattaagtaccaaacctataaatttgttattatgcttcccttattttaattctaagtatttattttagtaatattctaaccatgttttaacaccctattaactcaaacacgcccactacatgggtagtttaataaaatgaatagcattagttatctggcatcttatattaaaacacaaacaaaactacatatccacctctttcatatttaatgattcctcaattacctctcatttttcaaaacatattaaatatatatatttatatgaagaaaaaagagtaatttacggcgataatacttagggtctgtttggaaacaactgtgtaattactatgcagtgtaattactaagatagtaattacactgtatagtaattacattgtattttaaaatacaaggtgtgtttggatgtcaagtgctaattacatgtgaattcctaatatcatgtttggcataatagttagtaattacacagtaaattaatattataatatttaaaaataaatttcattaattaataatatataaataaataataatcttttcataaaataaagtcaaaactataacaatttagtagcaaatatttaaaataattttt

SEQ ID NO: 296747 - DNA, 4267 bp, Cannabis indica
tttccatatcaagtttaatcgcagcccagccaattttacccgaattcctagaatgaatagagtgaataatctcattggcaatgagaatgttatcaaagatgtgacgaccagtgaggaaagcactatagttattagcaatgacatagtgaagaacactcttaatgcgatttgccaggacctttgagaggcacttatatatggtattacataggctgataggccaaaaatcacgcagggttgtagcatttttcttttttgggatcagaaccaaaatagtttcattaaacagggaaatatcaccattatgatttaggatgtcaaggacagcatgacacagatcagatcccagaaggtgccaatgtttttgataaaaaagagagttcaaaccatcagggccaggagccttatcaccagaaagcctaagcatagcctctttgacctcatcctctgagaaaggctcatccagaaaggagatttgggtgggggagaggtgattagtgacaccctggaggatggtattgatggcaccctggttaactccttgagattggaaaagatttgaataaaaattgagaaactgggaaagaatggtggaggcatcattggcaatagagccatcaggaagggtcatgcttctaatgagatttgtctttttcctgatagaagctttatgatggaaaattttgtgttcttatcaccagccttaagccaatccacctgagctctttgcttccagtaaatttcttccttctgaagaagagcatccaatttggattggagggtgtttgtgtgagttaaaatatgaggattaggctgagtgatgttaagaacagggtgaagctcatgttgactgttggcaatttggctcttgattggattttgagaagcactccaatccttaattgccgagatacaagtggattatttagcaagaaaactttgaagaggggaggaggaagaggttgaggtagaaagaccccaggaagattggatagtggtagaaaacgaagcatcagtgagccagtgattttcaaaaagaaaatgagtgtttctgggaagttgtaagtctatcctccaattgaactttaagggctctgtgatcagacccgtaaaatcccaagtggaacagagaggcatcagggaacagattgttcgaagactggttcgccatgcaccagtcaaggcgctcaaggatgtggccatgcctccaagtgaatttattacccgagtggatgaggggtaagtgtttaaacttatgcagaaaagagtgaaaattgtgcatagcatgagtgggaggattagtattagaatttttatcactgagagagaggtaatcattgaaatcccttataactaattatggcaagagaggagcagtatcgtaaagcctatgaagtagagtccaagtaacagatttattagtaggataaggagaaccatagtacccagtaaaatgccattttatatcattaaaatacttacaatacaatcaatatgattaagggaataagtagtaataaggacatcaatacaattgttccaaaatagtaaaagtcctccccctaaaccactcctaggcacttcaaagacattatcaaaatggagctggttcttgagatatatgccacggccaggtttgaagcttagtttccataacaaaaaacaaaatgggtcggtgttgcttgaccagcagggagaggttacggaatgctcgagagctccctaaacctcgagcattctagctaagaagactcatttttctcagtggggtcgcgaagcgacacacgccgtttgatcatcatcggacatggaagggaccaccgcatcgtcgctcgacacagctcttgctctcttgagcatgctacggactaaaccaccaatttgggcagtctgccgagtgaaaggacgcctaaatccagtagaggcagcaaaagtggaaatgaggcacggttcattaatggtgagacttatgtttcgggtaaagttgtggatagttgggcgaggagggcagggatcaggcatagcaatgcctttacctttgtcaatgtgtgttatgacagaggttgtcatgatgggaggaggagtagaagattgactgaaagggtgtaccagtgacagctgagggaaaggattataagagtgagagggatggttggtggtcaaaacagggctagagagttgtggttccatgagaaggaattgatcaacagcctgctgcagaccctgatcattgttggtactgtgaggtatgtactctttgatgggggttgagttggagatttcaaaggggtttttttttaactagttttagtagaggctcggaggtgttctttgtatcccaatttaggaggaattgggaagttatcgcagcgcaagaggtatttcccacacttgttgtaagtatggtccaatagtccacaaaaatagcataaattttggaggccttcaaacttaaagctaatccatttggggcaatcaatagagcaaaaatggatattcataccctttctcaggggcttagtaacatccagaagaaccctgatacgaagataatgaccaaaatttttaagaagggacagggatggatttcgataaggtctcccaactcatctgcaatgaactgagccaattgggggcttttgcgtccaaaaggaatattgtgggcttgcacccagaaaggaacgtagagaattcggtcagacatgggagtatcagtgatatcagggtgggtgaagaccatgaggaatttatcgaaatgccacggctggtcctccaaaactttgcgacggtccccatcgcactgaatggtggcaaggaacaaacccgagtgatactcagatatttcaacagggaaacggagggtccatgcttcagtcatggtcttttcgatccaagcaggcttgacagatttgggagtgagcaatttgaagattaaacagaaagagtttgagtcatcagggtgatttagggagatatggtcgaactcttgtattagattctcttcatcagtgacaggagtgagggtattggaggtgtttgaggaagataccatgaggaaggagtttcgtatagaataggaagacgaaggtaagagttgtggatttggggatttagaacaaagacttaaataggaaataaaccaaagggtaaattttaacaaatacctggagagcaaaagacatcttgatgattgaaatgatccctgcaagatctctttagttcttggaagggttatctaggagatatcgagagtggcaatgattacgcttatgcagcacctggagaagagaggaatggcggttggatgactgttcaagattggatgaaggaagaggaaagatgagaaaatctagaaatgcattaattgtgataaggagtgagctgtcaaaattaaatgtaaatgagagagggagaggacattgaagagtatctgggaacgagagattagggtagtaatcatggagattttggctgacatcgtggtattaattgcgagttggttgtgggtcataaatgaaaaagacaaaaaataagaggtgaaattagtggtggacagtggagaggggcgatgagggagagaaaaaacaacctagctgaaagtaagaggctagaagaagcatgcacttagggttcaacagaacacgtctgtaggaagcttcaagaagaagaagaacaatctttgattctcaaatataattgatatcactattacaggaattattttagcatcagtttcaaaagaaattattttcatatcaattatacattgataacaacattgaatttttactttttaaattgttagcgtcatttttaaagtgatgctaaattttgtctatttaacagattatttattttataagtcgtaatttcattaaagtaaacactgaggtattataacatcccaacttgcattactatacaaaataccacttttaatgtaatacataaaaaaaaacctcaaaatcgttaaaaattacagtgggttttactttggaaaatttatatttacacattaaatttataacaattagaaatatgttagatacattttattgtactcatatattttataactgtttaatataaataccaaacatttaaaacttaatcaagtataatatttctactacttttataattactaaagtatgtattaatatactattgatttaaaaaatatatattgaattactttattttttatatatttatatttctttactagatgaatgttaattagttatatttgatttttttaaaaaaa

SEQ ID NO: 296748 - DNA, 4985 bp, Cannabis indica
ttttttgttcttgctgcagcaccaatatatcgaattcccccaatctcgatggaacatgaaaagtagagctgctcggccaggggcttcatccttctgacattgatataaagggatagcatagttcattttctgagtgtactcctgcagcagattcttgcataatccagtttcatgctgggaaagcacacacacaaaacagtcatcatgaatgtgatcccgagggctcaatataaaccgcaataacacattggcaaagaagggaaaaaaaaatagaacatcaaaacagtcttttttttctttgtaaggacaagaatacagccatcttatattatccgaaataattatagctagcagatgtagctgaaaactgaaagagtcactaacaagatctacattaatcaatcatttgcttgcagggtttactcagttctatttctttgcaacaccccataactaaattaatcatacaaggaattagaatattaaagaaacgatgtggtctgcttttcatgaactctgaggttaatctattaattctcattaaacaatcctacttgataagtaaattattaaaatactagaaaggctaaaatagaaaaaacttacaactggttgagagatgcattgattgacatcacggctgccaccatcagatttagctaactccctaagagcaacttcagcagctgactgctcggctgcctttcggttggaaaatccaggcaaggaatcgtatctgacattatttacaatcacggttgacttaaaaaatggctcatgggagggaccttctttagtagtctcatacacaggagtacctactcccaccttttgagcatactcctgtaatcggctcttgaatacatagcaatttgaaacacctaacattgaaattgaaattaaacatgaaaaacaaattcggtgggcatctcatactgttgacatttcacagaatgtacatcaccagtacctatctacctgctatattcaggtgaagcttaaaaaaaaatcacatttagaaacataaaactcgctctaggtctctataattagatgcaatgcaacctaattatagagacctactatcactttttgagcatactcctgcaatcggcttttgaatacatagcaacttgaaagttcgtctggtacgccgtataagtttatattgtataattaaattgtattttatatcctatttttatatgctaaattttaatctatactaaaatattgtatatttataaaccaatcaaacttaatatcacttatactttttaatataatactatataacaacatcatatacaatataatacggcataccaaacgaacttgaaacacctaacatttgacatggaatcataaatttataaaactttgaataccaaacatgaaaacctaatttgatgggcatctaagttagttgagacttaagtcattttgagcttaaaagtcacttaacaatgtacatgatcagaatccatctctatgatctatctacctggccattttcaggtgaagctaagaaattaacatttaataacataaaatatccaatgtgaacccatcctaggtctctattaaattagatgtttctcaccctagtaagaacaaagtcacatatagaccaaaccctaaacaaaggtttaagtagaaagaaacctagaattcagaaaacaaaacaaaacaaaaaagataagaagatgttaatgttgataaatcagagatagtaagattatgaatacctggaacaggattgggaactcttaacatggtgagagaaagagaatgcaaacaagttgttgttgttgttgagtctgatcaactcaccactctaaaacatttcccacctcaactttggtttcctctaattcctctgataacaatacttggtgatggaggagggtcctttgtctttgttggtatccattgatgcccacctctgatttctgccgtttttctcgtgcccagaagaatgagaggaagtgggaaaggaagaggaactgtgcagagacccttttataccagcaaattcgggcgggtgcccacgggtcaattgggtcgacccgacccgaataaagtttgggctttttaagcgtttattatattaagcggaaccctcaaaatcaaaactttgagacctttctcagctccgaactcttgcagccgtcttcttcttcttcttggaaatccgacagttcgagagttcatcaggtttgtgtggccttttttggttttctttctcgctcttcggtttttgttttataataaatgttgaaatgcaagtgttgaagggttttattgggtttgtaaaaatgaattgaattgagttcgagcttttcacgatgctaattctgtatgcattgattttaatttgttgtccttgttatgacgttctcagttttgaatttaaaactaattaaaagaacaagcttgtatactatgattgttgattgtattctcagtcttaatttatgattaatatgttatttcaagttagttaataagtttgttagaaagaaagaaagaaactgagtttgtgtgttttttgggtgtgaaattattgtcaaatttgccaaattaacaaaaacaactcacttaacagtgcaattttcagtgtaattcatacaaagttaatttgctaataaaaatatttaaaaaaatcattttactaataaaaattttcataaaggttgagttggaggttatgagagaatgggcagtagtggtttgaaggatattttggctacagtagttaaggtgggagtgagtgaagcaagggcaaggatatttgggcatgttcttaacccaactggccaaagatcttcacacaagttgttacgaaagaagctcattggtgacaaagtttctcaatggtatccacatgatatcaccaaggatgatcctcttatcatggctcgaaaagaacaagagtaacctctctcactcatcactctactttctacattcatttcatatttatatacctaaccttacttttgttattgttttgcttttttacatgcctacttttgcatctagttagaatgagttataatgagaccgagacggggttgaggaggaaaggcgcattactgaatttgttgcccagaattatgaaaaagaaaataagtatgccatgggaataaataagctgctctagactctagtcacaaacaaagcacacacaaagaaatagagagaaaaactataagatacatttgaagtttggtgtcaagtaaaggttgataggggttaggaggagattttgttgtttgatatccaaaaatgagattgtgatgtcctcgaaaaactgttggaaagttgtataagatcaccaccatactcactcacctagggctagctagctagagcctagacatttgaacttgggtatgaagaaaaggttgataggggttaggaggagatttgattgtttgatatccaaaaatgtgatgtccttgagctctcagatactgagattcggatcaataagtagacttggatctttcttgagctctcagatattgggattatctttctctgagttgttatgatgatgaagatgacatcttattatatagttttagagagttttgttctcctgataaaattacgagtctttgtatgttgagtgtactaagaaccttcattgtgggaaatcttgtgtcaaaaatgtgacgtccttgaagaatgttatctcattattgcatgtttaaaggaatcataactcttcttttactttgtgtatttggtaattggcaggcgcttatcaagactcgaaatgttgaaacgtcgaggaaagggaccgcctaaaaagggtcaaggcaagcgtgcttctaaacgtaaatagaaatgccttgcattgtcttgacttgagacaacaattcaatacaataccagatccttgatgttattatgataaaattgtttctcaacttactcttttcacttgaaagacttccaaatgaagcatttaagaattcgatttattattatttgatgtttctgttggaatcttatcttacctcttgtttttcctccactatagtgaaagattaaacaagtttaactttacatatatttgttgtgattgtgaagccctttttcactgatataaaacaaggaaatttacacttgcgtttgcacattatataaaaaattattatgataatttgtattagtagaaacttctctaacccaatacgaggggtttaaagactgttcaattgtgtatttgtagaagctactgcgatttcatcttcttaatctttcaaaatgtgatctttgcctttttttggcttttgaatcagtcccaattccatgtgaaaagtactgagaaaaggaaccggttgataattttttttttataaagtcatttcaaaacatcaaaagatggctgaaaatataaataaaaattattatgatttatttgtttctgaaacgattttagcccctaaatgtattgaattgagattcatagattacgtttggatgaaattagtagcaatttttaagaaaagacgcattagtgaatttgttgcctacgaaaaagaaaataagtatgccatgggaataaataagctgctctagactctagtcacaaacaaagcatgcaaagaaatagagagaaaaactaacacatttgaagttgggtgtcaataaaaggttgatttaggaagagatttggttgtttgatatccaaaaatgagattgtgatgttcttgaaaaactgttggaaaattgtatcagatacatttataggagaggaactttaaactctaaactctttttcataaattcgaaccacttgattaattggtgtgagtgtgaccgtataagttttgtgtgtctaatagttataataataagagaagtgctaagggaactctctatcccactctcttttgcactcttcctttaatgtgatgacaaatgtcatatattcagcaatagttatttttacttaataattagttatg

SEQ ID NO: 296749 - DNA, 5269 bp, Cannabis indica
tctaatttcatttaattttactatttcagtgattatttatgtactaaactatgctttccaaactttgatatctactaaatcatatccctcaaatttcgacatttactaaatcgccccttaaacttttatccatgttagactttttttattaaaattaaattcaacaatctcaatagttcaaaaaacatttttaacgactttaaaaattcagggagcatgatttaaaattcagggaataaaaatccaaattagaaaaataattatctgattacagattgtcaaacaaaattgaataactcactattagtagcacacagcaataattaagagaagtctacaacctcggccacgaacagattctacaattgttttgcttaccatattttttctgtttattatgcttttacagtagatgattaagtcaattttgggtgcagggtcgaggagccatggttctttaaatttaatcctggaaacacctaccaattttcgaaaagtggtgagtatatcaatgattgtttataaaccttccaatccatgctagaaacaacaaataagagttctaacaaaacatatcgctcacctttgaaaccacagattttttgtgctttatgtttataaagagagccaattagttattgcctcttcaatggcacctctagaaacaaataaaacaccctgtaaaacagtacaaacgtccactttgactgtttaactacacaaacggttttgacttggtagttacttcgcgtaatataaacgcttattttgatgtaattaaatttatcaaaaaaaaaaatataaaaataaaaatataaaaatataaaaatatttatatattattgaaaccatcaagtaataaaaaaattattacacataaaaatatatcttcatgctgcggttaaatatgattatattttaaaagtttatttcgatttttacctcttaaatttttacatatactaaatcataccctctaaactttttatgttgttaatctgtctaaactattgaaattgttagatttgaaaacttttgtttaattttactaaaaaatgtctaatgcaaataaaaatataaagatacaactttgaacatgtgaaagtttaagaaaaataatttagtatatattaaaattcgggaacatagtttagaatatagacaatcgccacattaataaaattgaataaatttaaacacaagtccttaaatctaacaaattcaatagtttggaaagaatttttaacagcttgaaaaattcaaggaatatgatttgatacatgcaaaattgaaaggataaacattctcattagcctattttgaaatatagattaagccaagttcttggactaatttaagataaacaagtaaacaactgtcttttaactgtactaaaaagaaagcacagagaaatgaaaatcaaccgagcttacacgtatttattggaatcttctggtttagagaaatagaagaagcatttaatatgacagacagttaagagaatagagcacaaaatctttctaatactcattcctgaaatcaagcatcacaaaagagacataatccgatcatgaacttcgaactatgctcttcaagaaaatatgtctactctacggttttatttcacaacaaataaaactgatatacacgtataagacgaggaaacaaatatctgaggaaacaaatatctgcactcttctgcagattcaaaaggcagagaccctaatcaagggacagcatccaaaaaaaaaaatgtgggaaagaagcctatattacaatgtacaagtgggaattaactacacaattcagaactatacctaatgggcaaaaagcacaaattacattggggctcttaatcttctagtcttctaaaagttactaagtcaattaccagccgactggctaacctacctaacattatgggggttgaagttgctttaaacgccgcacaacttgcctcgttgtaggcctggtagagagagagtcaaccgtacatacaaccgccaaatgtaaaacttcaaccaaatcatcatgtggacctgtatcccataaccctgcagtaaagaactccttggcccggccctgccgaaggagcatgcaagcccactgtacaatattgaagccattgccaaatgaagaaaatgaagggtccagagcttttttgtctgaaagcaactctagaagaaccacaccataactatacacatcggccttatctgaaacacggcatgtcattgcatattctggagccacatatccaaaagttccagccacaccagtcgtagcatgggtttcagaggtgcccagaagtctggctaaaccaaagtcagatagatacgcattgaactcatcgtcgagcaagatattgcttggcttgacatcacgatgcaagactcgaggcacacattgatcatgtaggtaggcaagagctcgagctatgtccagagcaatcttgtaaagtattctccactcaactgcccttgtggacctttcctggatgaacttttccaaattgccaccaggtaagtagttatagatgagaaacatctcagtttcgctggcatggtaaccgattagggtgacaagatttggatggcggagtcttccaagggttttgatttcagcatggaactgctgaaatccttggaaccttccaactgcaagccgttttattgccaccaaaactccaggtgcgatctctgctttgtaggttgcaccaaaacctccattcccaatgcagttacttgcattaaaattcccagtagcccgcaccacagcttcgaaggtcaatggaacattaaagtctgtgaaaactgttacttccttcctggtagacccacgaactttagacttagaattccacttgcgggtatatatgaataatataattagagatataagcactgagactatggctgatgcagatgctacggatgcaatctcaattgaattaagaccaccatttgcactgctatgggttggaactccagaaggtgaagcagcatatggttctgaatcgccacctcttccctgagcatttgaagatgattctgtcagagtgtacatgcgacatgaccgtataaatgggtttccaaaagcactattacatttcatcaagttactattagatggcagtgacccagacaagttattgaatgacacattaaagacagagagagtcgtcacatttgccaatccagaaggaatctggcccgaaagtctatttttgtccagcagaagaacactgaggcctttcaggttgacaagatctcttggaatctcacctgtgagggaatttgaagaaagatccagcacttccaaagactgtaaacttccaaagactgtaattggccgaaacccgaaggaattgagccagacagattattaccagccagagagagatacttcataacctttagctggtcaagactcaccggaatctcatcttgcaacaagttccaactcaagttaagggcaagaagagaagacaagtcgccaatactaaggggaataggcccagctatctgatttccagatgtatccaggaactgaagagatctacacatttttccaatttcagcaggaattggaccagataatttgttgtagctgatgttaacaaatagagcatctaacccttcacacttgtcaaacaaactaccaggaaatgctccagtgaacttgttttctccagcaagaaatgcgtaaacaatttgcttccctaatctttcaggtgcaattggcatggaaggcaaaatgccagtaaaattattttgcccaaagttgtgaattattacatgcctgccatcttctttatacaattgcaagatgttcccatcttgagctttagatgaaaacaaagcttggtaaggtgacgatggattgtcaagattaaagaaaaattcattcaacgtaggaatgggagtgcaactgctgctatgaaacgcaggaatagagccagacaacatattcccactgatatcaaacagagtcatacaaggaactaggagactgccaataaacttgcctgtaagcttgttagagcttatgtcaagatagtgcaacttcttgcagtgaccaagtacagcaggaatttcccccgtgaaaaaattctgagctaaattgatcatttccaaattggcacaagaaccccagttgcttggaaagccaccttccaaagttgccctcggtgcccaaattatcctcagcttaggaagggcggtaattccctccgggattgcaccttgaaagtaattgaagtcgtcgtacatttgctccaatgatgagttatcttccgtatagtttatctttgaaagcggattaaaccgattagatagcacaaggactgataattccatacaattttcgagctgatgtggtattgcaccactgaggctgtttcttgaaacatccaatacttgaagcttccgaagccgaccaagttcagcaggaatactctctagcagcatattagtatacagcaagagagttcgcagctccccacaattgcccaaagtggaaggaataccatcaatcaagaaattaccggacaaatccagatgctcaagcttcccacaattctccccaatctcactcggaatacgaccactaagccgattatacgacaagtaaacccccctcagccttccaacaaacgccggtatggtcccattcacacgattccctgataaattcaatatctctaaacgcttacaattcgacagtgagctcggaatgtccccctcaatcctgttgaaaccgagattaagaacccttaaattcttattgaattgaattggcagcttcccatttattgaatttccctctagatcaagaacctccagcttatccataccccaaatcgcaccaggaatttcgccgttaagatcattaaaaggtagtgatagaatcctaagctcagtgagcttcccaatcacagggctcaacttcccaaccaattttcctctactacctaaacaatcccgtctgatgccaaacccatacagaggaaacttagcaaaatcaaaacatgaagaaggttgcgaattacctccggtgccactgccagtcccagtaatgttgagagaaaccacgcgagaattagagtcacacgaaactccaaaccacaaacaatggtccgaaccgatggaattccagttcgagagcagtcctgccgtgtcagaaactgaattcttgagctggagcagaaccagtttgtcagaaccggcggcggcaaagacgacgatgacgccattggagaagacccaga

SEQ ID NO: 296750 - DNA, 4245 bp, Cannabis indica
cgaaagctaaattggctaagtgttggcatgttactgcccggctaagaagaattcctccgaacaaatgtgcgtggtgtcctatttggcatatttcttgcgagcaggtacccagagttgaatccacgtgtcaccattgtgtgatgccacgatagagttcaaaaaattgggataacaatatgtatattatcttgtaattagaatgctagcactttccatgctttttgtctagtagcttttcttgctgagtcattgtgacgcacaagtgcttcatggtgcaggtatgaagaataacaattgtgttcgaccatgagtcagagatcactcagtaatgtacatatcagccgtggtgtcttggcttccgtgaagtaggatcaatcccttttctatgattggaaatgtaacctaattttgttataacggttttgtaattagttttaaaataattttattagcaggggatccccatattaagacagtattttgaataaaagttttaatcaaaccacactttttcctaaactaatagattaataataataaaattacaaaagcacacatgtggcatccctgagagtcaggacgttacagacgggctccttggagaagaagggtctggatatcatatttttttgcccaagaatctgctcgttgcttctctttttcaacttcatcttcgagattcttaatgcgtaagctattctggcgcatgtcctcttgcaggttgttgagctgttggatttggtcagtgatggtctcagacttagccaccatgcgtgcctcagctacatccttctcttttgtggtattagtcaagtccattcgaagggagcgtacctccttcttggcttcttgtactgactttgcaatctcccgctcaagtttgggccttgtgatctaaatacttctttaggtatttggcatcctgtttctcttcctcggctgccagcttagccttccaatcctcctgagtcctctagttgctggaggctaccttaggtttcagcctgctcaagtacgggcaacgtaaagcctctagtttttggcagtcaaggacagaaccttgccacaaagtggtttagctctatggtcacacttcccttaattttttggtggtcctctctaggaacagtaccatctaaagataaaaagatagggataaattactaataaaaatactaggcctaaaaaagggtaaaaaagatttgtatggcaactgagaataaattagagggttagacttacccctaccgcttgctgccttgtggatatggacagagtgtataaattagcactgttgcttatcgcccacttcttcaaagtaagctcgctcacactgcagcctatactgtctatcatttcacagcgtaagggcgatctctctacccaccgtaggtaccaaattatgactcacgacagacagatctaatacagggcctagaggcagaggctggcaaattcccgctcatggatcttccttagaatggcggcctttgcgagatattcgtggctggcaggcggcatcatgggaaaggaaaatcccaatgaatgatccttaccttttgcgacggactaaggtggaggagaggtagactgacatgccactatctgcaagtgatggggagatagagactactgctgttgcggtagggatactcgcttagacggtgattgtggcagatgttgttgttctaggtgttggagttgttatagttatcgtggttgttgatattgttgtaattattgctgctgttggggttggtgtggttgttgcggtggctcttgttgctgttgttggtactgtttccagtgttgagacaaagatagcttagtcaacggtacgtcagtcgccccagattttgggaccaaagattttattctcttcacgccggggtcgggggaagtccttgatcccttacactatgacttggctagggtcccctttggggaaaagatgagttcgtccaggctgtcattttaacccctcacatttagtacggtgtccaggactaactctcttctaggagggatgacttgggaggattgttctcccagagcagcaaaaacctcatgagctttctgggaggtgccagacctttttcccccactagccggcgcggaatggccaggtgtggtgtgcctagtcttggcaggaggaggaatctccttgacgtctgacgatgaggaagttaatggaggaggtggtttgcgagtccccgaagccttggtcttggtctttttcttgtccttctcttgggattttctggcctcgtccatagcagtcgtaatctggttattccaagacttcaacatctcggattttgatgtgtacgcacaacaagaaaacagtatgggtaaaaaaaaaaccttcacaagacatacaatcatagtaaacaatagcaacaacagaaaaaagaatttagtgaagtagcttatgcgtgggtgcaaccattcagtaaagtgctataacattgtccccgagcaaaagctaaaatgctcctatcacccatgaagctaccatattcctcaaattctgatagggacataaccatcaaagggtaaactcagacggtgtccgaaggagtccccaagttactaggtctcctaattatttggtctaccctttctatgtactcctccatgtgaaatctatggcaatttatgcctaggaaatatttttcaaatcctccctaattcctcttggacatgcgactcaggcttggggtacggaggatgcggaagggtccattatctcttctcgaagtactggaacctggtgcccccacgtcaaggtatgcaacagcaaatctctctacgatttcttcttcctcagacagaggattaggatggtgcgacacccattcgaagcgtagggaatggtcattataatagccaagctcgtggcaatcgcttgcttcacttccttaggggttgacattgttcccgaagattgacagggtcaatgctttggaacttggtgatcaagctagacctacaaagaagttcagttgtcaccaagccctcaaccttcaattgctcttctgagaaggacctttactgaccctctttcctgactatctccttagttcaaatactctgaaggggaagttcagctgcaggtcaaaaatgttagcccatacacagaaattgacaatgtttaaaaaaaaaactctaaatgaactgctagaatacctgggagtaggaagttcaactgaatcgatggtaccctactggtagaaacccaaaggaaaagaactaatattcttggaggtcatgggtgcgatccatttgacaaaacagaacagtaggagtctgggtgcttatctagttggaagaaccccagctttgacctatctatcctcatgggattggccttgacacagtaaaagtaaaggatctcctctggggaaggaacctccagtttattaattttgcaaaacacataccacccgaccaagagtctgtatgatgaaggaatcatctgaaagggcgcaatcctaattttcacaattaggctcgcgaagtaagttctcaaagggaggtgagcgccactgtaactatgggaccaactccatgcactaaacccatcaacactggcagatgcagactccccaaggcgaaaagcctgtgccacatcaatacaggagcgttatggaggtagcaacttcagatacgcttgcaacatcccataagatcaaaagcaattagctttttggtccatctcccatacggactcaggacggacctacactggtgaaggaattttccccctttcgctgctcctgttatgtacaagaagacctctctcaccagtagattcactttcgggaaagatttctaaggcccccgcaaggtgaggtgttgccatggaataaccttgattttcgcctaccaggacattgctagattcctattttaatataaattgttctttggttttcctcttagtttttcttttatgaaattgcttaacatataacatcgaacaagaagttttataaatcatctgtttataatgtcactctattttcttttataaaaatgagtagcgcagatgactatattccaaatattctatcctgtaataatataaatcatcgatcttagaaaatctcctactttatatgcttacaaaaggcaacataaacatggagttgaattagtactttagtggtggtaaaagataattactcattaaatatttggcataaatttagatctttgactttaaattttagattccaaata

SEQ ID NO: 296751 - DNA, 4285 bp, Cannabis indica
gttaggctatgtttggtaagaaggagagaaataaggatatatggagagtttaggaaggatgtggagtaggagggatggagatgatagtttctcctttgttttgtttggtattaggagtaaagttggagggatgaagagtaacataaatatgaaaattaccattttattatttttaatacaattatatattattttttgaagggtagaaaagacatttcatatagttttttttgtctttttcttggattcctccaattttgaagggattaaaatttgtttacttggagggagaccctctcccttcatctctcctcttccttctctctctctctctctctctctccaaacaaagcaatacatcaatccccctatccctctccctccttccttctctccccctaccaaacatagtgttaaactatttctgcactgtatgatggcaagaactctttggtatagcttgttaatgaagcagataaagagagtatttcctggtaaatatgaaacattaattactggaacaacgactttttagcaaataaaattggatgttgtttctttaggaaaattgttagtcttttttattagtaagataggttgggaaaaactccataacttctgtgccaaaggaatttaaggattctcccctttccataatttctcctgaatggaattatgacatttattctttgcttagttcttttggttatttttactatagtttcctataggaggatgtcttatcctcctctttgtaatgcctgcttcaatcaattattcttattttctcaggtggaggatttaacatttcccctctaaaaccacgaaatgggagacccagaacacaggttcaacatcttatgcagattgatctgaaaggatggggtgtgggttatgtatcatcatttcagcagcattgtcttcttcagatgttaaatagtgtagctggtgacctccttaattttttttttttcaattcttattaaggtttttatgttctagctggtaactattcccttcttttgtttcatttttaatgtttctactccttttttctttttctaaaaaaaaaactattaccagtagttctcaagcactttcataagggaaatttttagaacagagtgatgaaatttcaaatttatttagtatagaagattgttttggaactttgcttaattgcgagggctaacaagttaatcaacaacgagtgtatttctgatatcttagattctttcacatagcttggtcaaccaacaattgttaaatggtactatcataatttttaaaataaaaaaaaataaaaaaattcagaaggataaacttatttatttattttttttgaaagcagaaggataaccttatagtttcaaagaatgggggaaactatctggattctccctgtaaaagaatttctatgtttcctattttattttgtttgttttattgatttgctttcttagaatggcagcaattcttcttaccaaaattacatttcatgacaggactacgtgagtggtttgcccaatctgatgaaaggaatgctcctcccagaattcctgttatggtcaatatggcttcagcttctgtttcgtcccataagaatcagaagctgcatgagccttctgttcatttcgacagttctgcaaaccgaaattcagtgatgattgatgaatactctgatgaggatgaggaatttcaaattgctgaggctgagcaagaggtttaattcatacttctgaaaaatgccaatttttttacacagtattaatgatttcatctttgtgtgatttgttgtacaggcatatcgaaatggacaagaaaatgaaatgaagaaaataggtaaactctgcagtgcatgttttgttgtgttacatgtgtactagatatagagtaacaataattttcatggcatgaaattgtagaagaagaaccaaccgtacaaattgatttatcatgtttttcgggtaatttacggcatgatgaccgtgataatgctcgtgattgctggaaaatttctgaggggaacaacttcagagtccgcagcaaacatttttgttatgacaaatcaaaggtacagttctctcccttcatagttcatttatagatttgtcaattattttgtgtaagtaagacctttaattctttctcttgattaatcactccatatgcaacatatacttgaagattcctgctggtaaacatctaatggatctggttgccgttgattggtttaaagatactaaaagaatggaccatgtagcaaggcgtcaaggatgtgcagcgcaagtacgtataataagcaacttcatttttgctccagggatcatttctgctttattttcatacatagtggtcctctctagacagtatattgttttgtgtcttgctcacttcgtgcttagttcttccagttccacgatgatattgatatataacttctttgatgtgttaatatttaacttctagtcctaatgtaatgcgataagatcgtgtttgctagaaatgctaagggaacaccaaatatttctttgctaatgcacattttatttgtgacccttttccttacaaaattcatctctcttttctagaacaaaatattatttataatgtgcatttattattttgtcccatttcttaataaattaatctctttactatatgcaagttattttgatgttattgtaactcttcatgtagtgttgtgatattttgtgaatctgtttgtataggttgcgtcagagaaagggcttttttcctttattgtaaatctgcaagtaagttgtattcttcatcttgtatcccttgtcttgtactgttgtaattctcgtttatgggaatatttcctgtttctcatcatgaatccaaaataaatgggagtatataaatgaaatgttgctactcctgcaggtacctggatcaacccattacagtatggtcttttattttgtaactaaggaattagtacccggttccctcttgcaacgttttgttgatggtgacgatgacttccgcaatagtaggctgaagctcatcccatcagtacccaaggtattgtttctgaagcaatttgattttgataaaacttagtcatgtttagtaacattttttctggttaaatactctattgatgggagagcttcaactggcactgggagaaatttttacaaacccaaattcaatattttcagtatttttatgtaaagactttttaaccatattgtaggcattaatgtgttggcttatgagtaggaggttatgtgatttgcattatattgatttggtttttttttaaataaaatcctgcagggttcgtggattgttcggcagagtgttggtagcaccccatgtttattaggaaaagcagttgattgcaactatattcgcggtcccaagtacttagaggtcaaaaccacttgcatttctcaaatttatataggcttataaattgatgctcccaaattatcattatattctcagatctgattctagacaagttcttgacaatattatacttgttcatgtttgactgatgaagatatatatttgtagattgatgttgacataggttcttcaactgttgctaatggggttctagggctggttgttggagtgattacgacattggtggttgacatggctttccttgtacaggtatggatgtttcatacgagtttataatagttgtattcaatgtttctagacttgcattgtgttagcacagaattgaaaggctactaatagcaaagtacaaagtctaatatattaagagcgctgatgttccttctataaatgtagaccaaaagtggtaatgttggagagtatttgtgggggttttattcactatggtttattcatttctagagtttattctttttccattcactatggtttgatgacaataacgtcaattttttttaaaagatgagatgagactaggaaaggattaagacaagcttttccagcaaacatggaaaaatgatgaattaccttatttttgtttcaagtttattggcatacatgccaatgaaatgttttgcaaattagcaaaaatgtctgaatttaatcagcagtagtttaagattggccttttcccatttagccatgttggtggaggtatttgtgcataatagtacagatgaattgcctggttaatgttttcttattctttgcaggcaaatagtacagatgagttgcctgagcggctaattggtgccgtacgtgtttcacatatagagcttaaatcagcaatagtcccgaagctggagccagatccgtcatgact

SEQ ID NO: 296752 - DNA, 2388 bp, Cannabis indica
ttatgtaatctcatgtgtgtacatataataaaattaattagtatatattttaaataaaataaataaaaaatatttaaaaaatataaatataattggataacaaatataagataattggatcggttgaggttgattatctattgatacaaatgttgattatttattgaatcaaatgtaacaactaatctgattctgttagatggattataattggactagatgactttttctcccataaacttttaagtaaatttatcaatataatttttgttttaagaataagatgcccacttgtattaatctatatttaagtggtataattaagtaggaataacatttgttgattaaaatttgtggaagaaagtataacacgtatttacagtgtaaaatcgacaaatttacaaagccctacattaattaatccaaaaaatatatatttatatttataatagcacacaaaccacgaggtgaaactttaactattcatggcgtttatgtgggcccaattaatttgagttcaattggaaacttgttcagattcagaccacgaaattgagctcattggaggaaagcaacagttacaatcttcaacacacttttcaggcaactcccaattacttgcgggattcaatttcctcaacttcttactttcaaagtggggcccattcacagcctccttcagtgggccccagcattccaccttgttgaactcaggaacattcgagtgaaaatagacccataccaaagcctcctgtaattctgggtaattgttcaacaaatcttcatctccatgaacaaaggctttcaaaacctatattccatttttcaaaattaattaactataaagttttgatctttatgcttttaatgaaaaaaataaagagatgtaaagtaccacaggaagttctttgctgaagatgaagaatctaagccttgcacataagtctaataaaaaatggcctccacttatgtgacaatgaacatgaagagactatttttcctttgaattttttccactctgcaacaacttcatctctttgtaacttgttataccatccctgcaactgtcacaatattcaatctctaatcaattaattataaccccaagttttcctttttcttttcaaaaaaaaaaattcacttttaggaatttctgttatgctgtgttcccttgtttccccctctgtttttggatcatatatataaaaatagaagatctggcaactgggttttctttttggaatcatatggattaattaaaataaataaatatgtgattgggtgctacctgagaattgtttatagtctgggatatggctaaggtgagtttagaggttatatcactatgtgtgagtgtataagttcttgggagattccctgggtgcttcttttcatccactcctaagaaaagaaccttcaattttgatgcttcaaatatagctggcccaaataacctcgcaacctgaccaaaattaattaatctaacattaattgttaatttcttcctaataaataaacaaataaagaaaagaaaagaaagagtgttttacaggaacaatagcttggttcttcttcttgttggatcttcttctattagaaaaaagaaaagtttgatgatgatcaataagagaaggctttaaattcctcaaaggggagagaggtgtagcagcagttaatgaagccatctcaccacaccgaaccacttcttttctctatttttagctccagctttcttacttagttgccaaaaatagaattattgaattataatactatacgcttttgagttgaaaaagaagatgttataagtaataatgagtaggtccaattttttaattttttctaaattctatctttagcttgctctggttttggcttttgcttttgctttagggttttggtttggtttacttgtgagatcagcaatctgttggaatcagtgactttaaagatttgtccgtatgagattggttgaaagaattaggttgggcatgattttgggagaccccaataatactattgcttcgaggcttgtatctctaaattgaccggccaaactcatacaattattacttgtatctctatggtgagcactaatattaaaaggagtattcctaattgccactagtggtatttaatactttgtattagtgttattttatgattagttagcgataatttataaaattattatattaaactaataaatttaatatttaattacagcaatattgcgctggtaaaataaaatttacttctaatgtgttggcaaaaagggttgacaaatcaacgttggtattagaatttttgcctgcacaaaatgaaaagtactggtaaaaataattttttcctagcacgtaaatatactagtaaaagttagattttagt

SEQ ID NO: 296753 - DNA, 2739 bp, Cannabis indica
tgttcattgttcaaaaaaaaaaactcttttaatttttaaactatagaacaacattcattactctaaacgtattttattaattgttttgggtgtttggcattctttttatattatgatgcatgtattttaaacttatactatagtagtttgtgggttctttcaagagacatttctcacgtaattcttatgtaaagttagttggaagttcaggactttacttggctttttaacacgatatagttgaaaatatataaatgttaggactatatgagagtcaaaacttgttccaattccttcattagttctaagcataaagtcgaattagaaaataagatctcacttgtaatacataaacgaaaaagaaccaaacttatctatcttaatttagtagttaatcaaacaaaaacaaaaaccagactaactaaactctgttcttcctaaggtatgtaccacaaaacatggattcttccactatacacaataatccttgccatgccaacctgccataagatcttatgaagttttagaagaagtcctcctcatcatagttaatggccgtaaaatcatggtagtcgaaaaaaccatccccacttgagtatccaatatcaaagtcatcatcaaactcatcttcagactcaagaagattactcaaaaaggggtcctgatcggcaaagggaaaatcatcgtcttcccctgaaaacatctcaccaggatcagaaatacgatcacaaccctcgagtgaatcaaaaggtaacttcacaagtttgatctgctcagcacaccttctccccaaatctcccttcaaattaatattgagacatcggtgcaggtcaagtgattcgagcttacaacaaccatcaagaattgcttgtaagcccaggttattcatccaacttccaataagctgcaaatgccgtagttctggcaagtttttgctaatggcaatcacaacattgttaaaatcaatctcttgatcaagaaagaagtagttagagcgtgcataagcttctgtgtacaatttcaatgttttgaaatgagggcaatagcgccccaacgcttcgataacagtctctgagatttcgcagtgtgtcaaatcaagctcctccaacagtggaagcttttcgatagcttcaatcaatccctcatctgaaagatcagagcaagaagcaaatcgaaggcgtttgatctgacttgaactgttgaaaggttttacaggaaataaaagtaagcactaaatgtagagaatgaaactgaaaaaatggggaaaatggaaacatctgcaacaaatgctaaacatattaaaaacaaaaatgaataataataataacaaaagagaagtgataatcaatctaaatacaaacatcacaacatcaacatcccaaactttttcattgaactaatcaagtgaagggtcatcaaattggttacctaaatatctacctatctaaaataatagttcttaaatctttctttaaataaaaaaactattaaaatttcatgaagaacattgtaaattatagtaataatcaataaaacaaaagcataagaatttgataacccaaattatcaagttgaaacacaatacaatagtcaagttcacttctttctttcttttaatcaaaatgaaagagaagtaagaagaattagaatacctagcagtgatataccgaagaagttcgtcgtttccaaacttctcgatgttgaaatcaacgagttggccacaacttcggtcgacaatgtcgcggcacatcttttccgagtcccattcggaatcaatttcgtggctgtgaatgtcaatggttcgccacatagaaggatccttgcagatataaagccacgacttgcaaaccatctgagcagtcgtcatgattttaatcgaacccagacgagagagaatcgacgccgtcacatcgcgcggcaattccagccagatcctcagttcttccggcggagagggctcagtagaggtggaagacgccattggcgatagcagagaatttcgtgtgcaactgcaagctaaggttttccagtgtcgagaaaatgaagaaatttgaatgagaaatgtaaaataaaaagaaaaagaaagagagaaaattacattatttttttttttttttaattttttacactttaaaacattttttttttttacatttttacgaaatttcatataaaaatttatattcaaaacagttttttttttacatttttatagaattctacatagaaatttaaattgcaactaacgaagtaacctaaattgcaaccaaaatcagtatagcaacctaaattttatgagctctttcaaaatttattatatttatctcttttaaaaatattaaaccattaaattttggtctgagagcgaataataaaagagaaaattaaatttttatgcttaatttagttacttaattaaaaaaatatcaaaaaatacatctttttacactatatcaaaaatatatttatataagaaaatatttaagtcaaatcaacttttttttatcactttttttgtcgtaaaaactttttttttaattatttttatttttagcttagataaaccaatcccaactcatataatgtaaaaataagaattttttctaattaaataaaaaaattaatcataaaaactcaaaaaattttaatattacccatttatgggtaataaccattcatgggtaatactcattaagagtgcatccatgtatgtatatatattgtgaatgagaatgagat

SEQ ID NO: 296754 - DNA, 618 bp, Cannabis indica
aaaaaaaaattattattaattatacaacggcggatattctaatagttttcttctccaacttccaacaagaactattaaccctaaaccttaatttccatagactaaagtctccaattgtagttagggcaataatataattttacagtcgaacgaactttgaagttaattttctgtggttcccaatgcttattattactactatatatatacctaattattatttcaacgcgtatatgtataatacatgtatatatgtgcatgtacacattaattaacgttgacaactttgactttgtctacatacatatatggtatggtatgatatggtatgggatgcctatggattctaattaaggaaaaattaaataatattggcaccaacggtttcaacacatcatatttattaaaatttattttcttaatttatataaaatttaatatttaattatactaattataatatgtgtgacagtcagtagttccgggatccgtaaggggaaacaccgggtaagctgtgtaattccacaccgtctgggaaaggtcaagtagaatgattctgagactgtgtaagtatgggattacatagttgaatagagcttaaatggattgattggtact

SEQ ID NO: 296755 - DNA, 1510 bp, Cannabis indica
gcattcatatatatatatataatgaacaaaaaaagtgaacgatcgaggtgatgtgtgttttatttttttagagtaatcatcatcattatataattataatttaattatgttagttttattgtagttctttcctcgttaattaacataaacacacaaaaattatacatgcattttttatatacaataatatatgtatttaatttatacatggtaccaaggttacactcacatagaagtaaggagggtgctcctaaaaaaaattgaaaaaaaaaaatctttttgcattacgacatatatttataataaatatttataaatataataaaaatattattataatatatggttaaactagattgcgtattaaagattaataacactttttttttttacattaaccactgcatggtactatagatatttgtatagatcatcatatcttttttaattgtaattaaagacaatacttattaattaaatttatacatatggtactcacacaaaaatatatataatacatggtactatacattattatttgtagatattaatgtagaatttaaatatgtcgcaatcactaacctaataaacattcatttgagtaaagaagaataatacgacttctcaatttatactctattaatactaaaatttctaattccaaggaaaattctaccacatttggatagttcattaattctttattttttctctaaaacctattttatttttcaatagattatgtatgtttcatatctcaaacatgcatgaattatcttttataaaatcaacacaaccacaagagggtcaaatttttttttttcaaaataaaactcatattgtaaatatgaataagccaccacatatatatgaattaatactctttgagtggacactattgacctgttcaattcttaaattaaatgactacaaaccatgaagacatacactttatttataccattagagtgtgctaaaatcacgttttaattttacaaattatattgaaattattataataataattattatcattattttttaagaaaaaaaaggcactgcacttctggcgttagactttttgaacaccacactaacttaaatatagaatcaggtaaaaatttattgtgtggtggtgaaaacttaaataaatcttttttttttttttttgcttaaatatgtttcataataattaattttaatttattctgatgtcaaattaaattcttttagtgttgggattggctggcacagctggtggtggtactactactcgggttagaaaaagaacggatccaacggtcaaaattttgcatgctgttttgtgtccagctggcggacagtaactggtgacagctggcaaagcacaggaaattacagtataccctcatgtagaaggtaaaaagctctagggcccacctgataccgtcgtctctgtttttggtggcgcgattcctttaaaaggctctgtttcagacttctctctctctctctctctctctctctctct

SEQ ID NO: 296756 - DNA, 2970 bp, Cannabis indica
ccattctttatttagccaaaaactttcaagtcaataacttgcattcctccttagccaaatggtattcagtctgaagccccataatcaaggctttagttctctggttctgtcataacgataacctcatgaaccaactaagaaaatatattctttttggtggacgaacttgctccttgacgaaaacattgttagagactaaactccattcccaaccaacccgccttccacacagcagaatctctaactcaatccaattgaatctagaactcaatcccacgtgccaggaatggctccaagaacaatccgagaacactcacaactcatagaacataagcactcgtgcattaagaaattaatttgaatgttattaagctttattgatctgaaatgtcttttgaattacaatttacaatgtgatgaactactttacaatgaatagaaacagaggtatttataggagtaaatgcctttgctaacaatggactaagacatcaagataagtctatcaagatagtagacttaactaactactaacaactagttgaatactaactaaactaacatattaatttaaagactagggacacgtgtacgagaccaaggcatacatacctaacaattctccaccttgacttgagttctttacattacaagattttagtcaatcaatagctacattcaaaattttaaagcagtgatagacttttgcatcaggtagagccttggtgagtgcatctgctgcattgtcctctgtagaaacctttgagagttgaaccttgccactgagattatgttttcaatgaaatgtaacctgatatctatgtgtttggttctttcatagaatatttagtttctgctaagatgaagggcactttgactgtcacaaagaacagtgatatacttctgatcaattcctaatttaccagtgatacctttgagccacagcttctttcactgcctctgtacaggctatgtactctgcctcagttgttaagagagctacaatggactgtaggttggacttttacaaccatttaattggaatgcgaacccagattgtgacctccttgtatcaagatcaactgcatagtctgaatctacatatccaattacactaattcttcctttttttgctccatatattagtccaacctagaggtactttttagatatctcaaaattcgtttagttgcctcccagtgctctcttcttggttggctaatgaatctgtctgctcaccaaacttaccccatagcataggtctagcctggtgcataccatcaaatacatgattcttccaactatgttagtgtagggtattttctacatataactgaggtcttcatctgttgttggagctttgatttttagtgagtgtaaatatctatgtgaagggtgtagaaataggtttgacattgtagaaaccaaatctattcaaatcttggagatgtatccactttgagacaatttcatctttctttgcattctgtctttgatgatttcaatccctaaaattttcttcgctagttcaagatccttcatttcaaattctttgttcaaaaccttctttaccttgtttatctcttccatgctcttgcatgcaataagcatgtcatccacatatagaaggagatacaaaactgctttagagcttttgacatacacacaactgtcatatgcacttcttttaaagccaaattttagagcaaaataatcaaacctctgtaccattgtcttggactttactcgagtccatatagtgatctcttgagtaagcaggcatagtcctcctttcccttgacttcaaatccttttggttgcttcatatagatcagttcttcaagatctccatgaagaaaggttgtctttacatccaattgctctagttccaagtcttcagttgcaactatgttgagaagtaaccttattgaagtgtctttcactacaggggagaagatttcatagtagtcaatctcctccctttgagtgaaaccttttgtcactaatatgggcttgaatctaggcttttcaacacctaggatttcttccttatacctgaaaacccacttgcagcttattaccttacttctagcaggccttatcacaagaatccaggtaccaattttcttcaacgacaccacttcctgacccatagcattgtcccattcttccctatcttttgatagcattgcttcttcataggactttggctcttcatagtccataccagcaatgttcaaggcataatgaaccacatctgcaaaaccaaacatgtttggtggccttgtggttctcttctctttatctcttgtcaaaagatagtcctaagtatcatcgtcttctgtatgtgttatgcccaaaattcagctaacacttcagaggaagacacgtgtcaaactgggagaatacgaatcaacaaatataatgataattatatttgaaaatgaaataattcattaaatgcggaactaacagagcatatttacagcttactgactgtaaagtcttaagcgaaataaagatatacgaactttagcctcgtacgttaacgagaaaccatacgacatcagtagtgcaaggcgaggcatcatcctcgctacgcatgaagagacatagacgagacatgatgactgttaaagacacttagggtacaatacacattatacaaactaagtatcacagttgaatgaacttgaacaatgaatggcgaagcattcatctcgatataggaaggcatacccatggtaccttcactaatcagctacaaacatttttcaatgaaattcactgcaccgtcgagtaagctctctcagatagaagctgacattcaaatgatgttggctgctgaagttcatcttgacaccaagaactgcaatgtcagatggagcgttatgtcttcaagcgcaaaaacgacgtgatttacattatcaaactcggaaagacatggaaaagctctagctcgctaccagg

SEQ ID NO: 296757 - DNA, 6932 bp, Cannabis indica
tcgttcaaataattatactattttaattattaattaaaataaaaaactaaaatattaaataaaactaacactacgtgccttggcacgtaacaatcacctagtatatatatatatcccaataatctttcaagactttatttatgagttcatcaacttagaaaatacatgaatgtccaacagaaatggatctttataggattatgttaaaaatatgttggtcaaattcagattctgtcgaaaaatgtacaatttttcaaaatagaagatctatcgtaatatttaactaagtacatggacccaaattggtgtacaaaatataattatttaatatgttcattaatcatgtagtgttcaaaatcaaatactcaaaacactcacaaattgccatatctaaacctaacaaaagaacaactttactgaacatggctcaatccatggagggcctaaaatcaaactttgttaaaaaccaacccctatgattgttcaccctttaccagaaattgatgtgcaacttcataaaaaggtatatgaatatagatctacatttatggccacgcaattcaatggtacaattcttatatacgtggctgataatgcacattaattaaggtgttccctacctataatttcatctggttattctctgtgacatttcaatcatgcaacagttagatttatcagagaagaatgaaattaaatgagcactctcaccaaacctctcttgaatatttttccatattaaccacacactcacttctcacacatttatttagaccctctatactatataccccctaaattaatctttatcctaatggagttttctaaaacaaaatgaggtggtcacaccttttgtagcattataattactagtttttcctttaaacaaagattaagtttagaagaccaaccatttatattatcaccccagaacgtaggtagtcatctatcttgactacgtaagacaacacaaatctaagaccacatgacaataaaagagtttggagtatcttaccatctgcacctgaattatttagtcaatggtttaaaaaggacataacaaaacatgcctccagcaagagaccaatcatgatgaagaagactatgactcatccaccaagctcggggaaagatttcgatgagaatgatcaagttcgtgagcagagaatagtcctgccctccaagttcatcaccaatatcagtgatggtttggaaagaaaggaaccctcctggtacacagcctaagattgtgtttcatttcttatagtgcagaatttacctgtaattcttgtgttctttactgcacctcatcactattgtgttccctttcaggtttatcacttctcagattccaacagacttctccattcaagttgaagaaaccacctttaatgctcataaggtaactagaacaaggcaatacatgctttctttgtagcactgcatgttacacaaaattatagcagcagcaaagccataataattgtaaacagtgaaaaacaagaaataaacaagaacgatcgcaaaagatttagtcaacatttatattttcatatagtctaagaggctgtctaattgagtccacattttgcacttagaattaataaaataaataactaagactctgcattacaaacctgttatgctgcagataccacagagccctgatcacaaaagttttcaaattgatgctttccacaagttgcatactaatgactaatgacttagtgatgacatagggtggatctagcggcatgtctttatatgattaattttcataaatagtatggtttccatttatttcaaaacaacttattaaaacagccatatcgtacatgggctgactaaaatgcacataggtcttccacatattgtcttaagttttatgaaaaacagatacctaatacgagtcttcacgtgtaacagtatccattggtagcaaaatgtggctacttcagtcgggttgatattcagcagcaaccaaactcgagttttaactgcgacatcaaactcgaaaattttccaggtggatcggagacctttgaaacaattctgaagttctgttatggtttcccgattgattttagctcgaagaacatagctccactaagatgtgctgcagagtacctagacatgactgaggaacttgatgatggaaatctagttaccaagactgaagcattcctaacatttgtagtcctttcttcatggaaagataccattactgtaatcaaatcttgtgaagatctatctccatgggttgagaatctacaaattgttagaagatgctgtgattcaattgcttggaaggcatcaagagaaaacacaccagcaaattcaagtaacacagaaggctggtggtttgatgagattgctatcctgagaatcgatcattttatgaggattatgacgacaatcaaagcaaaaggttcaagccctgagatcataggcaagtgtatcatgcactatgcacgtcgatggttgacaggaatggatgaggagttagaaggaataagaggatatgggcatggaaagagtgatctgcagttcagtattttgagccggagagaagaggaaggggaagagggtattgcacatggcaagaggcaaaaaatgataatcgaaaacctagttagcttacttcctcctcaacatgaagctgtttcctgtaagttcttgctgcaaatgttaaagatagccaatgtgtactctgtaacaccagccttaatttctgagctagaaaaaagagtggggatgctgttggaagacgctaatgcaaacgatcttcttattcctagatacaaaaatgcagatcagacatcactaatgaagtacgtatttaccttctctaattgacttgtgttgacttaatactccaaaattagaaaagttctgaaggttgcatgataatgatcaactcaccactttgcacctcttgttaataattaatgttaattaaaacagttcctctgaagatcacaccatgtatgacactgatttggtacgacggatcgtggaatatttcttgatgcaagaacagcaacagttacacctacatctacagagaacagagaatatcagtgtaagtaagctgttggacaactacctagcagagattgcccgagatccaaatctctcaataaccaagtttcaagttctagccgagctacttccagaaaacgcacgagcatgtcatgatggcctttatagagccattgacatctacctcaaggttacttctaccttctcattatcacagcttctgttttttcctgggaagtttgggcaaagataactttcacaaaacacttattaaacttaacaaagtataatattctttccagactcatccttcactacctgagcatgacagaagaaggctatgcaaaataatgaactgcaacaaactatcactcgacgcatgcacccatgcggcacaaaatgaccgcctgcctctcaggaccgttgtccaggtaagcttttccaacaagtaaatataattttcaccttctcaattatgtcaacgtctgtgccccttgagagttctgccatggttttaaccaagcttggtgccaactattttgaagcatatgaaagtaaaaacacatgacaataggacctagtctctcttatattactctttatttttcgcccccccaaaaaaaaattctcttatatttacttgcatagagcttaagattcaggaaccagctacctgcctaatagaatagagagtccagcaagaagccattttcatacagatcaactaaaagagcacaggtaaaacaagaaattttcatgttattgatagcaaataatcagtgccacaatccaataactataaactatcaaatgatacctactacatattattcctggaaattgaaatattaatgttcatgacctactacaaaatgaaatacaacactaccttcttctttaaatacatactcagagccagttggtttccctccttgtgacaaaaatcagagcacaataaacattgtataaaacattcggggtgaaattgataatgaattaaaataaccaatataactaaaataagtaataaatgaatcaccagaaactatgatgaaatcacaatgacataaaataaaataaaaagataataataatgaacagggaaaaagcagttccctcagaaaattcccataaactgcatacacagcattgtaagccagtccttaaagatatcacaaaaaacatatggtaaagaaaacttgtcaaataggcagacccatcctaaataaaataaaacttgcagagttcgctaagtacgttaattcccaaaagatgtaaaaacaccagaaacaaagtcgttttcctggtgataaccgtcttttatccatttaattgcatttctaaccgcaggaagaaatatgtgcaggttctattctctgaacaagtaaaaatgaggacaacaatacaagaaaaagatccatcgccaagtgacaatatttctgaacaagagggaaaccagcccacaaccgagatggaaatcaagacccttaaagtagagcttgagaacataaagagaaagatgtcagagctgcagagtgactactctgagctgcaacaagagtatgataaggtaggccacaagcaaatacatgcacctcgctggagcttaggttggcgaaagatcaagacttcttttcatacaaaaatggaaggtgatgggagtggagaagaaccagaagaaggtaaacaaagacctaattcagtgcgctacaaaatcagctctaaacgcagatcatccattgcataaattatctggacatcatatatcttgcagtaaaaaggccagtcttcaagataatcatttatatattttgttttcttatttggttagtttgattgcataaatttttccattttcttatttgttgtttgagagcaagctgatctgtaattcgccttgactgaatatagtatttcaatggaagcacaatatgtgatatcaacatattacaattactcaaagaagcacaactcctaggttcagtagaaacaagactaaagaatttaccagcataaagatactattaagtgagtggaaataattgaggagagattaatcactaatagcttacaacattaactagaaaaaaaaaaaaaagcctctttgagacttcttttagaaactatttttgagagtatttgaactttgaaggaatcaataaaagtggtttattacttgaacatttcatattccattaatttcctatttgtcattgttcaaatcaaatcaaataaattaaatagaacaaaatgtttcatataaagtcattttaccaaacagtagctaaacaacaagttcaagcctttacttgttcttaagatgaaaaacaaaaactaatcaataaactctcaaaatctctctacccggattccaacacatcatttgcctatatttcttcactcttgtcacaagtctggtaagttttcactagtggcccctcttcacaacacacacaaaagtaatgtagtccatcacccacaaactgaatacaataacagctacaaaatctcaataaaaaaggatcccttccccagcaccggaaattacattacttaaaaaagcacactataatactatatgtcttttctctacctttttgtaatcttttgcaacaaatacaattatcatattcatcgtgcaacttccttccactcccaacttctccaacattacaagtttaaagtattatgcataaagttttatgagtaaaaaaaaataaaaacaaatttgcataatttcaatgaagaaaaactattactcattatctgtgtccttacaaaacaaaaattcatcaaagaaaggttattacatagcaataattcattatctcaactcagataacataaaccactttcagaacatctgaaaactataagacccatttccataaaaatgaaagaaaaagaactacctagctccagcaccagaagacctcatgctgctccatgggaacttagcctcgctctcaccgcgactgacggaagaagtcctttcgggcctaaccctctcgggcctaaaccttccaggcctatatctctgagtctgtgtgtgagtttgatcctccttcttcccatcaagccaatgcctcttggtctctccttcctcgaccacactggatttcgactgcttactcatctgccgcttctcctcctcgataatccgaatgggataaaggtccggcgagatagagagagggttcttgagagtaacgtaggccttcttgtagtcgggcttggcgatcaaaatgccaccgcgcttcttcttttttccttccatgttcagggtttggactttctcgacctcgaatccgtagagggattcgagaacgcgcttgatttcgatcttggaagcggaaggaatggtcttgagagcgatttctgtgatgttgttgaaagtagtgggcatgagaagcttgatgggtaggttagcaaagtgaactattcttctaccgagtctgcttcccatggtttacttctcttcgtcttcgtcttcgttctctgagctgagctgagcttcactgcgggactgtaaaggaagacagaaacaagcattttttccctaatgaaatggaaatcgaatgggccggacgatcctaaataaagcccaccttcgttagaattgggaaaatttatggataaattgaaaaggggtaagttgaaatatactactcttattaattaattcatcaaatttacttctaatttcatatttaaatgaaacatactttttttttatatgcattgtacccaaaatactctaccaaccataaaagactcacgtggagagcatcttgaagtgacagggacaaaattggaacaaaaattaaaaaaagaggtaaaaataataaactttaaaaaaagaggataaaaataaaaaaaaaacaacataa

SEQ ID NO: 296758 - DNA, 2840 bp, Cannabis indica
acttatggacatagtctttcatttttatcaacttttctgagctagaagagaatcctgccattcaaacacacacacacatatattatttacatgataaattgtaaatatatattaaagaaaaacaagacttataaaactcaccgattttatgagaattaacatgtaaatactgagttacaggattttttattacacgcagaagtttagtgtgagttttttcatcctttatactcagcttttgtaacaattgtgctgcaaattaagtaaatgaaataaatagtgaatacacaaaaacaaagaaattaactataaaatattataagcatgttattataagtatgatatagtgtgagagagtagtagttacttacacatgagaccataaaaacgtttggatgttcttggcaaatgagttttgggtttcacttcaattagaacccctttctcagttcttatgtacaatccttttaatcttcctgctttgttaagtggactatctaagatggccaaaagagcctacacagtacaataatcaaataataatctctcaattaattagtgcaatcaagtcatcatcaactcacactattagctttcaatgattttgtcccgttattgtacttttatggaccgttagatgagggagttatttgatctgatagctaagattgaactgggctagttaaagttaaaaagtagaaacgtatcctgacactcatttaatgtaccctgagacccatctaatggaatacattccgtgaatgtacatcacggtacaaaaacatatccctatatatatatttatatgaaagaagacaaacctgatggacaatatcaggtcggtaatctcctttggtttttcccattttgcttaaaaaaactgagtgatctgagtttaaaagctgataagtctgttgtgaaaaagataaaaaaaaatcaaaatatgttaaaaagagaatatacaacatatgctaaaaatatcatcttttacaatctctttttatggctgaggtaaaagtttgacatatatcaaggttactttttgattgtgatcaaaaggtgaaaaatgagagatattaagtgtttgcatgaacacaccaactgagattacacatatatagtaaaaagatctaaactggttattatgtatgtatagtaaaatccaaataagtttactaaggataattagggagacctttccaactttggcaacttccaaagaagctctctcaaggacaaatataacaccaggttgtgatttgaggcttgtttgttgagattgtgcaagtggaattggaattccataatcaatctcaaatgacccatcctttccttcttcttcttcttcttcttctttgtcatgtctctcacattttttcatcttatccttgatagcgtaaggacgtaccattgtaactaataattctttctctgtttggctttgttaaacagaaaagctactaacaccataataaaaaagcaataaaatcagatcaaccatctttaccagcaatctctaatgtcttcataaaaatataattaatgtactcatcattaattattcaattacaataaaaatacacaaattacttttagaacaaactcctccaaattacattgacagtcatagtaattgtatccatacaagaaattcttacattcataatttcacaaattaaaatccagaaaaaatggattgaaatttatacctgttcaatagctgatcgcggatcgtagtagagaagaggattcacacgcttgggaatataaaagattggtgtagccgacgatgacgaaattaaccgcagaaaaaagaaacatagggttttcttatttatttaatttctagtgcacggttgttataaaaatcagcaaaaagttaatattaatttatgaatttttatatgtaaaaatatgatttttctttttttaaaataaatatcatgtaatacacgtattttatttaaaaataaattagaatttgaattcattttttataagtgaataaaatttaagaacacaatctattatgaggtatgatagtaactgtgagtgtgagccgaatattagagggtatattacacaagtggttcgtttgttatgccatatttttagtattatattaaattgtattttatgtaaaattataggtggtattaatttttatggacacctaaatatataatattttagtataaataaaaatttaatatagtattatataaaaatatgatatatatatataatattaaaaagtaatttgtggtataaatagtttaactctcagttgtaaataaatacttaagtttttttttgcggtatcaatacctataaaaaatttataaacctaataaaaaatttgcgacggatgtttaaaattttttaaattatatatataataaaaaattatatattttatttgatgataactaaattataaaattgcatcaaattttaaatttattaatttttatataaattttaaacaaaattattattaatataattaataataataaaatggtagaataaatatgggaaaataaataaatatttataaatctaaaaaaaaaattaaaaaaaagagaaaattaaaaagagatgagataaaattgtttgaagtgattttaaagtgtcacgtcatcgcatcatacttctcttttatatatatattgatatattgattgctatattgatatattgatgctatatcataggctataaaagaaaaaatattatatactatccattgccattaattgctataaatatattaagcaaattatcatatatctgttagagatattattacaatggaagataaactaagatatatacaa

SEQ ID NO: 296759 - DNA, 4118 bp, Cannabis indica
aacacaacctcaaacaagacacgcctaagcccagggaaggtcggtggacctggccggagaaaaaagacgacattcgatagctatagatttaaaaatgagaaaccctaatttttttcttataaatatatatattcaatagtatttaagtataatgattaatcctaaaaagtaattaaatgactaaatttaatgctaaaatattaaaaatggcataaaagtgaatataagcagcgtatttattattgtgatacaaattttacatcatgtcatattgtgatttaaatttggatcaacttttagcacattattgaagcaaacttttacaagatgattaccaatttgcatctctaatagagatactcttactaagtataatttagacgtatgacacaccttaaaatatttttctaaaaaaaaaaaaaaaaaacctttaatacgatttaccttacttatatatttacataattaaattagaatttaagataaaaatctttttaataaagtttaattaattgtatttcaattcagagtacaaaatgactacacaaaaacaagtaatgaaatgattgtcgcactctttcaaaaaaaaaaaaaaaaaaaaaagaaaatgattgtcgcacaaaattgtgtttgttttatataatccaggaaaagaaaatgactactatcacatcatattttcatccactttttcagataaaaagtagctacaccaacatttgacattgtttgggaaatgtttacaaagaaaaagtattttatagaattaaattcaggagaaaaagtacttctgtgtgtgtgtgtgtgattctttgcaatgttaatatcaaattaaaactataacatacacctatttactcaaaattagtacttctttaatacttttttaaataagaaaaacatacatgtttagaaacacaaaacaaaaagtaatagagtttttttaatacacaactccaaaacttaagcaccagctgataaaaatagttgtaaatcataacctaagaagccaagagtgcttccacctttgcaatttgatcctcttcatttttaggtgttggactcctattagcatcctgatacaaatcatgcttccacttattatcatgaccatcactaccaccatggaactcagacctccctccaatcaatccatctcttcttctataatttacatcatcatcgccaccacgatacctttcccttgaaggaaaaccacctctcttctgtgtttctcttctatgtgctgccccgtctccaaccaacgctttttcgtttctatcaaaatagcgagtgttgtggccttgttcctcctttctgttttctttggcaggctgatcgagatatctcagctttgcagtctctggtgctgctccatcaacttgttcaaaatcagcctggattttcttctctctaaatgaaggtcttttccttggagcatcagcttccacttcagagaacctgtcatggcgccagttggctttttcatctcctttggctccatcatctctctttcgtgtctcgttggttgacttcttattttctgtcctctcattatgttgatcccttgaatctctccaccatccacgttctgtaacaagcagagaatagaccaatatgtatagttatattcccatatatacatatatgtgtgtttacgtttggaagattacaaattaacaaaagtacaaatggatgatttaagagctttcagcctgaaagtatgaacaaaaacagataatgcttgaaagaagctcaccactagttgtgtttctacccgagctttgaccaactcgcgcggcattaccacgctcgtcatgctgttataaaacatggacaggcaagcctaagattgttatatacatggaaccacttcaaggcacagggctgaacaacaattccgctacatcaacccagataaaaggtttgcacacactgaatagaaacaaagttatataaatcaaaagagaatacaggtttttttcccctcggtataatggcagggtgttgcccaacagttcccatcacaaacctactatgccctctcaagtggtgggatttcagggcaaaaggttcatggtaggtagttccaatgcagctattaatgtctttctagttcagtttgactggcttatcattttgtgaagtgatgaaatctatatgttaaactttcaaacatgaggctactaatatatttcttaaaaaaaaaacaacctcacacataattttccacttactcatctaatgttgcaaatcctaatattttacaaatgctacttcaacttttctttgtttctttgtttgcacttctaaatttacaggtcattacaacaacaaataaattaaaaatttaagttcctaacactcttcgacctatcactgcaatttaacgtaaccaactaactaatgttggtttgttccatcagtaagcccaaattacctaaacagcacaattcacttcaagtagagacaagcccgtaaccatcatcaacatacatgctgtttgcacatatttgaggggaaggaaccagaaagttatatactataatatctgcaagcattactatggtcaatgtaaaccaaaatttgtgaggttgaatcagagtatcagtctactaagatctaatgattctaaaggcaatatgaaaatgagatataatttcatcagttttgctagcaactaaataagtttcactatagtttcatacacaacaccttgaaataagaccggggtcgaggtccatccgttggaactgcagaaagctttgttccttcgtgcttcccgttgggttttctgtcagtgtcactgcttaaagcccctttttcggatttagaatccattggtgccaaacttttaggtggcgatccatcttgcagggagggacggtgcttttggtcttgctctgtgttatttttgatgtccaaactattactgctaggtagcctctctggttctggttttccatccctcttagaccgcttgggactaatatcaaccattgacagatacatacgatccatgttatgattattatagttaagtgctcattaaaaacttgacacacatactctaaaaaaataataatttttcaactttgaatcttatgggagataattcacattcatgtctaagcttcatgcgttcatatgcaaacatattgtatagaaatgaaattagaaaatcatcatcgtctcaatatatacaaataatcaagtaaatattcaaagtagagataaaaagaacgtaattaaaacatccagattacctaatatgaaaatgttaaacaaaaatggccaagttatttgcgcacatttctcctaatctagaaacattatggatcattatccagacatacgataagttgataagcattcttacctatgaatccctaaaccatttcaaatccaatcccaatcccaattcagatagtaaccaatgtccaacacagaaaacatatatgaattatgatatgaagcagaaaaagagacagacctggggtccctgtcgaacctagaacgatggcgcttggagtcagaatggcgatcctcccaacgcgacattggttcactccttggtcttcgcccaagtatcgagagcgcgcgagaagtagaaatgaagtagtagctagctagggctgcacctttatttgtatttttacatgttttagtctataaggaagtaatatttttaatagataaaataaaataattagtatataatattttgaatatttaaggaataatgggtattaaaaggaaaattttatttatgtttgattttaaaaggataaaagtaaggaatagggatcctaaggttatgaagtagaatactataatttagttgttactagccaaagggtaatccctttggctagttctagtattttatagggagatctagttgcttagtcttggtggttggttgattctcttcagagttttctaattaaagttttatgctgttttttgatgtttttttcaggtggaacttcagtattttattgagttaggagcgttgtttgaagatgttatagctttattttctaaatttccgaaggcagttttgtctcatggggcttgctctaagattttagctgcccatggttggcaaagcatgc

SEQ ID NO: 296760 - DNA, 6132 bp, Cannabis indica
tccataaatatttagaaaattattcaatttaagttgtttcaaaattaatttcatttaacccttttttttatacttgtagtgaatattatactctgtatgagacatcggtgatccgaatactggcctacactcagctcctacttgtggattatggaatctttgaatactgacgacagtgcccaaatggtaactccttctgaagaagtccctacggtggacgtgactacagatatggaagaacagactaatggggaaacgaatattcaagcaaatgaatcaggcgaaatggatgatatgcgggaacaattcttagatactatgtccttagaattggaaccagattttgaactcaatgcagaagttgttagcaaaggagtccttgcaactaccttcggcagaagaactattgctagagggcgtcttaaagacattctatcaaagatatggttactctcagggaaatggcgtttgaagacattgaagcctgggttatggggcttcttctttgacctggaagctgataaaaaagaagtcctgagaaaacgtccctggattgttaacggtcttctcctcaacattagagattggctcgaagatggaagatgggaggaggttaatatgtccaaagccagactttgggtggaagctcatggccttccaaccccctacctcacctgggaaaacacgagggtaatcgccaaaaaagttggtgagtacatagattttgatagagccaccagagagaatatcgctcggagggggttcctgaaattccaagtcgacatccttctcagccaaaagctggttgcgggcttctatcttaacatttcaagagatagaaaagagtgggtgcaattcaaatatcacaagctcccagccatctgtttcaactgtggatacctagctccttcctattctaaatgtaacagacccaccgaatttgcttacccccctattggaaaggcagtccccctgggcttggattaaagtcggagtccccattaaaaactgcttcgatctgagaatcccaaagctgaagatacatgacgcctccacctccggtgtctccggcgatagagttcaaacagcaaaagacgataagggcaaatcggtcactagtacatgtgacaacgactcttctgcggcttcggtacagggtacaacggccttggttcagggtacaaagggtcttttgaacgttaggaaggagaacgctactatgggtaatacgggtggattgctttccttgccatccaggtcttcccctcctgtctcctccattttaggtaatggcagtaaagcacgccttcactatgccaaaagaaagaaaacccaccctatgaaccttattgataaccgtggtagagacaaggggatcattgctagccttaaggctgatattgggcccactagggaccaattagtggaaagacctcatgaagagatatgcaaatccagagtgcctaaccaacaccctgagccaacatatgtaacgtggcccactgataagtccttagatgaagtggtaaatgaaatagtggacccaagccatgtttatgaaggcccagcccaaacaattgtcactcatgacataactattttctctgatatgggccaacctttctctggttctaaaaagagaaaagcccctttgtcaattatacctgtcatcactcctgacgaaaatatcatcaacctgggcaacaagtcgggttcttcatctgcgaccctgcttcctcctctcgaagttaataccttcactccaggcagcagtggcaccaaaaatgattcatcaactcgaaggaaaagcaagagaagattgcgtaaagaccaccagaaacacgagactcccacacctttggcgccggcaacagtctcggaaagtgggaacttagagcaaaatttgtttgaagtggctatccaagaaattcaacattttcaagtgggcgaggaggcggcccttatcatgccccccaactcgccatgaaactcttatcctggaattgtcagggtattcgtagaaccccggcaacccaagcactccaagcttgggttagaattgatcaaccggagtgcgtgtttttaatggagactaaaactaattctgctgaaggagaagccctatcgaaaactttcaggttccccaactctatgagcttacccgcagaaggcctggcgggtggtttttctctcctttggactcatgatattaaactccaggttagtaattcctccaatggtacgttcatggctgtcgttactgataaaattaatggttttagttggatgctttattctatctatgggagaccttatgagaatgagaagaagcagttttgggaaaacttgtccacaaaaattaatcactcccagttaccttggcttttagtgggtgatctcaatctcattgcccatccttgggaaaagaggggtgggaggaaggttcggcctggtgatactgctatcctgcagaatgtattgatgaccacgggaggggtggatcttggttacaagggttgccaatttacgtggcaaaataacagattcaatggggacctaactagagaaagacgagacagagccttggcctccgctgactggatcacctccttcccaaatgcaacggttacaaactcccctatttcagcctcggaccatggttttatcttggttgataccaatgatggggataacagaggatacaaaccgttccgtttcttcgaggcctggactgctgatccttcatgcctgcagacgattgagaaggcctggagtagcaatggtcaactcacgaagacactctccgtaaagttgagtgatattcgaaaagccttgcaagtttggaaaaaagaggtgttcggtgactgtgataaattgattaaagatgccgagtctcgtctctcctggattcagaatcaacccataacttcggtcctctctgcggaagaggctacaattcaaaaactcatctctgatctgtggctccgcaaagagagtatatggcggcaaaagtcaagagaaacgtggctcaaattaggcgatcagaattctatgtttttccatgcctcaacaattatcaggcgtcggagaaacaaaattactgccatcaaagatagaaatggagagtggttcgaaatgctccaagaattggtagaatctttaatgatttcttcattgacctctttgacagcagcaatccgttcattggtgatgatttctctgcactcttcactcatttgatcacgagcagagaaaatgatttgataaagcaagttcccctgcgcaatgagataatcactactgtcgccctccatgcaccctttgaaggccccggggcccgacggcatgccgggttgtttctacagaaaatattggaacgttgttggagaggaagtgatctctatggtgcaatctttcttctcggagggatttctggataagcaaatgaattataccttcatttgtttgatcccgaaagaagaaaatgcttccacggtggataagtttaggcctattagcctttgtaactttgcctacaagatcatatcgaaaattcttgccactagactcagaagtgttatgaacaagctaatttcccctcttcaatccgctttcatccccgggaggtggattgtggaatcctctattctaacacaagagctagttcacactataaaggcaaagaaaggcaaaggcggccttttggctctaaaacttgatatgcacaaggcctttgatcgaatcgaatggtccttccttgagaaagtcctcctttgcaatggttttgacaaccaagtttgtgggttaatcatgacatgtgtctccacagtctcttattcggtcctcctcaatggaatcccccaaaagaagatcttcccaaagcgtggccttcgccaaggggaccccctgtcacccttcctttttctcatgtgtcacgaggtcctctccaagctcctccttcgacaacaagacctcgggaagcttcatggggtctcaatctcgagatcctcgcaggccattagtcacctcatgttcgccgatgatactatcctcttcgcccgagcgaacacacgaaatgttgatgcaatcttggattgtatctctacctatgaagggtggtcgggtcagaaatgtagtcttgctaagtctagcattcttttctccaagaacaccttggtctctacccatcatgatatcatctcaatgctgaaagtgaaagaatgtacgggaaatgaaaagcatctcgggaacccctttgtgttcaaaagaagtaagaggcaggaattccactttctgaaagacaaggttctccaacgaattaatggatggaaatcaaagctcctctcttttgcaggtcgcactaccttagtaaaagcagtggcctccaccatccctatctacaccatgtcaaccggcagacttccggtatcaacttgtaaagagttagacagcttaattcgaaagttttggtggacgggaagcaatgacaaagaacgcttcatggctttgataggctgggaaaatatttgtaggcctcttgataaaggagggctgggatttagaagaatggaagacattaacaaagccctcttagcgaaattagcttggcagttcgcttcaaacaaagaagctccctgggttaattgtttcagagctaaatactgtcggggaaaatctttttgaatgctgagataaaagggactgattcttgggtctggaagggaatcctcaattccaaaaatatcttaagaatgggtagtcatactctggtgggtaaaggagacacaattgatatctgggaacaacccttgataccgtggctcgattatgaagacttcaaggcacttatgaataatattcgacttcaccatccgctccttacatcagtcgctgacttaatcaattatgatggagaatggaattacaatcttgtgttgcagatttttggtaatgacttgggcaagaaaatctgtagtatacggagattacctgataaccatcaagatactctggtctggaaaccctccaccgatggatgcttctctgttaaagcggcgcacaacataattgctaagtcccacggccagtcctggaatccgactctctggcgttccgtttggaaaaaagacatccacccacgacattccatcatggtctggagagttgtgatggggtgccttcccactaaggacaaattgccttttgtctccgacaaaaattgtcctctctgtgactcgtgctctgagtgcatcactcacctgttctgggactgcccgttagttcgtgctctctagtttgggggtcctttccctttaaccatagctattacaaatggtctttctatggctgacagggtttcagcgacaatccattgcatccccccagacttgaagtctaatttcttcaccttcttgggatgtcttttcgaaagtgtgtggaaagcaagaaatgaatcaatctttagaggccaaattccaaagattgatcacattagaagaagttttctttgcagatatgaggaggccattacggtgagcagacgggaatcagaggacaaaccccttcgctgccccctgcaataaccttcctctgaggtccttagcgcttctgcaatttgtttggtggacgcttcttggaaggatggccaggcaggcattggcgtaatcctccttgaccaagcttcaaacaattggaaatggttcgctaagttcacttatgctgcctctgctgccgaagctaagatgttggccatcctctgggcccttcaacttggtgaggaaaggcatttcgactccattgctatcatgtctgatgctctcttgctggtcaatgctcttcagaagagacaatgtccacccctctgggaagtaaaacctttagctctttcggttattaagttaagttttaaattcaatgtctgtctttttcattatatccctaggctagaaaactctactgcggattttattgccaagaaggctagaactgatgttggttactcagttggccactgtatcagggaggggtcccctattgtgatgtccaattttctattgcaatgaactagttttgttcttccaaaaaaaaattaatttaaattaatttacaattcaaatttaattttctataaat

SEQ ID NO: 296761 - DNA, 2165 bp, Cannabis indica
gtcttatataatttaatatattaaattttaagatatattgctaactaataacatatccactcctaaaaagtcttagggccaataacaattctcaataattacagtagcttatgatgagattaaagtcgttaattgcgtgtattaatatatatttttttgatgccggccagcaaattacgattatgccttttaatttctctgttaaacatgagaatataagagagagaatcaatacaaatcaaaacgcgtttaattaactaatcattatacaatttttttattttcatacaaaacaaaataataaagagaacctaaaaacaaggaaagccctcaaattggacgaattttgaggtactcatatcgaaaatttcagacactaaacacaaaagaaagaaagaaaaaaaattattatgaagctctggaaaagagctgtgggggttctgaaggacaagaggagcatctacgtggccggcgtgtctcggcggacatcctatcggaacccccacctggaggccataatcattaaggccaccagtcatgatgattcctttgttgactacaagaattttcaaagagtctaccaatgggcaagaacatctcctctttacatgaagcctttaatatggtctctctcgaatcgaatggacaagacaagaacatgggttgttgcactcaagggtttgatgttaatccacggcgtcatatgttgtaaaatccccgctatccagaggatcggacggttaccgttcgatctctctagtttctcagatggacacaccaagcctagtaaggcttggggtttcaacgcttttattcgcgcttattttgcttatttggaccaaaaatgctttttaactttttccgagattaaggaaaataataatgccaaaaaaagtagtttgggggaagagttgcggcggttggtgacgtggcaatctttgatggatctacttttacaagttaggcctcaaggtgagaatatgaggagagttggattggttttcgaggcgatgatttgtgttgttaccgaggttttcgaggtgtatgagaaaatgcgcagattgattagtcaagctgttgctagggcttatgaagatgatcacatttggcctcggcccggggatgttgaggtcggtttggctaatgggattatgaaaaaggcgacggttcaaggcgacgagttgtgcttatttttcgagctttgtagggaaatgggtgttttaaacgcgtcgttttccccaaaagttgagcgaattccggccgaggaagactttagagagcttgtaaggattgttgatagggtttctaatattaacacaagagaggatgaaatattgagtttggattatgaagatcatgatgatcatcaagatgggactattgtaattgttgatcataattatgatgatgagcaaagttattcttcaaagactataattacagataaatgggagatttttgatgaagaaaattatgatcagaataaaacattaatgttggtaagtactgatcatcatcatcatcatcatcatgatcttgattcatcaaatcatgatcatcaactgattatgctttctcctcctcctacaataacagctcttccagacttaattactttctagtggttaatttgtaataataattctttaatcgttgaatattatattattacgtgaaaagttaattaattatggctcttaaaatttaatttgcagttatttttattctagctatattatatataaagtacttctttagtttgataggagaaaagaaagatttttggaattttgaatatttttgtttctagctatagtttttcaatatttaatgtctgctaatacacaaaattaattattagcatcaattgattattattctccttcttctttttagaaaattagtgacataaataagttagtctcgtagttagtgtttaatactgtgtaattaatttttttttttttttgggaaatggaaatatgtgtaattaaatttaaaatcagttaataattctatttgaaatttacttaggagatgagatattgcttgtttagttggacttggacggctaattgtcctcatagacaacttctcattagtcataatttttagggggttttcaatattatacttaaaattgattttatttacaaaaatacctt

SEQ ID NO: 296762 - DNA, 3822 bp, Cannabis indica
accatctcatcaatattccttcataatatactttgaatagtctcatttgttttgtgatcatcatgatgaaccaggcgcacgaggagaaagtgaacaacatggagttcactccaccgtccgatcatctctgctacgtccgatgcaacttctgtaccaccgttcttgcggtaaacatatataatcaatcctacaacacagatcaattatgtatatatatatatatatcaattattgttatatattaagtatatatatctaattagcgcctttggacctcaatgcatgtatatatcgtagtatagtaattgatataaatcaagatatatcagttaaacattaaggtattggtaaatattgcaattattattggtgaggaatattacaagttacttagattgtcagagaaatatcccaacttgtttttgtttatttattattgttaattgttagttagtgaattaataaggataagccaagaaaagaactcatgtgatttttgtgtgtggataatctccaaaacgtgtgtatgttttgttttttcttattttagttgtagtgataagagagagatagagaagggttttattagatatgattttggtacatgatgagtttattttataaatttatattaacacagtaacatattattttattctatggggtgtacatgctaggttgctcttccatacaagcgtttcctggacacagtgacagtgaaatgtggtcactgcagtaacctttcctttcttagcaccagaccaactccactccaacctcatcaatttctcgatcaatatcccttgatgactcatcttccggttattactattcttaagcttctacttcttcatcaccattacacacacatttatactgatctatatatatagttaatgtatatcattgtttgtatacatccacttattttgttagatatatataaataaaataaaaattaaaggggtgaaatgcatgatatgaaggggttttgcaataatgatcatttgaggaagggttcatcatcaggatccagcccatccagtaccacgtctggcgatccaatgtcctcaacaggagctccctttgttgttaaacgtaaggctactaatatggttactatatatatatatgtgtaaatttatatttggtactttgacaaattataaattaaatataaatatacattataataattgttttgcagctcctgagaagaagcacaggctaccttcagcttacaatagattcatgaagtaaggagatattgagagagacattttattaaacttataaaacaattagtaacgttaatgaattgattatatatgaacttgtacttaagttatagtgtatatacatattgttattatacctgatatattatatatatatgtcccccagagaggagattcaacgcatcaaatcggccaatcctgagattccacatagggaagctttcagcgctgcagccaagaatgtaagttaattggacgttctatcaaatttaaatattgatgatatatcacagattcttaaaaagtatgtttttccatgcaaatatactggttctacatgtataatctattaattaataatttttagtttttatatcacaattaagatatatacactacactgatcatcataaaaatatcatgagcactctcgtactttcaaataatataatattatatatataatataataagtctggctactaacatcatattttaatctaaagtgggctaggtacattcctcatccgcctgctggatcagtttcgggaagcaacaaaagggtatttttttttttttttttttgattaatttgattttaatataaatattaatgatcttttcaattggctcagattttgcagcaatgagaagttgtcttaaatctcatcattgcatggagattcaaataaatgggaccatatatatatgtaatatatgtggagatcgagcactttcagcccacaagttaactagctaggttcatgaagagagcactgcatttgatgtgtttctcaaatgtatgttttggactttggttttatgttttattaattttcctactgaacttaatcttagaggtacttttattgaaactattaattagcttattattaattcccactactctattaattaattaaataatatggatgtgaagtcttgctctttgctcttgtaagtatctccatatatagctagcttcttatgttcataattatcaaaatcatactctcaaaatagaattggattagtttgtttgattattaactaaaaaaaattcaaataaattaatttcctcatgaatttaggttgagagtaaacacatatattttttttaatcaagaaaggaattcattaataaaacaaacaaatttagcactggagcctcacattttaaatttaggtaaaaatgatttgataaaactcagctcaatttgttatgagttagagtgctttcattaaatacgcaatgcacattacaaaaggggtgagccaaacgactctatcagttagacacaattgtcaaagaaatattttaacaacttgatattctaatgattacacaatcacagattataacagaattggacatgtcaacaatccgtgccaataatttaagaggtgctagagtagtgtgcaaggaaggaacacaagaattggggactgatttgctattccttaacatctcccttcaaatgaaagggtgagattctcacaccaagtatgtcaatgaggaaagtaaaaacaatagtatttgtatctatggctataatttcggttacaccaatccatataaattgttaatatgtcacttaaaaatcgaagcaaatagctcttttcgtagtagtgttggcagaatcactccttgtaatgatgatatcatctacaaagattagcacaagttgaatacatttttcttatttgtaaaagaataatgaagtgttagatttagattttctaaaattccatttcaacaaggtatcttttaatttatcaaaccatgttctaggtgtttgtttcaagccatagaatgatttgttcagtttgtaaacataatcttctttgccttttttctcatagccttgaggttgtaccataaacacattctcttccagaactccattcagaaaggcattattaatttccaattgcattatgtcacagtctcttgatatagcaaaagtgagcacaattctcacagttgcagcctttattactggactaaaagtctcaccatattcagtacctagtatttaatggaatcctttggccataagtctggatttgtacctttgaaaggttacatcagcattcatctttactctaaaaactcacttaggttcatgtgacttgaataaggaaccaacatccatgtcttgtttcttgttaaagcaacaacttcataatccatagcatttgatcagcctggatgttgcagggctgcttccacactataaggtttagtatcatcaagagaagttgtcacatggctcaataaatccaaggtttaaatatgtaagccttatctctagtcaccatggtgttagagatattattacaatggaagataaatcaaggtattacaactctattgcaatataatacaaggaccaacaaagagattaaataaatattacagcaacataatatacaatatatatacactatatatattatatataagaaatgtagaagaagataagaacacatgtaatataatatatatatatataagagaataatatatatgtatacactcactcacaaccttgagtgtagattagtggggatcaccatgact

SEQ ID NO: 296763 - DNA, 1539 bp, Cannabis indica
ttaaataccgaaacaaataaagatgcaattggtacacttttttaaagagtgcattgtagaattttcatattatacattatcataaaattatggatagcttaaatttatgttgaatgaaaatacacagtcaagaagaggagggatttgttgttgttggggtaggtaagcatgtatggagatttgagggataatgataataaaaatgataattatgggaagataagaaaagttgaaaaagaaatgtaagtgggggtcttatatcttacaaattacaataatgaaaatgaaagctaaagcaatttttttttttttaaattagggttcctttcttatgctatcagcctatcattaaccatcgatgatgataggtcatttctttacaattcatcatcagttttttaatacgaacagtcttctcccactaaaactagatttgcaatgtagttttcaattaacagtgaaaaatgaataatttttcttttgtcaaacgagtacatgtttgaaaaactatgatcaatgcataccacttgcttgaaaagcttaaattaactaatcttggatttcacaacactatgatacaaacaaattcacataataactcatgcccacgaaaaccagttcagtattccaccattctttagttttttcacataagaaaatcttagacttcggagttttatttgaaattcagatttttttcatgataaagaaaatatatactataaaaataaattatacatcttttttaaaattattttgtctaatttgatgtatcaaaatatggtaaagttaaaaacaactaaaatagtttggtaacaacacggccttaaacaaaagagtgtcaagtttctttttcctttttcaaggctttaaccacacccaaagtgcatatatattaatataccaccaccaagactatttgtagtttatatccaaagacaaatcagcaataacacaaagatgtttcatcattagaagaatacatgtttagatgaaagagacgagaaaaccttaatggattaatgatagatccataagaaaaacattaaaaaaagctgcctagcctgactggattccattcaaatgcattaacaaagtaaaacattacataaagcttgggcagacaggaccctttgacagccccaggcgaacttccatcccgtgatgcatatctactggtcggaaggtttcggattcacgtggatctgcagaaccccatatcaaaattattaaaaatgaagagcaccataatcataatgtatagaacaatgacacggctgttagtttgcaccacacgagtaaaaattactctccctttaagaagaattgtacaaaggaagtcctggagatttgaggaagtgacgtggtaaactaaaaaaagttcaggggaagaaagggatacattaacgagttcaaactcttaaacgcctatcttacacagagaaacaaattcccactcattattcgtgtcatcaatcatttgttttgcttcaattgaaagactttgaagtctaacgtgaaggactgaagatgagtgag

SEQ ID NO: 296764 - DNA, 4331 bp, Cannabis indica
agcttgtagaaccttttcccgaatgtaaaacatttgttcttcttcttttgtagacttgattacaaactcaaggcaatacaaaatatataaatacataggaagagacgaacacgctctcctctacacaacaaagacactgtttcttacaagatataaattaaatacaaagatatcaaagtgacacatgacctagctgctgtaaggtgtatttataattaatatacaccttattgacagatcatacacgacctgaaccagaccacaactcacttggaaactttcctaaaataattcttcaatcagcctagaaatttctcattctatacctatagaatcgtgagccgtaagtgtgacttcacttttatagaaaagcaaactcttgcttcactagaaatctgaacaaacaatttaaaaaactcatgaaggatcatatatacataactgaatagatagaaatttgttgagttgtcaaacttaccatatatgccttacttttcataaatagaaaagcttgtaatatttcttaccttatataatttaattaatataaaaacaaaattaaagaaacaaactaaacaactcatcccaaaataaataattaaattataaaatatttttctcaattaaaagatatcaaaaatagaatcaacaatatcctcctttggtacttttttgacaaaacatattataagaagaaaacatacatcaagtattaaaaataaaaataatagagtattgaatatactcccccttcatgaaagcatactaacacataaaacaaaacaatttcttcaaagaaaaagttcataaactacaaacacacaaacaactcctcctgagttcaacgcaaccacactctcgaagtagcggaaaataaagctcataaacacttctccccctttttgtctatcaaagaagccaaagacaaaagtaaagcaacttctcctcctttttgtcggtaacaggagcacaaggcatactggagcagcagacgaaggtggagctttggcctcagatggtgatggtgtaagtgacggttatggagttacaaaaaaatgaataacgaactagtctctttgacgattgggacattctttgacttgccattagaggttggaaaccctaaaagatcattcacactgtaaaagaaaaataaaacttggagaaaataaaaaaaaaaaatgagagagtgagatagtgtagaatgtggtgaggatattatcaaggaaatgaaagagagataagggtagttagatatatagtaaatagaaatcaatattcaaaaaattagaataaaaaaagaactattttctttcttacccttgagcttcacgtgtgcctaaaacagaaaacaattaagctcatcttaaatttggtcaaatgtttccattaaagaaaaaaaattcaagaccaagaccccacaaaatctgaaaacaaaaccaaaaaagtgaacttagccatggattcttgatgctactcattttcatcctgtgccaattggtcaaccgaatgcgggttggaactatgttgcagattaccttaccccagatggtctttgaacaaagacaagttgaaacaaatgtttagtgaggaggatgtcaaacttgttcaaaagatcatgtgcaacaacagagatggggatgataaatggatttggaaaccaaattgtaatggaaatttctccacaaaaaccacgtatctagttcaagttgataatgtgaatgatgtaggggtcacttcccctaggggtttataactagagaaatggaagaaactttagaaggctaaaattcatgagaggcatcgttttctgtaatggagcatcatttctgaggccattcctaccaaggatcgtattgccaaaattatttcaggtacgaatttgactttttccctatgtggtaatggccctgaaaccattgaacatgtgttcctctcttgtgagtttgctagagcaatttggtcctctaaccagtggggttttgttccctctgagtcgctttccccaacttgtgcagcttggttaagaaatatttggcaccttaaatcttttggttgatacataccatttcctattatctgcttccataatccatgatgtcatctggttatgtaagaatgatttggttcacaacaacaaaattccaaagagcaacatttctttcaaccaaatctacttatctttcctggaatataaaactgagatcatgcgtttggagagtgacccaagcaccaacaagaagtggattcctcttaatggctagatcaagattaatttagatgggacttgttcccccaatactaatgctcttagtgttgtggctcgtgatgagaagggaaaggtgttatggattacttccaagttataggggttgtctcctccctagtggctgaagctagcattgctcttatggcatctgtattgcatttcaaaaaggccacaaataatatatttggcggagggggattctaatttgtccattactgtagtaaatggaggagatattccttaagagatcgacagaaagaccaaagaaatcaatagttcgaagatgttttttaatggttgtagtttcttattcacacctccgtcgtataattttgttgcccataatatggcaaagtgagataagggaatgtgtgttttgtaggatatcaattttgattcccttcctactgaactgttttgtaattaccagaaatcttccttttagtttatgatatccacgtaggagtataatggagcaaaacaccaaagttgtcaaccacaataagttatgacttgttaggctttgcttaatatgaagactataatattgtttacaaaagggaggagtaagtgtcataaaagcaagcatctgaagcaagcagggaaaattatccttgccttaatgaagcatatgctgtacaagaaaatcaaagcatacaaaatcaaaatatctaacatattaacaagggaagaacatgttaaacagattaaaccaagaaagaactacccgcaagcagtcaccagaatatagaggaagtatcaaccatgttccattttcatacatttcatataggcattccttttggcacaatcttatctttcatccacatgtaaattggaaccaacaaaataagttgctgcagttacaccgagaagtaatcgcagaagaaacgttattgaatttactggcttcttcacatcctctgcctttggaccaagcagcaaaaatgcttaaaccatcagataaagaatgtgtacagtaagtagatatattgactcttacataatacatagtgccacatgttaatgcatcttatttccaattattgtttttaactaacttgatgatgataatgtaaagaagaaacaatttacctgaagaggtgagtccccagaatagtgcttcacaccagtcacagagcaacccataatcaatccatgacgacgaacaccacggtaccattttggacaaattcttttcactttttactaaaaccagcttttttaaaccactcaatgtactcctcttcctttgggaagagcatccatacgtcttcaaaaaaacgagacagctagaaggttgtgtacacaggacctatgatacaagctctccctcctatctttaacaccctgtatgcttctttgatcccacattgtggatcaggccagtactcaatactaagtcaaacaaatgaaaaaacttgcattaataacagataaactttcattaattagaaagtttaacactagtcattgctaaaactaataataatgccagcaagtagtgtaaatggatgtactttagtcaccaaggagtttttgtagagccaaaagtctgaagtaagaactctaaaatattttgtcacaacactaagtagtgccaaaaaaacaacacaacacttttggtggatggattccaagcaccaaattggttttaaaagtaactttttccgacaaaaatattagtgacacagagtgcaatatttcagactacttacttttgctgctaaaaataactgtagcgacttgagtgtaatatttgaggctatttagtgactttcaccgcacattttcataaaaaataatcaaaatccagttctgatagctccttattttaaagcattaatctactaaaaggaatacaagtttgataaagccaaatttcttctatataaatggtatggtacccaaaaatatttcgcacacagaaaagcttcaatagtaagctaaataatattagtacatccattcacaccacttgctggctaattagcaatttttttccctgaattttgacatatatcaaatcatgccccctaaacgtttttggctgttaaaaatt

SEQ ID NO: 296765 - DNA, 1149 bp, Cannabis indica
aaacttaaaaagaaaaaaaaaagagttgttggtgggattttaacctttgatctctaacatatatacaatttagcttaaccattgcaccaaagctagtattatgtttataaatatcatcttttattacaaatatgtgttgtaactaactaaaatgtatatacatttttttcctaattttttagggggcaatgtgggtccgcccttgacagggggtacactttcggggttggtaggatttggcctgtcctatccaattggttgagtgtgtttggggcggaatgtacctatcctgaacattttttctttagtttaagccagcctaaagatttagtcttacttgggggcccattctatcaaacacagaatccttgggtctcgggttagaacgtgtttgagcattctgaggtggaacatcgttgtcacgacctgtgtggttatgagtcctctagttagtgcactcgctgatagggtgactggtggcactatcattattgggattggggtaagactcccctctacaagacctactccaatcttgccttggtgggacatcttccattctctcgtcgtctttggacaagccctgaaattggtcagtcctgccatatgctcttctaggcaagatttgatcgtcattgggctaaaagggtggcggcctggtttgagacacagttggtccccctggtcgtgaagttttcccgtgatccttagggcgttgagttccctctgggacatagggacattttccctaaaagggatcccttatgaggggtggctcttcaacctaagattcaaccctctcgtttaaccatctgatcagtttgttagcctccctacttcagcagttcaacttttcctgatgggcttggaggatcgcggcctgccgatccatctattcttggaatttgcatctctgctgggtgaaagcatcacccatagcaacacatgtttcttgttggtcatgatgaaggaacttcgtgtgaccctgcacttgtcctacgacctctctcattctaggtcaacatggggttcgtcgatactagggttgccaaccccatgtagagtctcactagcataaatgttgtgataaatccaacacgcaagtatacatattattttaacaagtaatactcaggtaagtgagatcgt

SEQ ID NO: 296766 - DNA, 1625 bp, Cannabis indica
ctttcatttaataagtttgttatgtatgggaaatgtaggaagaaagggaaaccgagccacgtcgaaatgaagaaatgggtcctttgattctcaatgcattcgacttaataattttatctcaaggattaaaccttgcaacactgtttgatcgtggccaggtaggattttgtgtcagattcattatatttgttgcctgctccatataatggatttatcgaacctgcagctcaaaatgtttgtcctttttaatttgtttcagttttatgtttctcaattctaggaatctatgaaatatcaaacacgctttgtttcgcaaaagcccgcaaaggttgttttatcgagcatggaagttgttgcacaatcaatgggttttaagactcacattcgaaattataaggtaaggcctttctatattccacttctcggttttgatttcatcaatctatattcatcagttctatatgctctaagtgcacttgcatggattataggattgtctttagttaccaatgaaaattgcatagaactagaacagggctaccacaccattcactgtcgtcatctgattcaatacctttggaatgattttttgtttcggtcttgttcttaaaaaaaattgatcatttgcagatgagagtggaagggtcaacaacagataagaatactcagttctcggttataatggaagtaagttaaagattgaaatttagtttacactacaggcaccatcatctctaatttgattatactgatattcttttttcttttcttttatttttcaaaagatatttgaagttgctccaacattttttatggtggacattcaaaaagcagccggagatgctagcgagtacctcaaggtcggtgtttttctctttatcattttccatttcaatatttggatggtaaataagatgattggattcaataatgctgtggtgcagttttacaagagtttttgtggcaatctggacgatatcatctggaaaccacctaatgaatcgagcaaatcaaggttctctaagagcaggagtaaaaggagatgatggttttaaactaactcggaaaattgtgtgttttaagaccttgaattgaattgaatgatggtatggctgtcaaagtaaaaaaggttgttacttgtttgttggttccaaactcatcctaagaagagagtgtattagttttttgtgttagtttgattgtaaagtggtgtttttctttataaaggttgaatttttatagcagttgaaacttgaaacttgttgaaagagggacctagttttagcatggtgcattaagattgacataaacaataacaatatataatctttgtatttagtttgaacttcgattgaaagttattctatgatatctctactttgcttctcatttttctcctctggtctttcctatagctaaataaaaccaaaaaatcaccacttgaaaaatttttatatattaagaagtattggattattatgtaagtttgtgcatgtcgtgttggcttggttagtatttatgtgtgcttttcaaaaaataggtcttgttttactcacggtcggcccaaatattttaggggccttgtgcgaaatttttaaattggaccctttagaaaaaaaaaaaaa

SEQ ID NO: 296767 - DNA, 2977 bp, Cannabis indica
taataataatttaatctagatgtactaattttgttatgacgaatctagttacgtttttttttatatttattcgtaataagaattatcttcaagttagttatattaaaaaaaaaattatcaaaatgatctattttttaaaataagtctattttatcatttaacaacataaataatccaaacaataatttttagaaaattcaaaatgatattaatccggtgaataatctcatcccacatataatacccctataatccatatatcaaacttgaaagaaagcattaagggctaaagagagattaaagtcataattggaggaccaatttataaataaaacaaaattcgaaggcaagaaagcaatttagataattataagtactaaaaatagaatcaaaattttttccaccatttttgcttttcttcttcaaatcggagaaaacagagcaaaccagagagagaggagagagagagattggatcagctatgcagtacaagaacctgggaagctccggtctgaaagtgagccagctttcatacggagcatgggtaagtttcgggaaccaactcgacgtcaaagaagccaaatcccttctccagtgctgccgtgaccacggagttaacttcttcgacaacgccgaggtctacgccaatggccgagccgaggagatcatgggtcaagccatagggagctcggttggcgccgttcagcatcgtcgtctccaccaagacatcgtcgtctccaccaagatcttctggggtggacctggccctaacgataagggtttatcgaggaaacatatcgttgaagggactaaagcttcgcttaagagattggatatggaatatgttgatattctttactgtcatcgccctgatacctcgactccgattgaggaaactgttcgagctatgaattatgttattgataagggttgggctttctattggggtactagtgagtggtctgctcagcagatcactgaagcttgggggatcgctaatagattggatctcgttggtcctgttgttgagcaacctgagtataatttgttgtccaggcataaggtcagccatttcttcaatttctttcttaatgctttttatatatatatatatatatgtatagaaatacattcatttcgggaaatttgaagtttcttttttatgtacttttttggttttttcggtatatgggatttattttggaccctgatgatgatgatgaagataataaatttcggtttttgttttacaagaatgtgaattagggttcttagattattagtattcttttatatatatatatacatttttttttatgacaatttgaaatgggtttcctgttttgtgagtttttcttgtgtacttatttggttttttatgtacatttaggattttttttcggtatatgggaggttttttttttgaccctgatgatgatgaagataatacattttgtattttttttttatatataaaaatatgaattggggtttttagattatttgtatttttttgttctgtactcatatgagcgtactatttttcttatattttcgttctttttctgtaactgggaattggggtatttttgatttggttatgttgttttgtaaaaaggggcaaacttgtccttgatccagttatgaaactgttctattgttcttaatgtgcgataatggaataaatcatttgtttttatgggacatagttatttattgggtgaaaggggatgttggtgtgatttgttttgttttgatgctgaagttcttcatttgaatcaaactttatgatggtacccattggattagtgctgttttatttgatgattacatatttgatctgctttttgagagttttacaggtctgttaagaatttaaaagacatgattaattctgatcattctattagagttgttaacatatttcatagcttcttttacttttttcctaacaatgaatgaaatattggtcttgtttaggcatgaaatgagatctaattagaatttgtttgtcttatgctttatggatattggtcttgtttaggcatgaaatgagatttaattagaatttgttgtgtcttatgctttatggatgcaggttgagtctgagttcctccctatctacaccaactatggcattggtctcaccacttggagtccgctcgcttctggagtgctcactggaaaatacaacaagggcactatacctcctgacagccgatttgcattggagaactacaaagtaatattcgattgactttgtgcattttgtgtcaattctcatacctgttttgtttaagctatacaagttgcatcatgtgatgtctgttgttcggtgccactgaatttattgcttattgaaatttagtgtggattcatctcctaatcaaaatagtatacaattcctacaaagtttagttggtagatgaccctaaaaagtacagtattgattgcatttcctatttcggcttgtgggctcacatgtattatcgttgccttgtttatagaatcttgccaacaggtcactggtggatgatgtgctgaaaaaggtcaatggtctgaagccaattgctgatgaactaggtgttccattatctcaacttgcaattgcatggtgtgctgcaaaccccaatgtctcatcggttatcacgggtgcaacaaaggaatctcaggtttgttatgaatctaatctatacaacattgttgtcacaagtcatcaatataatttgaaatctttagtcactcatacaacttccccttttctctacacagattcaagagaacatgaaagctgtcgacgtgatccctttgctgactcccgctgtgatggagaagatcgaggccatcgtacaaaccaagccgaaacgcccagaatcgtacaggtagacgcgtgatgatcatatttattcaagtcccctttgtttctgcacattgcaggctccattcttccaacactgtaggaaatagaatgttcatg

SEQ ID NO: 296768 - DNA, 2127 bp, Cannabis indica
tttttttttggttttattttagttttttatagctaaaaatgccttcaatctaatttagatatacaattgaaataaaccgtttcttttcaaataattggtgtcaagttttgcaaaagttatagtgtatcccatattttaaaatgagaattttatttactcccccaaaaatttataaatacactctattttaagaatttttatttatatctaggagaagatctgatattgtggtgaaattttgggaatcgagataaagatttcactgataattttaaagcacaaattaagcgttgcaaggaggagatgtttcaaaggggacaagatgaggtttctttgtgtaattcgtgatgctaagagaagattagttaaggttcttactcaacaagaaattgtggtgagattttgggaaattgagataagaatttcattgataacaagaaatgtttgttatacattggtccatgggggtgatgagttagggttgattgtcccaggtcgagggatctgttagggtgatcctatttcaccgtatttgtgttgaaggtttttctgcgattttaaaacgctatgagcgtcttgggcttatcgtggatgtaaagttgctagggggctcctagagtttctcacatgctctttgcgaatgacagttatatttattgtaaggttaatgttcgggaagctactcatgttcttcaattgctccgtgtgtttgacaagtcatctatttactacaactctaatacttgtgagtctttacgggatgaactctgtgatcttatgggtatttttgaagctgataagagtggtttatatcttggcctgcctaataccatgggtcgtaataagacggccttgctgggttttcttaaggataaattgtaaaggcgtattcaaggttcggaagggaagattctgtcttgtgcagggaaagaagttttgttgaagactgttgctcaagctttgccaaattatgctatgagtgttttcttgctgcctatggaaacatgcaaggagttggagcgattgatggcaaaatactagtggcaaataggaatgtctaactctaaagggatccattagatgagttggaagcgcttatgtagacacaaatatgcgggtggcttgggtttccgtagactttaatcttgctattttaggtaagcaaggctggaggttggttacccaactgaattcattagtaggtcgtatgtttaaagcgcgttactatcctcagggttcttttcttaatgctaaattaggcgttaatccaagttttgtttggagaagtattttggaggctcaaccccttgtgcttgcgagtgcacgttgaagtgttcggaagtgttatttcatctcactctaggttatgaaatacgaaagtggtctctctatttttgatggattctcgtgcttgggatacggaggtggtgcgtgatttgtttgaagaacgagatcatgagcttatattctccatttagttgtcttcctctgtgcatgatgatccatggtattggttttttttagggttcgggtctctatactgtgaaaagtgcatatagatatcttgatgggttgaacattgatcgagcttctgaggatgatacagggttttggcaaccgttatggactttaaaaattcccctaaaagtgcagagtttctatggaggttagtgtccaatattttaccttcttgtgaacaatttgctaattttgataattttttcgacgacaataccaattctgatgactttttcgacgccagtagcaactctgatgatttttccaacactggcagctactccgacgacttttctaatgccggcagcaaactttagcgaatttttcagtaccaatgacaaataaaactacctaaaacaaataaaaacattaaatatgggctttaaaattttaattacatatatatgacatatcaaatcccataaaaatacctaaaaataaaaaatgttatataaattggtcaaacaaaagtaccatatttaattaaacaacttttaaaatctcatagtgagtgtaatttgggatcttacaaaaatattggattttggaaaaaaaaattgtaattttactgtcacacgaaattttttataaaaatactatctttttata

SEQ ID NO: 296769 - DNA, 4608 bp, Cannabis indica
gaaattaaccagaggatgccacagtgctctattcggaccttattcttgggtctacatatttgtacacgtgaaaggtagctccctgactttaaaaataaatcattaatttttgcaagcaatcatataaaatattgacaaaatttgaacgataatcaatttctttatttatttattggtcgtaatgtgtggttacttcaataacttacatctattaaaaataacaaggctattatatggtcaaatggacctaatctaaataactttaaaaaacttctgaatgggaaaaccaaccaaagtacatcaattaagagtaatattttatttcataaaaatttgctttaaaagtggccgtttggacctcagcaccagaaattttagaacttctaaataaaaaatgaatccagaagccatatttttaaaatgatgtttcagagcaacatgaaattacatggtctttggacctttgcatttactgatagtattttctcagatgttctccgttccagtatcgaggtacgaaaacgagttccacattttcatcatactaacccaatttgtaggctccaaagcttgtgactttagtgacctggtacgacccttcccaatttggtccaagaacacttgtctcactatcttttgtgtttcacaaaacccttctaagcatcatatcccccacaaagaacttcctctcttttacttgcttgttgaagtgtctagccactttctgctgataggcttaaagctttagtttggcttgatctcttccttcttaaagttcgtataatgactctattaggaggttacggttagcatcttggtataatggtagtcttctataggatggaggctctaactctacttatttgatttccttgtagccataatccaatgcaaatagagtctggccagtagccatctttcagttattctatacaaccagagtacttcggataattttttaggctaactaccattagcttctttaagatgttttttcaaagtttctttgaggatttcttttttgctttaacttgtctattttcttgagggtgagctgcagtcgaggaactcttaacgattccatggttcgtgcaaaattctatgaacatttggctgtcaaactgcttgcctttgttcgagaaatttttttaaggtaggcgatacctacatataatgctctttaccacaaagtataaaacttttttggaagtaattgaaaccaagggattagcttccgtgcacttagtgaaataatcaacatcaaccattttatattgaacaccatatttcccttctaggagttgtttgataaggtcaattcccaaattggaaatgaccagagactctacatttgaattatctcgttgggtgaagccctagggatctttgcaaatctttggaacttgtcacattttttcacataggtctttgaatattcaattatacttcggcagaagtatccttgtcgaagtacttttttagataaacttttccccaacatgattactgcagaacccttcatgcacgttagtaaggagccaagaaacttcctctttcatgatacatctcaagagaggtagggagaacccacatttgtagcttaccccatccaaaattaagtatcgtacaagttttctcattatcttccaagttttatgtatgtcaattaaagtactccaatttcgagataggctacaattatggtcaaccaggtaggagtgtcgtccaacattttgatttcttttgagtaagagatgttgggtccttgaaggtattgaatgtgttgattatgcacacatcaggcaagacaaacttgaggccaggaccttaaagtgtattttcttagggtatctagaaagagtcaaaggatatatattgtggtgtctagagcctagaatgagaaatttcataattagtggagatgtgacttttaatgaatctgttgtgggatttattaacaaaactgcttgaattcaagccaatactgacttaaatgaaattaaagctctaggaattgagcttgaggtggaacctccgtcaagagtggagattgaaacacctgtagatcacggaagtgatgattcacaagatgattctagaagtgataatcttgaaagttataatttagctagagatagaacacggagagaagtaaagactccagatacgtacagacatgttgatttaatcgcggttgcatttcatgtttctagtcagattgtgcatgaagagcataccaactatgcaaaattaatgaaaagtaagaccgaaagaaatggaatggagctatgttagaagagatgcactccctgaagaacaactgaacttgggatgtaatactgatgtcggaagacgataaagttgtcagatgtaaatgggtctatagatggaaagaaggcattctgagtgtacaagaggcacaatttaaagaaaggttagttgcgaatggattctctcagatggaaggagtaaatgataatgagatacttcctccgattgttaagcatagatcaattagaattatattgacacttgttgcatgttaagaccttgaactagaacaattagatgtcaagacaaccttcctatatagacatctggatgaaagaattatattaaaacaaccggaaggatttgaagaggatggaaaggaacactaggtatgcttgttgaggaagtctatgtacaatttaaaatattctttgagacagtggaatgagatatttgatgattatgtgaccaagataggtctgaggagaagtaagttcaatctttgtataaatttctgagagagaaatggcgatgtgctgtatttgttactatacgtagatgatattttgattggcaacaaaagtttacaagagatcaagcacttaaaactccaactaaagacggagttcgaaatgaaggattttggtctggctagtaaaatctcaggcatggaataagaaaggaaaagcataagagactagtgcacttgaattagatgagctacatctaagaggttctagatacctttgaaatgggtaactctaaggcaatgagtactctgctttcacaacacttcaaattgagtgctacttggatgacgaaagatgaagctcaaaagttagagatgtcgagagttcactatgctagtgttgttggctccttgatgtatgtcatggtctgtactagattggacagcatatgcactaagcatggtgagtagattcatggaaaaccttggaaaggagcattgggaagccctgacatgaattctgcattatttgaagggaactgcttagaagggacttgtgtttggcatgaataaccagaatgaagacttggatgttatcaatggatatgtggactttgattatgcagggtgtataaatacccgaaagtctttaatcagatatgtatttactatgttctgaacaattataagttggaaagcaaatctttataagggtgtggcactttcgacaactgaagcagaatatatggccttgataaaagcgatcaaggaagcactgtggttaactaggttgatggaaaagttgaaactaaatcagaagattattactgtttattatgataatcagagtgtaatacaattaaccaggaattgtgtgcaccatgagcatacaaatcacattgatatcaagtttcatttcatacaagaagttatggagaaagaagctgtgaagattaccaaggttccaactgaagacaatacttctgacatgataaccaagatagtgtcgagtggtaagtttaagcattgcctgaagctaattggagttagctgagcttggaggggctgaggggaacaacagtatttataacaaagatttgtcaagttactttaacttgaaaccaaagtggagatttgttgattatggttacaagttttgtcatctggaaaggaaactatgaatccaaagagtagatacaggatgcttggtgtgaatccaaaaagtcttgtgcggaagactttgtagaatctagagggtgtttccagataagcttgtaccgcttatgtacagtctctccggatagcttgtcattagtctagagatgaacttccagatagcttattgtcagtcttggttgttcatctgggaaggagcgcttgtacgtatcaagatagcttatccgtttaaagattcttgattgtttgtataaaaaaacgcgttatcaaggctgacgtgaattattattgttgatgatgtgatagatcatttaagccggtgtaaatgtgctaggataattttagagataattttgggcaacaatataaatctataaatagctatcaatctttgtaatctgagaaagaatcaaaccattattgcttgagtgtgaatcgtgataatgtaaggtttgagagagaaattctaaactagagagagaaactttttcttgtaatctctaagattttgtgaagattcttgtaaccttataaacactaatatcaataatgatatgactgttgttgttcccactgagatgtagagcattgcacattgttcaaactcgttaaacctggtattcttcattttatgttttacttgaattttgagatctttagatttattatttttttgattgtgttgcgtattt

SEQ ID NO: 296770 - DNA, 4248 bp, Cannabis indica
gattaaatcttacggatggggacggggggagcactccctgcccatttcctgcctcatgtgcatccctactactccacctattaattgcattatataaataccattttgggtcctttgttttgtaaaaattatcaatttgattctctattttattaaatgacaaaatagaccctatattttctaaaattgtacaaataggacagtaagcttaatttttaataattttattttttaatataactaattttaagacaatttttaaaatgaacagatacaaaaaaatataattagttttgtcataaaatcactagatcggattattattaagtttatataaaaaaataaaatcagggttctaattcaaagttcaagtttgtacaaaaataaaaaaatacaaggttcgttttgtcatttaacaaaacagactatccaattggtaactttaacaaaatacaggattcaaaataatatttacccttttttatgtagatattattattattattattattattaaatgcttgtgttttttctgagaaaatactattatattaaaacaaaatgtcacaattggcattggaagaggcatttcctccattcatgaacatttagcttccatagaaagagcaaaccttgccaacaaatgagcagcattattagcagatttattcacatgagagaattgagctctaggaaaattgaaaactaaaagagaaatgttgtttaacaaacaatgaaaatcagaaacaagctctttagatgaatgtaatcctttaactactaagatagaattcgttttgatgaaatgcactggtagttgaaggtctttgagccattgtagactatgcataagagctaaagcttccataatatctggcgaaacatccacgaaaaggagtagacatagcagttacaatttgtcctgtactattccgtagaactgctccaaaaccagaaacttgattcattgtatcaacagctgcatccgtgtttagtttcaggcgtcctgaaaggggttcatctagtgagcttcacgtgaggctgctgtacttaaagctgctactgatgcagaggtaacaacaggcaatttttctctagcagcatgatattcttccaagtaaaagagtgcataatatagaataacatcatggggcttaggtttggtaccatgtttctctttattcctttcatccaaatactccagataattgtagaaaattgctcaaattttaaagatgaccatatagtggagacttgaagtagaaatttctttaaattcatgtggtgtgagagcaaatcttgtatctcaaaagcaaagcaatgccacacatgtctagcacgcttacagtacaagagagtgtgagtaattgtttcattggctctcttacataaagaacatgaggctgaatcttaaatgtgttgagtgtgaagaatattagcgacaggaagacaaccatggatagcctgcctaaaaaaatatggatttttaaagggattttcaatgcccaaattttttttccatcattgtagagattggataccagttacagtaggctggtgttcttcaagtttagttgctagggaataacctgatttaacagtataaacactattcgatttgtgctgctacattaaaatgtcttattgttcaaatagtgttaacgatatgctttgaatttaagcaacctccgaagtaagatacaaattgacaagttgttcataatcccattggcgagaatctaaaatgagatttgatactttcatagtcaagtcatgacccctaaacaccagtggtttaaaggatgtgattcctggcagccaagggtccgatgcacaaaggatattagcaccattaccaacttttcattgaagaccttttgatagcaattttttccccaaacaatacctctccaagttaaggatgggtaagaacccaagtctgcattcaaaaaagaagaatgcttgaagtaccttggcttgagtattcggctaagaagagagtttggattggagaaaataagccatgtttgcttcgccaaaagtacttgattgaaataatggacgaaacttttgaaacccattcctccttcaactttcgattgagtaagtgctttccaggctttttagttaattccagatgacgatgagttagatccccaccagaatttattgcacataatctctatttggttaataagagatttagaaagccgaaagcaactcatggcataatttggtatggattgagcaaccgctttgaggagtacttctctgccaccaatcgaaaataatttttctttgatttcaccaaataatactttcttatccctgcccgagtaagagggtgaccccaagtatctttcatgacaagtcttaatagtcatttgcaagatttgttgtagactggtttggatggcaggtactgtattaggagagaaagagaggactgacttctcatcatttaggctctgtcctgacgcacgacattagtagtcaagggaacgtttaatagccatagctggccttctatttgcacggcaaagaacaagattgtcatttgcaaaaaataaatgagagaccataggagctccgcgagcaattcgaagaccatgaaggttaccacgttgttcttcatgttgaaataatctagagagaccttcagcgcagatgataaagagaaaaggggacaacagattaccttggcgaatatcacaggtaggagtaacttgaccttaaatggaaccattaattgaaaataagtaagtaacactgctgatgtaccgaataatgaggtctaaaactgctgaatcaaaacccatattagtcatcatactttgaataaaatgtcattcaactctattaaaggttttactcatatcaagctttatggcagcataatcttcctcacccctcttcaaatgttttaaggaatgtgtgtgtgttgtatcttgtaatattggtaaaaggaagttttatttttgtttggaagaaagatttcgttaaatcaaaaatcatctgctacaacattacataaaaattaaagacaagcatacaatatgcactaaaagactaataataaaattagcacaagatttggtaattcatggtacagtataattatagcaataacttattagttgtttaaaaataaaagtaatttgaaccataaatatttaagtttcactcagactgtaaataaatacttatttgttaagtgtcaagttaataggtgacagttactgattggttctagttattaaatttttattttttatttaaaatttaattaaaatatactaataaaaatgacacttggataataacttgatacttaatggttaagtacttatgaaaattttgtaaacataatttaaatattattaccatcaaaaattaaatttgggtatatatatcttcaaccagagacgaagctaaaactaaatagtaaggaggaggccaatatggataatcacaccggtgtaccctaaaactttatttttaataagctaattaggattttaactccctgaactttgacatgtatcaaatcatgttctctggacttttaagatcgtaaaatacccctaactatacatgtgaattagaactttgtcatttagtaagaaagtctaacatgggtaaaagtttaggggatatgatttagtatatgtcaaagttcgaggggtctgatttgatagatatcaaagtctaaggagcatggttagtacataaacaattactgaaatcgtaaaattgaatgaaattagacaaaagtccttaaatctaataatctcaatagtttagggggaatttttaacggttagaaaaatttagagatataatttggtacatattaaaatttaaggagcaaaaatcctaattaacctttttaatatacagtacatgttcatagaagaaaatatcatatatgaatcaagaattaaaatgaaattgatgtgagttgtgctttaataaaatgctgggaaactcagtttaattatatcaaatttacttgtaatttgtgaaaggggaaaaattgtttgtacactaatatcaacttaagaatgctttagtttgcttactccacataaataaaagaagtaatacattaatttataagacataattataaattaaaattttgttttgaaaaatattatagtttataggattcacacttagttatacatactaggtgattgttacgtgccaagccacgtagtgttaattttatttaatattttagtt

SEQ ID NO: 296771 - DNA, 4527 bp, Cannabis indica
atcactttcaaataatataaaaacaaactagcataaaatttagtatgcgcacgtaactttttactagtatatatatatatattacaaatagaagtccatgtatttggtcaaataataatcataatattcaaaacgtacacaatataatatgatatcaaatttatggaagccaaatccagccatattatgagttcataacaaacaaaattcatataaatatataatagtcccacgaaagacattcatcaagagaaccactgtacgtacacttatattcatggcaccagctgatgctgaagtatggtttcaaatatgatcgaaacatgtcgacctttcagcattatgagtatttaataatctaacacatatatataatttcgttattcggtggaaatgatgatttattaaaagaaatttttatatgaaaaatataaattgatattttatttataaaaatatttttataaggtacggacaataattttattttcgtacaagacttacatctttcttactcttcttcttgaagcttcttgcaggctcggctctggtacagtttgcaagtgttcttgttgcctccctctttcttcttctccaagtcctaatcttcatcttcttttctttggatttttgtacctatttgcatttattaaccagacgtcacccttaatcattatgaaaatctccctaatctctcgagcccatacgctatttaatgctctctctctctctctcacaactacatttaagcatcaaattaatctccgtcgtttttccctcctccagcttaagcatcagattaatcattacttcccttcttcatcttcagacaccccttgtaggaatcgaagagatgttgtagagaccgattcaatcctcgaggcgacctttacgttccaggtactttctaaacttttccctttccctgcttgttcatttaaaccaccatccacattccctaccaccacatccacttcttttctctttgttcttacctgttgtactcccttttcctctcatgacgtcgtcttcacataccccaaactctcttagcgctcttgctgatgaggaaagcgtggttcatgaatttgaccatatatccttaaatcacccaaatgattcaaactctttctgcttaatctttaaactgcttacttccaaaaccgtcaatcctgcttggattgagaaggccatgactaatgcttggactctctgtttcccttatcagatttctgagtaccactctggtttatttttggcaactttccaatgtgatggtgatcgtcgtcgtgttcttgaagaacaaccatggcattttgacaagtttcttatagttttcactcatcctgatgtctctcctacacccactcctgctactgtccgttatgttccgttctgggttcaagcccacaacattccttttgggcgcaaaagtccccaacttgctcagtttattgctgatgagattggtgagctgatagaaatttatcctttgcctttgcttgagagctttggtccctatctccgtattcgggtatttcttgatatctccaagcccctgcgaaggggcatgactatccagtttcgtgtgatcaatgatccttaatggatcagttttaaatttgaaggtctcccaagcttttgctacttctgtggtcttatggatcacacctataacaaatgtgctaaataccttctgcgttgtgacaactttcccggtcctccttccctagaatacaaagaaacccttcgtgccaccacccctgcccatctcaagaagaacccatttgaaatttccaattccactccttttgaggagtatttcccccgtagtactgccaatgatcaaggtttgcaacaagcggtcgatcagtttctccgcatggattcaccagtttctcgtcctgatatttcaaccacatgttttactcactcaccggtctcattccctccgctgtttactcacactactattcccccacctatcatgaccacctctgttatcacccatactgacaaaggtaaaggaattgctgtgactatttccagcccacctcgttctcattgcaacagaagcacaagcctcgtcataaacgaaccacgttcagttccttcccctgtcctctcctctggaaccaggcaccctttcactcgccaaactgctcaagttggtgattcagttcgtagcatgctcaaaagagcaagagctgtttcaagtgatgacgccgtggttccttcattgtctgatgatgtcccaacggcgggtgttgcgtcgcgaccccgccaagaaaaatgagtatctgcagttggaatgctcgaggtttagggagtcctcgagcattccgaaatctctccctgctggtcaaacagcatcaacctttgttgttttttgttatggagactaaactgccgcctggccgtggaatgtatctcacgcgtaagctccattttggcaatgttttagaggtgcctaggcaaggtttagggagagggattttactttttcgaaacaattgcggcaaggtttagggagagggattttactttttcgaaacaattgcattgatgtaactgttatttcttactctcttaatcatgttgattgtattataaattattctaatgatatgcaatggcactttactgggtactatggttctccctatcctgaccataaatctgttacttggactcttcttaaccgattgtatgatactgcccctcttttgccctggttataggtgatttcaatgactacctttcaattagtgataaaaattcgactactactccccctccacatgctatgcatcatttccattcttttttgaataaatgcaaccttctccctcttaattactcgggtaacaaatacacttggagacatggactaactttggaacgcctggactggtgtactatcaatccatcttggcagaatctatttccccatgtttctctcttccacttgggtttttacgggtctgatcattgggctctcaaaatccaattggaatacatttcttcaaacacacgcaggcccacacgttttcatatagaaaattattggctaaatgacccatctttctctaccactattcaatcctcctggtgtcttcctacaacttcttcttcttctccccttcaaacttttcttgataaacaatcttattgtctctctgaaatgaaagtttggagtacttcccaatatccccttaagttccaaattgcgagaacccaagctgaacttcaccaggggatccttaacaatgctgagcctacttcccagtctttacaacaagccacttatctccaatctgaattgtatgggttacctcagaaagatgaaatctattggaagcaacgagctagacttgactggcttcgtgttggagataaaaatacaaaatttttccatcataaagcctccattaggaataataataacttcattcgtaatataactcttcctgatggatcggttgctcatgattctcccactatcctctctcagttttttaacttctacaccaatcttttccatacccagggagtcaaccaaatggctatcaactctatcctctaggggattaccaccaatctttccccagttcaaactgctttcctcgctgaggagttcactgaagatgagattaaacaggctatgtttagtattcccggggataaagctcctcgccctgatgggttgaattctctgttttagcaaaaatattggcatatttttggccctaagctttgttttgctcttctccatattctcaatcatcatggggatatttctttgatcaatgacactatccttgttctcatccccaagaagaaaaaccccaaaactgtgcttgatttccgacctataagcctttgtaacaccctatacaaatgtctttcaaaagtccttgccaatcgtattaaaagtatcctccattccatcattagtcctaataaaagtgcttttctcaagggtcgacaaataatagacaacatactcattgctaatgaaaccattcatgctatccattctcgaaaaataggtaaaattggctgggctgctataaagcttgatatgaaaaaggattttgatcgtgtcgaatggcaatttatcagacaccttcttgtttatgttggtttccctagccattttatctctcttgtcatgaattgtctttccacggtaacttaccgtttatcccttaacggtaatctgtctgatactttttcctcctctcgtggaattcgtcaaggggatcatttatccccttatcgctttctcctgattgctgtgttggaagttattttaccagaacttagatatactcacaagtatgttgatttaacaacctaaatatgaacttctaaaacgatggcaaattaaacacataaaagtatcagaaatcttacattgaatgcagcggaatatatgtctcctcccactcagatctctaacccttgattcctttctgtcacagagtataatcaagatctagcccgatagtccttctttgttgt

SEQ ID NO: 296772 - DNA, 4195 bp, Cannabis indica
tttttgatttaagcatttatatattacaaacatgttttacctagactcgaacccaggacctccaatacacacccacctatggccacttgaggctacacttgagctagccttaagtggttaactaatgttcaacttcaaatctaccctttattgccttttcaataaataaaaataataacctttattaccttttcaaacaaacaaaaaaaaaatctccctttaaaaaataatgagcctacatttaaaaattaaaaaaaaaattacattgtttatatttataattttttttttttgctaaaaatttaaatcattaagctaaaataaaaagtttggtgagcacatggggactcacctcccaaaaacaaaacaaaccattacaagtgtgagacaaaccattacaactaatagaaaatctactactatcgagagaacaaagcaggatggaaaagaaaaatggaggttccaatgcggcggttgaccctccactagagcttacaccagctgcaaactattggagtaaaaatcaacttttgcaacgttaacatccaaagccaaacgaatctcgaatttcagagcctccaattctccttgcagaacagagtgaccctaaactttcaccgccccaaagcacttggcaaaaccagcttcgtcaaagatgacagccgccaccgcaccatcgtcaatcgacgaagcatagtccacaaagcatttcacacggcctggtctaggtagaccccaacgaaccacttccgtaccaccataattctcactgttaacattgccaaaccccaacaatggacagtgttcttggaagctattctccacggcatcacgaaacacggacaacaccaacagaacactgttgtgaaaaatttcattcctaacaatccacaatttatagtacaaaactacaccataaagaaaaaactcatcttttctttccacatcgaatgttgcataaaatgagggttaagaagccaagaaacaacatctctcccattgccaaggttgaaattgttaaatacgaatattctatttggtagaaaaccagaggtacctagtgacatagcagctggctacaaagtgccacatcatcactggcgatatcaccacacatcacacactgcccaggacttgtgccaataattgactgcagcttgaaaccgaaaggcagtgcatcctggaagagcttccataggaagagcttgaacctatcatgtatcttagccttccaaatgtgatagcaggtatgatctctaacactgaaatgagtcgcattaagatcccaatatgcccgtttgagtgtgaactcccctgtaggggcagatttccagcagagcgagtcattactctggagcaaattggtcttgatgccattaatcatgctagaaaattctggtctaaaccagaatgaaatcaactaattattccaaccagcccccgattccgtcataagatccccccacagaaatgttctctttggatatcggattgatggcacccgttacattcaacgccatctctacccatccaattatgattccaaatgctaaccttggacttcattccaataattcaaatacacttctctgcaataaagtccctagtggcctgaatccctcttgccacaggagaggccgacgaagggagatttggagagagaaagtctgaatgtctacaatatttctccaccaacagagtcttccaaagagttaaattttcagaagccatcaaccaacccagcttagcaatcaaacataaattaatatcctctgttcttctaaagcataattcgccacacgatttcggcttacaaagagagtcccaagccttaagagcgagaaatcttccttccttagtatgtctcttctaccagaattttcgaaggatacaatcaatcttgttagtgatcttacacgggagcaaaaaaactgacatagtataaatcggtatcgaagccagaacactcttgatcaaagtcgttcttactgcctgggaaagcagtctagctctccaaccttcgaattgtgagcttatcttgtcaacgagattaaaaattgaagtggttttatgcattttcattgcctggagttaggatagactttaatcatttttctcgtacatcgcagagttttatacttagtgttttttctttcttttaccttatcaatgttgacctctatttatgtgcacaggtagaccagctcgatccgagttggctcagaatcgcgtgaaaattacaaaagtttcgagaagtcttctagttagggatcgagattggcatcttctctgtacatctgctgaattgtaagaacacaaactaatttgagcagtcgtcagactttagcgagaaccagtatacaaggagccttttgtgaaatagaaagtaaagattgaaaggcgtctttctaagcaaactccatggcaaattgcaggtaataatcttctattttaatagataattttctatgagttcatatgattgtttataattagtgtatcttttacagatatggtttttctgaagagtgctctggtacctcatgggatccaatttgcggtgcttttgttgtactcctcgcacatcaaggtttatgttcaaacgatgacgtataaccttaagcagaattccgaccatgtctgaatgtttccacgcgaagacattcgggttttgtttgagaaatcaccaaactttctcgttgctacaaagttaatttagaaccaatttttaaaactttagaattatcaaaggagtcaattggtacctctatagttttttcactagcttgtgttgtgtttaatcaagtactattgagtgttgtaccacatgcaccacatacttaagtgtactagtattggtaacactagatcgtaccctttaaacattatatactgtaccaatgcactcgatattgttatcgtactagtgttggtagtatatgaatcacacacagaacatgtaatttacatacatacacacacatatatacatattctatgctagtcttaccttgtttccaaatcaagtgtgctggtcgacctgaatggaaaatcacatgttggacagaggtcctatgtcacaatcacataaatcgggtaaacaacatgctaaacctttccgaggacctaaactcaaaactataaatttttctatcgataaaaagcaaggcaaatccctaattattgaggaaacacgagaaaagcgatactacgagaaaacttcttgaaaaatggtgagtcgtttttctagttctgcactagtaaaaacggtcgactgtttttgtagaaacggtctgccatttttcactgtagaaagataaagagtctccaaatcgactcaaaataatccaaaacttcgtactaagctccagatcatctaataatatcataatagaccaataccaagcattataacctcaaaatatacaaaaattcaaaaactatcattgttgagccaagtttgagttcttgaactcaaacttgcttaactcaagaatcaaccactaaaaacagcttaaacatgctttaaacaacatcaaataaccccatgaatcaacccaatataaaaccctatttgtatagagcctaattcaatactcatgcatgcttgaacttaaggaaaacctaaaaaactcaagaagaagagtattaggaccttaacttaggtcttggctttcaatttcccttcaattattgatgaaaatcactggaaattgatgagaaaagaggttggttctcttggttcttttaggatcgaacaagaggaagagataaggatgaggttatgagataacttcttattttttttcctaacatagataaaataaaaataaatccttaaatcttttgtttactctcactaaacaattcagaataagtagaattaatccacaaaatttactaaaggacaaaaccccaccaaatggcaaaattctaattttgtcccttactcacacttaaacaacttaaaggtctagaagtaaaatggtccaaaactataaccccgcctaatcttgatatttcaaatatcaaccttataattgtctcactagatcaaaggttctaagctaacccatgtcactctaatggccatccgtcgtgttttttatcgttaccaagcaaaaatcataaaaattataaatttcacatatgatatataaaatacacttagagtttaataaaatctccggaattg

SEQ ID NO: 296773 - DNA, 2174 bp, Cannabis indica
aatttgctaaaaagaatgagacccacacacaagtctcattcactaagtcaaatggcataaaaagccagcacaacagctaaaaatagacagaacaacaaataagaagctatatttttaatataattaaaaccaaatgtataatgcctttcttctttgcttttggtaactgaagtttcatctcaacatttgatcatgtgaaagtgtaagattaaaaaacaaacctcactaacaatcacaagagaactcaaagagaagtagtcattgaaaaaataagcacaaaaacctttttatatattatataatatgtttacgtatatatttatatataataagagatatataaataaatgtatgtacatgatggatggccagagaatctctgcatttgaaggcttcaagcttttgtcggcagagcatgtgattccactagtatcgaccataaaacatgaacatcttcataggggcacgacttcacatcttcgtatagaatataaatccctcttcctaaatcatcaaaagtttattatatgacaaggaatgtaatgttagaaaaaggaagaagaagaaaatgtagacaaattatttatctgtaaaattggttttagaatgaatgaagaacaacattgaagaaagaagatggaaataagtttgaaactagcatttataataacattgcatatactataaaaaataattattattacttttctttggagcagagtggagacgaaaccagagcttcctcaatggagagaagagggattggagccaccccatttggacaaatggatgtggctctcatgtaggtgaatgtgctatggaaaataggagaagaagaagatactaatattattattaataataataatacacgaagaatgagaagaagaattaaaaaaataatggcttttgtttgtattgaggtgttttattttgcttacacaaagggtgaagttataaggtcactattttagtaggggcatttttttttttacaaattttttagtctttggtggccaatcatgtttattacattttttctcttggtgtggtgtctttttcaaatctttcccattttaatcttataacacaaggagccattccaccaatcagctgtgcttctcacacttccaaacatgcccttacttcatattgaattccttatgactcaagccaaattgtagggttatttttactatctatgtacttgaactttgtgagggttattaatttttttgtcttttatcccattttgagatacccctttgtctattaagtaaactcaagccctttattttaggagtctcctacaaggatctgataactatatggccacttgtcctatgcttcaattttggttgccttagaagtgtgtttgtagaactagaccagtcatgggctcatgaatcttgggtttcatgccacttgtatgggccctattgggttcctttttttaaatcttgggtttcaattaactttaatgttctgaatagggaaattttaaattttcctaatgaagatacatgtgaccaaagaaaaggacaagacttttgatattagagacaaagattgatcacagagaatggattgaaagtgttggtgaaatgtaaaggtttttatacattatagtggtattatttcatatcttttacacaatgattttgatatacaatttatcaatcaattgccaatctcaagagtttggatgtgtacaaaacttgaatattactcttactcccggtggataactactacaaagcactcatttgtgccaaaaagaacaagagctacctaagctaaaatatgaaactgttagaaattttatacgaatatgttttacatatggtgtatatgaaatgtagagttaaataaacataaataaacacaatataattataggatcaaaatacctttagttattgattctttgaacttcgggcttcaatgctctctctactctctttaggtggatttactatgtttcacataatgagtactgagctcggggaccgagatcctacatttatataggtgaaaccttctatcaaggtttctgccacaattaattatctgaatattttgacaattaattttaaaaattaaatatggtaactgaaatattttgtaattaaatctgaccataattaattatattttataaatcaaataaaata

SEQ ID NO: 296774 - DNA, 1440 bp, Cannabis indica
ctcaaaattagcaagctacattagaattaggtttaaaaaaatttacaagactcgcgagagaaaattccttaaaaaaatatatagaaagagatagtaaaggcacatgacaaaagtgccaaaaatcggcagatgaacatgaaaagagaatggaccatgtcaatgagtcaatgacaagactaaaatgtatcgttcattaacttgagtacactgccaacgccatgagcatgcacaagacccgaaaactactatgacaagggatttcaaaagatatttacagccatagcataactaacatgtaacaatacttgccagttgagaaaagggcttccaaaatgaaggttatccccagctagcaatgctttcaaaacttgctcagcctcttgatctcttggaagaaactgcataagatgatttctctcactttccgagagacaagtctcccaggcctacaatgtccagaaaaaagccagtaatgagttaagtggacaacacagtccatacataatgaactatgcataaccatgaaaaaaatcctacctcataggagagcacctctttaatgttttctaattcataaatttccggaggaacagcacaaacatcagcaacaatgtttgagccgtgaggagaagaacctaaaaatggcttcaagtctctccaatttatgccaatttgttcttttctggcaatgactcttttgtgatttccatcccactcaagagaaatatgagatcttatgtttgaatcatactgaggcaaccctgtattcttccgttttgctcgatgctgctcccttccatagcagcccgcaatattggtactatgcaagcgttttctccactgatcggctgccattgtcacaagtctcaaagaaaatcccccacaagtttaattagcagtgtccttcataagcagcctgacaacaacattaaaaatatatattagttaattatctacaataacacacacataataaagcccaaagcttcatgaagcatgctactactacccttcaaaagacagaaaaaaaaaacataggtagaaatgatcaaatccattataaaaaaataattttttataaaaaaaaaataattataaaaaaataatttttttaaaaaaataaataaaataaaaatgaacagcaatacccatcaagcatatggtgccataaatacaaaataagacaaactgaatcattagaaattgaatatagaatagcaggctgagccaaacagttcacttttttttttttccaacataatctcttcaatccacgtttcattaaaagatgtcataaatttgctcattgaacaagcccaatgcaacaaactgggaaagaatttgagttaaattccattcattcatcctaaatctatggataagattcattatcaaagaaaattaagtggcattttcgtgaaattaaaaccacataagtct

SEQ ID NO: 296775 - DNA, 4863 bp, Cannabis indica
gagtagagagtttttaaaaagattttcaacttaaaaattcatgcttgaatatggctactgggtttcaaagcgaggaggggttgtcactgcaaaataacttcaagaaacagcttgctcttgctgtgagaagtattcagtggagttatgctatcttctggtccatttcatccacacaaccagggtatggactgtcccacttcttatggtttactttctttttagtccttttgtttgttgaaggaactgggttttgtctaatgtctaagatcctataaaaatcatagaaaaggtggccatacctgttgttctttctggcctcctttaatcttcaatgaaatgttcttttgtacatgaaaaaaaacaaaagggtatcaagatttgatacttattcgacattttaactttattttgtttcattccaagtagttcttttctttctttatttatatttacaaacaaatatgctaccatcaacagatcaactaaactgacatgtttgttaaatgtgcagggtgttggagtggggtgatggctattacaatggagatattaagaccagaaaaacagtacaagccatggaacttaatgctgatcaaatgggttttcaaagaagtgagcaattgagagagctttatgagtcactctctgcaggtgaaaccagtccacaagccaaaaggccctctgcagcattatctcctgaagacttatctgaagctgagtggtactacctggtttgcatgtcatttgtcttcaatattggccaagggtataataactcttcttcacccttttactttgaagttaatcctctatcctaagcagtggtcaatacatatttatattttaaaagacttgaagcttactgaatattgataatgcctcatacaatatttgttttttgttctctataggttgccaggaagaactttagcaaatggtcaacctgtttggctatacaatgctcactatgctgaaagcaaagtatttggccgctctcttcttgcgaaggtaacttttttgttcttggttaatctgaattgtaacatcaaattactgttttctggttttcatatgagttggaaaacttgacaaacttgttgttctgtgtctttctttccatgttgggtgactactttcttgctcagagcgcatcgattcaggtactaatacaacgatctttctcccttgattttctaaccattagttgaggatctctaacttaacctgttttgatttgtgttttgtattccagactgtggtttgctttccactcacaggtggcgtgatcgagctgggaacaactgatctggtacttgttgtctcaaaatgctacatacgatgttattacatttaagagctagatcttgatgtcaactcttgtactattttttttaaaggttctggaggaccatgctctcattcagcgtgtcaaaatgtcaatttctgccactccataccctttagcttcttctaagaggtcaaactgtagagctggaagcataagaaatggccaaggttttgcatgtgccatggttgattatgattttcttaacaacaactcaatcccagttgtaattcatagagaggaaaatttgtcttctcctagtagcagctcaaatgggttggaaccaaatcaaccaggtgatgattctttgattgtggaaggaataaatggggctgcttcccaagtgcaaagctggcaaatcatggatgatgagttaagtaattgtgtacttcattcattggactcaagtgattgtatatctcagactctagtaaatcatgaaagagttgaaccagaaaaagccctgtatgaattgatagatgatcatcaattacaagaccttcaagactgcaatcacatgaaaatgaccccagtggatctgcgaaccaaagatttacactatcagggtgttctttcaaccctcttaaagagctcacaccaattgattttagggactcacaataagaaatttcatcaggaatcaagctttgtcagttggaagaaggaaatgttattgaaactttttaaaccaagaggaggaacaccacagaacttagtaaagaagatcctatttgaagttcctcggatgcatcttaaccgcgtagttgattcccaagaagataatagcattggaagtggggtttggagacctgaggctgatgagattggcatgaaccatgcattagcagaacgaaagcgaagagaaagattaaatgaaaagttttcaattctaaagggaatggtcccttcactaagcaaggtaaatacagctcttacttaactctgattaaaagacattaacttcaaacataatatgcattcacatcttgtttgaacaggaggacaaagtgtctatacttgatgatgctatacaatacttgaaagagcttgaaaaaagggttgaggagttggaatctagcaaggattcaactgatatagaaccaagaacaacaaagagaaaaccccatgacgctagagagggaacatctgacaactacagacaaaagaaaattagtagtgggaagaaacagttaataaacaaaaggaaggcttgtgacataggtgaagttgagccagagaaaaatcatgatgtttcaaaggaatgttcagttgataatgtagctgtcaatatgaagaataaagatgtcataattgagataagatgtccttggagggagggggtgttgctagaaatcatggatgccttgagcaatctcaaattagattctcactcagttcaatcaaccactatggatggtgtcatttccttgacaatcaaatccatggtaagaaaattagtcacagtttttgtagctttctgtcatttcaactttcatattataaattcttttgatgatgacagtgagttccttctcttttgcagatcaagggatcaagttcttcaacagcagcaaaaatcaagaaagcaattcagaaaattactttgacatgttaaagcttaagagtaagaagatatgatctcattttaagaacccatttgcctcttttgatgtgccattgtgtcatggaataaactagtttcaagtcatttaatgttatttgggttttaactaactgtcatctacctctactgctaacatatctagaaggaaattatctgttaaactatgcacaaaataacgaaaaataatgagctgataaaagagtttgatattccttacataaaaggcaatgaattaaataggtaatattactttccaaagaattattcataaaggtttcttttgatagtgtgtaaaaaaaattacacacattttgaataaagagaaagttaagactttcttttcttctctcaaagaattatatcaacttcaacaacctgcaagacgaaataaaattattccctttctttattttctgaaaaagctcttacataaagctgaactatgcccaaaaaaaaagggaggggtaaatgataaaagttggctcaacttgctctttgttttttttgttgaaccaatgaactgacatttaattagtacatatatatatgtatatatatatatatgtatatgtatatatttctcactgatgctctagtactaccaatcatttcagctacactgatttttgaaacttatggtatggtccaccaaattcaacctatggttgaaaaaatattgtcattttccatttgaccattaaagaggtctatttccaattaggctacgaatattgttaaaacttcagagtagtgtggttttccacattgatacttttaaaagggtgaacattttcagaaagatcacattatcaatgaaaactgagaaattagctctttttaaaacaaaaaaataattgcattaatttccatatcaagacaaacaggggtctttcatagtaggaaagtcagattctttgatatagtcatttgtaattatacattgaggttcacattctaagagctagaatccaaaaaactaggagctttaatgatttctaagaagtactaatatccaaaagattgtaattgtactatttcatcagatgtagacaaaaactattcatctcagccattttgtttccatggttgattattgtacagcaacaaactaacgtgtcttttcctctacgggataaaatgatggaatctgcatgcattatcttaaaacacccaaaatttcgtttgatgtattcaatcatttttcaataattcacttttaaaatgaagaatatatcatttttcaatattttcataaggaaatgttcaatcaaaaaattcagcttaaaaaaattgagagaaagttaggattaaaaatttggaactgacaaagtctagggactagcccccttggttggggacccttagaggactggaccaaaatagattctgctgtgatatggcaaaaattaggcttggctttatgttgtgatttttaaaggtaatatttaaccattgcatttaaatgaaagagacttaaaacactttgaaatcaccttaatcatataacaaacaacgtcctgaaattgaaagcttagacccaagtttcatatttgacttctaggatgagtgtggtaaggagttctttcaagttgcaaggaaagatgtttactagcttaactcaaaaattagagaactacccaaactttcgggggtattcatccgatccaattttgctcatagtgcattcgatccgcacgaagtgtgaattttatattctagatccaatctaatccgcgtaaaaactcaaatccaatctaattcaatccccaaaagtgcggattgaatccgttattttgaatcggctactttttaatattgaattatttaatatttattaaaaaaaatattttttttgtataactaacagtcaaaataaaataaattattgtgtttt

SEQ ID NO: 296776 - DNA, 2061 bp, Cannabis indica
aaatatatatataaaaaaaatctcttaatcgcgttggtcgggttagttcgggttaattagacatgttggtattattttcaatccgcccaatataaagattgggcggtttatatttcgtcgagtttttcagtttacttttttcgtcgggttatctcagtttagtttaagtagattattcggagtgatttacaaaaatttatgtacatccctagtttgaaccataaactgtggtttgttaagcttttcatagttggtgacccactatttggcttgaagctttgtgaattctttagtggtcatttgttttgggacatgtgtactattcaaaacttatttggaatcaactgagatgattaaagcgtctcgtgtttgagggatgttgagtttaatagcatgatcttggattcgatatgccatctgataatggagtgtggcactaagagaagttcgatattggtcaatgtttgtacttctactttaagagcattagtcagctgattatctctaagagacattgacattaggaaatagaaatagagtgacgattgttcttgtacttgaagtagtttcaatagtagttatactatgttgatatttccttattctaatgtcaagaagactaatgcaagcactgattggaagtcgttttttgtcgtgataattaagagcaatgcgaataacactaaagtagatgtgggtgtaactatatgccatccattgtggatagagttcaagtgagattttaagggtaacaaattggacttctcatgttgatacaagttggcattgactgaatttggatgattgaatatattctttttgaaaccttgaaggatagtttaataagtattttaatggatgtagcaaaagaggaaggatttttagtgaaaattttggtatgaatttaagaaaaaaagagaatctgaagtaattttattttcataaggaacataaaaaaagttcataaagaaaatctaatttatttgaagtagattttctacatgtgagagagactaaaaaaggagcagttaatgagcttgaaaattcatctctattagccatggtgtatggagaactctaggatagtaaattttctaaggacaagaatgaattaaaacaagacaacaaaaagaagaatctggaaaaactcaagaggagatagtatagcatttttgatatccaagtattataccttatttattatattcatacctaatcatcattgtatttgtattatgaataattatatatatatgaagcatctccattatcaaacttacaattctccattttcaactcgacccaatgacaacttcgaatgtggtccactatttattatctcaacaaattcctaaaccttttccatttgaccaaaatataattaagtttgaaaaattcaaaacaattaatttaatggacatgagaaatgagtcaacttgttcataaaaaagacccatacaaattccatatccttttctctaaagcaccaaaaagtacaaactactaaaaagagaaagtgacccattttagatttttcatctctctctttcaccttcttcaaattcaattattctaaaaaaaaaaaccccaacccatcggaaaattcatctccggcgataataacactattcattcataaaatattaccaaaacaaaacataacccacttcatttttattgagattgagattcatacttattattttgttatcattatcataatatcattaccaaaatccaaaacccacttcattattgagtttgattttaatgatgggtgcatggatttcgtgccatatatatataattaatgaacacttatttcttaattcaacttattgtgggaaccaattaaccaaatttgtattgtaccatctcatttttgatatatatatatatgaattattattaaactcaggtcacgttgctctattaacaacatgccaatgaaaatgacagataatattcaaagttgtaagtatataccacgtgattcaacatgccatttccatacccatttttaccagaaagtcttttccttttttcctttctaaacaataa

SEQ ID NO: 296777 - DNA, 6077 bp, Cannabis indica
tgagggttccgctcaatatggaatggagttactactcgctacattgtccaagctatacaacgaactgcaagatgcatacaaaggtcagttatcttgattttgtgatgcagatatatagtctggaaatttagccacacctttgattgtttgagtttaagatcacagagtaaacattttagataacagcattgcatatgaacccgttgtaatagagatcacagatttcattcagctaaaattcatgaatggcaggtcaaattgtcggagtcatcttttgctccggggaagcttctatggaatcaagcaagttgctggatgtgagttttgctcctcagcgatcagcgcgtttgttggaagaaaacaaagtcccccgtgaattgattattgaagtgttgttggttaggaagatccttgcttggatcacaggaatcatacttctcatttcaaccctcataggggtaagattacacacacacacacaccaacagctaccctattcttataattacaaagctaatgaatcgtcgacaagacaaaacccgaaaacaaaccatattttgcatcggaaatattggctaaaactgtcattttttttccccatcttttgcaggtatacttccttttctatatgccactcacaagagatacccttttgtattctaatgtcaagctcgattaaatcgaaagaaagaaaaatcggattaccgttggaccatatgcctactacctatgtccaatttacaatgtttatattgaaaaaaaaacctcttccaattctgtgagattaaaacacaggtagttcttaggtaatctgagttttctcatccaaacattaatggctagatcaaagaagtattttctttagagagattctcaatagccactttttcctttgtctttattttttgggtatgtaaagcattgggactggtcagcttgggtgagaaagaatttgtgtgcttagcagatgaaaaataatattgtgcatttatttggccatgaggagattctcttatcatctgtgtatttgtttattagtttccaataatttatatatgtattttccaaattctggataataattataataataataaaaaaaaaacagcattaccttcctcattggattcgaataatcagaacccacttacatctgtgttttgtaaaaatagttatatgaaattttttattagcaaaataatcatgtttagctacttgaaaattagtaaattcaagtgtggttattttactaatttaacattttcattctgctaattaaatattgctaatttaatatttgccttctagttagaggttacaatattttagcattaaggtttattgaaacattttgttctaaacaaataaatgcaaactactccatcgagtaattctagaataaacattccttttcttttccatttcatataaaagttctagtagtagatcaacatataagcttttacattataaagctaaacttcacataacccatattacattacacactactacattaatactattattactattattactacactctactactctataacaatgggagattccacagttccaaccatcttagtttcaattatcttaggaagaagttcagtgggtaaatcacctctgagaatttgaactttgaaaacaagatttgttgagctgttttctataagttcaaaaacacaagcatcattaatctctaacttgttgtcctctgcaaagtttttccaagagttatcaaatctcttgagcaactgacttgttccattgaacaacatagtccacttatttctcttgtatgtaagaacagctgggatgataagtgaaggtaatactggatgaatttttgctggaagtacctattattgttatcatcacattttccaaacaaaataaaaaaacccttctttgatcatataaacataagagtaatttacagcctaaatactctcagttgcagataaatacttaaatttaatttttgacaataatatttaagttatatttttaaaatttctgtagttacttgattgttgagtgtcaagttattatttacgtgtcatatgtcattttttttattgatatatttaaaattatttttaaataaaaaataaaatttaatgatcttgagtaactagagattatcacgaggccattaccttaacacttaatgcctatgtagtaaggaaagttcttgaaatataatatatttattattattgtaaaaaattaaatataaggatttatctacaatttgaattacacttaaacttgtcaaaagttacccaaaacataaatatagacaaatgtaatatcaggtggactatcaatgcacctctctgtattcagactgaaagtaatttcaaacatactttaattatattttaataaaaaaccctactaattttattatattaaaatagttgtattaaaaatttaaattaaaaaaaaattcttaaagataacaatttctaactaaagtagagttaaaaaaaaagttgtctacttcaaatttttttaggagctaaatatgaaaatatgaaataatataaaaggaaaaatatataccaaccagacgataattagggttgagattagactttgacataaagagactgaaaaagggattcttccctgagattggacaaagttcttcatcttcctctccttcttcattgcatgtagtactacgatttgagctctcatttgacaaaagctcatccattttccaaaccacctacaaccaactccatacttgttagtattattatctttaaaaatttaaagcccactttcttaacatcataaaaggaagaagaagaagaagaagaaaagaaagaagatgcatttggattttggattaccctgaagttagagctttagctttgagaatgggaaaagttacttgcagaaagaaaaagaaaaaggatccctttactattggagatggggaaaggtgactttttgagtatgatttgcattcaaattcggccttattacaaagcccaaatatatttttaataaacttcttaaaagcaaatgggattataaggttagaaaatatgagaaccatgtatccttatagtaactagagggaggagaatcaattactttatattttttaacttttttttaaaaaaatttcccacaaaatatttttttttgacaaaagtcatatttttttaaaaaaattatactttaaaagccataaatataaaattcccatttttcataagggatttcatttttatgattctttagatataaatttgtgaaaaaatgatttttttttccatttttgaaaaaacagtataaagtaaatggttaccttactctaagagtacttggttacccttacctaattttccaatttttttcaacattttcttcaatttttctcataaaataactttttagagaaaaaaaaaatcatattttttgcacaaaaattataaaaaccaataaaatttgtattttcctctacgaaaaaataccatcaagtataataagcccaagtaaagcccaaaccatatcaggcccattaaatatacgttcccgccacatgctcaaaacgtgtggtttgagtttcgaaccaaataaatatctctttcttcttccttttttttcttagcttatctaaaaactcaaaacccagaaagaaaatctcgaagactcctccaatgtcttcttcctctctcccaatctttctaaaccctagaatttacatcaagcctcagaatctcttcccttccacatttccttccttcacaaaatctctaacctccaaatccttactctgcttcgcctccgattcctcacagttcgagagacaagaatcgttttgggtgcgagaagagcaaagatggattcgtgaagaacagcggtggctccgggaagagcagcgctgggctcgcgagcgcgattcgctcctccgccgtatcgctgagctcgaaatccaaattcaagctctgcaacagcagaagtcggttcaggctggagctgaggtgtctgagactatcgctagtattgctggtctgcttcagattttgaaggagaagaatcggatcgcggagaacggatcgagttcgactccgatggtgttggaggagagtaagataccggaggaagagaaggaggtggtggtggtggaacgagtggttagggtttcggaggaagcgaaggagaagaagaagaagaagaggagtacgttgagaattggatcggaaggagaagaagttcaagctatgcaggtctgcttttgcaatctgaaatcaaattagaaaggcgagtgtttaatcaattaatttatttattttttattattttttgataaatttttaaaaatatatgtctgtgcttaaatcttcgtgttcctgtatagatatagcttttaacatttatatttataggaatattgagatgctcaacatttataattgtaggtatatagagaaatattagtgttctatatacacataatatgtagaccaataagaaattgcaaaccaagttttgtatatgacggtttgcattaggtattctgccgggaaatttaagtaaattaaggcggcaaaaatataatttaaatagttaattgtatattttattttataattatgcaagtgattattttaaactttatttttttacagaaaattattaaaaaaaaataaaaataattactataattatagtgtatacggtcatatattttctcttggtgccaaaaaaaatgaaacgctcctacggtaaatgcaaaataataccttacctaagaaactatatgcttactaaataaatttaacaattcattaatttttgaaatattaaaatctaatatctaatattgaataataaaagtaaattttgaatttctaagtttactttagctattattttttttttgtaatttctatgtttactttaactatttaagagcatctacaatgatactctctatttttttttatctaaattttaattaaaatagctaaaaagttagaatagagaatcattttttattattcttactctaactatgttttctactttagttagcatttgatttttttaataatactttaaggtaatagttttctattaaaataatattaaaaaaatttagcgaaaaaatagagagctccttacatttagaaaactccctatccagctattcttttaatgttggagctcatttttttagaattcactccctattttatttaaagaatatgtttagagagtatgattagagatgctttaatcaaaagaaaaattacactgggtattactattaatggttactacaaaaataacaataaatattaattttaaaaatgttaaaccattaaattttagtccaatggccttatatatagacatacatgtacacaatttgagttcaggtgtattaatcttgaatttgacttgattttattcttaaacatgaaacgatgacaggaagcattgggaaaattaggattttactctggtgaagaagaaattgaattttcaagcttttcaactggaactgaacgagctgtgaagacttggcaagtaagtatcaagtttcttatatgtggctactttttgaacaccttgaagtagtgataataaatctaatcttaataaaaaagaagctatggaatagctccaatgtagatgaaatgggcattaatcagttcattcgtgcttttgcgtgacagtccacttttggtgctcctgaagatgggattatgactgaagaacttcttgagagactttatgaggagataattcaaggtcctcttgagtcaaacgttaatgctataccaaaggtctgtttccataacattgtctccaaaaggtacaaatgtgtacttaaagtaaacacactctaagcttcttgaaaggacatggtcatagatgctaagctttaatttcaacatctcaaaaacactggtatgtagaagtagaacaataatttctcggaaaactgtatccaatacaaacccacatataaaaatcacaattgaagctactctgcagtttgataagaccctgtttcgatcaaccaaaccagtagc

SEQ ID NO: 296778 - DNA, 6651 bp, Cannabis indica
ggaaataagcttttggacaaaggtgttataccttgttcaagtcatggtgatcctcactaatctacactcaaggttgtgagtgagtgtttatatatatattattctcttgttatatatatatacatatattatattacatgtgttgtaatcatcttcttctacatttcttatatataatatatatagtgtatatatattgtatattatgttgttgtaacatttatttaatctctttgttggtccttttattgtattacaatagagttgtaatatcttgattttcttctattgtaataaaatctctaacactctattgatacctccttgttttcaaagcttgcaggtgacgtggctgtacacatctagcgtacacgccttgtccatgtgatcgtacccttgctaccttcattttccatacataggaaaaatttcactaaatatagttatgtcattatagaagttacatgttaaatggcatgcatagcttgcatgccgagtgagctcttgaaaactgcatgccgagtgagctctttaaaagtgcatgctaagtgagttggaaatgtgcatcccgagtgagctttgaaggagtgtgtcgagtgactttgagcatgaagaatgcgccgattgacttgagcatgaagtgtgtgccgagtgacattgagcatagagtgtcgagtgattttgagcatggtgcatgcagattgacttagcatggagtgccgagtgactttagcaaagtgtgccaagtgacttgaacattgtgcatgtcgagtgaccttgagcttggagcatgccaagtgattttaagcatggagcaccgagtaacttgagcatggtccatgcccaatgactcgcatagtgaccatgccgagtgacttgcatcactactccgaagtgactctcttggtcccttcccgttaatgttaacagtactaactagtcaaatgtttccgtaaaaataagagtacatatgtagagggatgttaaattgttatagatataattaaacatgtcaataaacaattaacttttattattagtcttatgctcactttcttaatttcatttagaaaaactaaacttaactaaacaaagaaagtaatcttagaacaaccaaaatgcgcagaaagtaaattcaatgagatcttgttaaaaacttccttttatttttttgttgttgttcatatgacattttcaatatctcttctttttttctttgcggaaccattctttataaatctttcaacgaaattcgacatataatgaaaccttctttcgtgtgttcggattaaattcgcaatgaaaccattcttttcatctgaaattcgaccctttcgttgtcagttaccattaaaattgtttcttctgcgaaattgaacacaacaatgccaaaacagcctacaaatctaggcgaaaacatatccaacaaactgaaagatattgctccaaaattgggtactaaaatgataaattggattaaaattgaattgccattgccattgccattgaagattcaatacccaacaagatattagaaattacaatcaagaacaacccaacaaaatcccaataactaataattacaaatagaaaaatctaataacctaacaacattaacacccccatacaaaaacaccacccattcttccccaaaaaacgacccaaatctttcttgacagcaagactttaaatttcaacatcaaagaaaaagcttttaacctccaaaaccgtagagagtcctgccttgtctcttgagtgcataaacaacgtccatggcagtcacagtcttcctcctggcgtgctcagtgtaagtgacagcatcacgaataacattctccaagaagatcttgagaactccacgggtctcttcgtagataagaccactgatacgcttcacgccacctcgtcgagccaatcgccgaattgctggcttagtgataccctggatgttatcacgaagcactttgcgatgcctcttcgcacctcccttgcccaaaccctttcctccttttccacgcccagacattgttgaagactcaagattctgaaattgaaaccgaaacaaaacaagattagaatgaaatttcgaaaattgagaccgaaattgaatccaaatttagagctgtacctttcgaaatggtaaagtttttccaaagagacggaactgtgttttgggaattttggtacgatttgttggtatttataggagtggttttgagtttggagaaatggtcctgatccgttgaatgggttttagaagggttttggaccgtggatggttttgaatggacggttgagatggattggaagtttagttgcggatcgatgacgtggattggtgagtggtggattttggcgcttgattgtgttttttcttttaggggggaaatattgaattatttagagatgtgttttgtttggtttggattttgagagactaaagttgaaggggacagttggcactttgctttggaccattttagaccaatatttgtctcatccaatttcaaattaagttttgtcaatttttatgagattatatttaggttagttagaatttttgttgttagaggttgatatttattaaattatgttttttaagttgctaaaatttatttttaaattattaaatttaagaattttttagtttaactatattaatgatgtgataattattcttgtactaaattgtatcttttaattttgatatatattaaattgtgtctttaaatttttacatgtattaaattgtgtctcttcaatattcaaatttttattaagtcatgtttaaataattttaaaaattcaaaaaatataatttgaatgatgtttaaatttatgataaaaatcttaattagacattggctttattaagtcaaaaattgtaaaggaaaaatgaatttctccaacaaaattattttcctttagaaaaaaaaataaaattattttcctgacataaaaaattaaaaacatccaattctatagctaatccacaaacggtagtataaaatttacaaccttttatacttcaaactaaacaatagaatagaactttagaataattctgatttgatttcttcccaacaaaccaacaaaaataagtaaagagaagtaaattttttttaatcaaattaaaataaaaatatttctagattttagtatctaaccaaacttttagttagactaaaaaagacactcgaattttaaaaagctctcacttcttatttgagagtctcacatgcaaggaaatcctgaagtaaaaaaaatgagaggaccactcagaccacatttttaaaataacaaaaatagaattaaaataaaaaatagtacatatattactaaatatatgttgcaccttaatagtaatttgaatgaagtaataactgaaagttagagttcagattccggcaacttgatttttttattgggctctaatttttagttttgcttaaagattgagataacataggaccgatactactccttgttagatgaaagattagttacgtactttagttagttttctgttacaataagttgtcactccaactcacctccactcttgattgtaactaacttttttttgtaactaatttcttttcacttagctttgtatataaaagctaacttatagaattagtgtaatcaataattcagatcaatacaattcactggttttatttacttttggttttgatctctcttgctcttctagttcaacatagtatcaaatatttaaactggtcttctcattcctccgtggctaattctagcttaaatctctaaagtctttcctccaattagttgccaaaaacaaccaatctcactttcaatcacgcgttatttgtcaaactcgatgaaaacaactttcttccatggcgtcatcaagtctatgtagccatcaaaagccattgttatcaagtttcttgatacaaaatgtggtccacctgaattcctcacaactgaagatgaactcagcaattgaatttctgaagaattcattgaatatgacatctaggacagttttctagtttattggctcttatctttgatgtccgagaagatactcacttgaatggttggctgcaacatagctgctgagatccaatccaatcttgaagagtactactctacttaaaatcgtgcaaagatcggccaattttgcactaaactttgcaaaactaagctaacatgttctcttaatgactatctactcaagattaagcatcttgtagactcactagcatcaatcagccatgttctctccactcaagatcatatcgaagctatagtgtattcataatttcactctcgatttgaaaagatgcttattctgttgctaaatttgaatgtttgctgatggctcaagaagtgtgaaatgaaattaatgactctatacacaacattgccaaaccagaagtaaatcttgcagctcaatcaaagaatttattgtcccaacctgaattttcttcctctgctcctccatcttttccaacatccaatgttggtagatgtatgcattttcctcctcgagttggttatcctatgtttggatcttatcctagtcctttgtacaacagttatgaatttcttcctcctccactctatccacctttctctcagccattctgaccttctcgaggtggtttttgcggcacacgtcctggtggtcgtggatccttcaatcctaaaccctaatgtcaactatgttacaaataaggtcaaagggtcaacaagtgtttctacaaattcaataaaattttcactcgccttgagtccttaatcattcaatggtggatctgtaaatgttgctaagatgcaggttgtgcttgctactcatgagacagtcaatgactcgagttggtaccctgattttggagcaactcatcatctcactctagatgtcaccaatctgcaaagtgctaaataattccaaggttcaaaccatatgtatgaaaaatggctcaggattgcgtattatacccactggttcttctcctattaaatctcctttcaattctcaacctctctatttacataatcttcttcatgtacatgctatcactaaaaaccttattagtgttaattagtttcctaaaaataaccacgtcttctttgaattgcatcataattatcactgttgtgtcaaagatcatgtcaatatgaaaactttattggttgggaatgttgaaaaaagactttacaaattttatcaccttactctttcatctcagtccagccttaatcatgttgataagtcatcacatcactcctcaactcctagtaatgacattagctttcaatgttttaattctatttcaaatttacctatgtcaaaatttactttgtggaataataggttaggctacccatccaaatccactattatgtctgtaatagaaaaatccaacattaagaaaattgatttttatctttgcactgcttgctatcttggaaagcatcataaactacatttttctatctcaaaaacagtttatacaactccacttcaactcttacatactgatctatggggctttacccctatagactctttcaatggctatatatatatattatatatatttatatatattattacataagcgttgttgatgcttattctaggtacgcatggatttatctttttaggtacacatagatttatgttcttaaaataaaagatgaggctcttcctacctttaaaaagttcaaaacacaaattgcacttcaacttaatttaaaaataaaataaattcaatatgattggggtggggagttcagatcgtttacaaacctcttagagagtaatgatattattcataaattaacatgtcctcattctcatgagcaaaatggtgtagttgaaagaaagcatagacacattgtagaaactcgtttaactctatttgcacactctattttaccttcaaaatgttggaatgaagcctatagtgttgttgcatacttaatcaataaaacttcctactcgtgtgctacacaagcttacccttcatgaaaaattatttcaaacaatactaatttactctactatcaaaacctttggttgtctatgtttttcaaatctcagaccttacacaaaaaggctataactgcctccctcctgatggtagagtttataagtccaggaatgtactcttcaatgaaaatgatttttcttacaaaaaagtctgcagaatcatctcacacatcttcatcacctgctcctactgtacctaatgcatcaccatgttgggaatattttaccaagatctagatttattaacaaatatgttgaattaacatcctacatatgaatatctctaaaacaatgaaattaaacacgtaagagtttataaaatcttacattgattgcagcggaatataatgactccttccgctcagatctttaacccttgttcccttctatcacggagtattatcaatatctgagcatggatctctttctctcattcgggttggttaccaccgtcttccgcactatgattgagtatttgacttgctatgtgtggacatgacactctatcactataggccgaataggatgaagaacaatgaaggaggcaaaattactatagaatgaactctctcatctactagttgtcagaaaataaaaactaggtttgattt

SEQ ID NO: 296779 - DNA, 1097 bp, Cannabis indica
ttgccctagttgtaatttatttagaatagacctaccccactaccacctcactcataaaccacttgaactaattcttaccaattaacatgatcatttgatattcaagtctagaaataactaaaatataaaatatttactatacaaagtaacttattaaataacagttgattagttcatcacttaaaatagaatttttataatgatttatttattttgggaaatcttttgagtgtactcttttttgttgttgttactctgcatatatatcgtttgtattatatataaataatattaattagggtttagggatcagggagccctagctaataaattaacttcattctcttctctagaaacgtgtgaactagttgtacatgccctaacaacccaactctacaagtgtgtacttattatatatatcatcagttaatttagttatgactataatatagagtatatatttttatatacgtgtcatcattttgttattttttatataccgatttatatttttaattattgtagatgatttgtgaaatttatattatacttattaaccctccacgatagaattttgatttagataatactgtatttaatgtatgtaattatatatacgaagttatacaccttattttttttcccattataagattaagttctctaaaaaatatgtttatattattattcaatttttttatatgtatattttcatcgtaattaataaataaaagagtatgtttatattaaaatatttttcaagatttgaaattttatttggatatacttttttgagccctatattattaaaattctttatagctaaaaaaattagaaaatataatttctaaaataaataataaatatggtaatacatgcattttatattgaccgacaaaagatagtgacaatataggttgaagacataatataataataatcacttctccttgtatgtatgtatgtatgtatgtatagtcaacctaaagtcaatcccgtgttttccttttcttaaaataataataaaaataaataataatagctaggacttggagtactgtgaattattaataaaaatatatatattaattaagaat

SEQ ID NO: 296780 - DNA, 1698 bp, Cannabis indica
cacagctatcacacacatggtcttcctctcattcctcacgtcacaattgattttagtccagtgaccacccgatcacagtaagatccatatgctataagagaatagattaggcataatctgtataaaaatgattaatagagtcaatataatattgtatgctagttatattgttgttatatactttatcgttgtgagtttctcaaatcgtgtcaacaacaataaatgcatagtaatagacgtcgtttctgagcaccaatttgttgtagttgtagctacaataatctgcatgcagatcactacagctaccccatcactatttttttattttaatttttataaaattgtatttaaattgaagttgaatgtgtggttcttatggacatggtagcattagattgaattcttaatgtttaggactctctatggttgaaataaattatttatcagtagtatcgttatttctacaagagacatacttttttcaaataattttggatcattagtagatgatgttgcagtttgagttgattaatgtgattgcacataaattaattgcacatattctttggatggatgaataattacatttagtggttggaagactttctatattgtattttatttgggattcttagttctttagttaatattaggttgtcgtacatgctttcattattcaatgatattactcattttaaaacaaaaatcaagaatatataataatttttacatcttcaacatagtaattttttattttgtttggtgaaaaccaccccttcatttttgtctcgtgaccaaacaataatagattattgtgagatcatatttgggaccattttggtcacactgtttttggatcaatgccattaatttgattagagggaccaaacacaattcttgtggtacatctttgcctattgcatgcaaccccgtgggcctgtcagaaggaaggcccgacaggcccatagcctacaaagaacgagaggcccatggcccacaaagaaaaagtatgcaacaaaccagaaaaaaaaaagtccacaaaaatatcataaaaatccttttaaacagtctaaattactaaactccattcacaagctgtgatcaaattgttattatgtaatattgtgtttgtgaacttcattgatcacaatttcaaatcaatgttttttctttattcgagctgaaaaaaagcattgtgttttatctagaagaatattgtgtgagacacttttgttgagtacaaataataattattaatttatttttgtcatttattttaaaatttatgaaaaataaaattgtatgtttattaattattatttatgtgtgaaatttgttgtcagatacattgcaaaaccattatgtatacatcaaaatgttatttagcttgtggaaatataacaaattaattataaaattattaaactttaaataaataattaacaatgacaagattaacaatcataattagtaataggagaaaaataaagatgaacgccaaaaaacaactaaactaagaaataaaaaaattaatatcaatatatatactggttcaaattcgaaagatcaatgtctctattgatttagcaagagcacgtacaatacagaaaattctttttcatttacaaaagattctttatacaaaaacctaaagtcaatttctctcttttctctatatctttctctctctctctctct

SEQ ID NO: 296781 - DNA, 9043 bp, Cannabis indica
tggcttgtggtatacctggtaattcacttactctggtacaggcaacttacttagtaagatgttagagaatttttctaatggctaactctaaaggaagtcttttgactcctagacatagattttatttatctaaggaatagtttcaactattccagaaaagataaaggccaaggaaacaattctttaagctttaactgtgagaggtctcgtgtatgccctggtatgcattagacaagatacctactgttgaatgggagttatgagtaggtagcaatttaattcaagaaagaaacaattgaagacaatcaaataaatcttaagatcaaagtagaaactatatgttagtcgataaggatggtattttaatacccttaggctacaccaaattaggtttctagacttgcgtcaatgatagaaagtctacttatgagatgggtgataactatggaggtgtagtagtaatttttggagaagtgtaaaaacctatataaagcctctaactctactagtgagagtgaatgttatagtgctccagaaggctactagaaaatcatggattaaccaatcatggattatagttgccaaatagtaaagaatccaatcatggaagtgtaaaaacctatataaagcctatggaaagttacagtttttgacattattccaatcatggattaaccactagtgttacttcatgataacaaagatatagttgccaaatagtaaagaatccaataccctaagaggagtaaacatatcgtaggaatttcataatatcaaggattttatgactaaggagatgtaatggtggttgaaatttatattgaatacaacctgtcagatcctttaataaagaaaatactacatactacacttgattcggacatcaaggagttgagattaattaaaatgcacttctagttttatattagtgcaagtggaagtttgtggtaattttatgccctaaataaaacccatttcaatataattagatttactaattaataagagatcaaaaattattttatgttgcatggttaacatgattactttcatgatcatattttaatgtataaattttattaaatcctaaacatatagttattcatgattatagtgttgtgtactcagtgaaaaataatcatgattgtatgcttcaaagtatttagtcttgtgatttattagtacaattagcgataagtttacttacgtaataagtacgtggaatgtcctttcctgaacattagcaaagtatactagtatcagatgtatggggtatacattggactgggccgatattgacaatggaaaagatatcataaacttaccggtatatcttttctaagtcaatcacctagtttatcttagatcaataaatcttaatcctgagattgttaggttctactttaaagtattgtttgtgttctttgacttgttcattaaacctgacagaattgattggaccaatacttacatcttgggaacatggtagtgcaattgagtgggagtgctaatcatggatacggaatctatagcttctataactattagaagtgaaacgatggtttccttcaagcttggcttaacgcgataaatgatagagtgctcatttcagtaattatattagtttactgaaatatgatttacaagtagctaagtgttttaaggataaaatacattgaagggtagaacggtaagtttgtccctactcaatgtaaatcatctatagaggatctctgattatttggattgaaataatagataattcatagtgtatatatatttggtatatagagcgttcttatgtaatcaggagtgcaatttcaaatctatagtggagttaagaggaactaataagttaggaaatttatttagtaaattttagatctacttagtgggagcttggttacaaaggcctatggtccccgcactaactgtgataatattattttgtagtctcaattaatggattttaattaataattagaattctaaataagactatgtcttgtttgtgaattttcactaagcaatggcttatttgagaagaaaagagattttagggtttgtttattaattaagtgactttataaggtataattaataaataaatttaatgaaattttctttgataattaattataattattaaatagatagaattaatattaatagagttagaattaaaagatgacatctgagaaaagaaagataagtttcaaataaaatggcaaaattaaaacccaatagcccactaagggattcaatcataatggtttaaataaagcctattttaacctttatttgttccatttaaattctaaacctaacactattagctatcatataaatagaaaagtatagcccttattttcataacctaattgactcattgtcaaaaaaattaaaaaataatgagagcctttctatattttttcgaatccaatcccctctcttctctctcaataattcgaagcctataatgattgagaatatgccagacatgtcaaaacaatacctagtatagtgaggaagattgtgtagaaaaattgacaactggaggagaatctaggttcagatcttgatcatactctgcaacaaaaaggatcaagagttagagatttgaatggaaggagtcatgcaattccattgtcatcaatgtaatgttttctacaactttatatgtataattcattgttttagggacttcatatttagggtgttagattatagttttataataaacatacatgttagtaaatctagatcctagtaaaataagttccaacaaacacctcattgcaaggtgtcgcctccaaacaatgggtcgagaagccacaaagattttcaaaaacagaagctacgccccttagaagccctaataagtctcaatgggaaaatagaaagaacttaaacccatgaaaatagaacctgcaagacttgaaatttcaagccactctctctaaaaaacacccatgacaagataatctcagcctaattttggttttcatatctaataacctcctaaatcctagttctagcagtcgcatgcacaagaaacccaaaacatggcttgaacaaaaatttctaccctagtgtggaatggaaaagttctacaaagtttggaaacttttttgctttgctacttgaaaaggaagggttgttgtaatgaatggcctaaaggtggcgaacccagttgatcacctggtcaaaacctccttggatatcgaagtcttcgatagactaggggtggatcatgtggatgtcaaaaggcatagcatttgggaaatagctcgcttgattttcaagaagatttacgttcaaaaacgaagggagttaagaagtttagagatgataaaaagaggaacaagaaggagctcgtgcctatttataatggaaaggccatctcatataatttgaaaattaaggcttaaatcatgccaaccaaacagcgcgaaataatccaatggttaggaagttaaaatggctacatttaatgctcattggaaaaaccaaagcatttaatcatgattcgcctcgcgccctgtttactgagtttttttagaaaccaaatatattcaaagcttaaataagataaaagataataaacaatagatagatagatttttacgtggtgcatgcattaaagatccttagtctacgagtttatagtattagccttcttgggtaaatgtgtatgagattacaatatggttacaatgaaaactactgtgcttcacttgagagagagctttcttagaatttcaacagagtgactgtaagtaaaaaattatctctctttgcctgaagaaaggtaggactatttataggcacacatagggtaaatggcataccctttaccaacctatggttttgtaccccatactctactaaggtcagtactgcgagaggaagatctgaccattggctggtaagaaccttcttcatcgtgtggtgtacagtggcttgtgaggccttttgtacaatcttggacacgcatcgcgcaaaggtccctcctttgcaaaatactctctaacgaggccgttaggtaaaaaggcacgagggacataatctgatcctatctaaaaaaaggtgtaattgtctatggagtgatatttgcaagatgctgatgtggccagtgtctctaagaccttcattacctttctagttctttactaagggaagttactcccgaaagccatcgcctctcattgccttccaggtttgggagtcattccttttcttagttacctcgaataattcttcttgtggttgtatccttcccttcgatcatgacacgtgtcttattaatgaaaactcggatgacatttacttcccaagctttctagatcttttggatcatgagatcttgctattgcttctggtgttgatcgttgacatgtgccgcagatttaggtcatggatacacccgcacatgagctatattctattggaggtacatatgatgtttgcttcctcttacgtggtaaccatgtggctttttagaaagtatttcttaacccttttcatgtgtggcaaggtgtgtttagtaataaaggtcgagtgtaactggcagctgaatgacgtgcagaaagggaccttgacattttgatggggcccaagctgatcatatgggacttctcatctccctagcccttggatctattgcaaaaaatttcagccgttgatctttcataggcatgtcttctttttaaaatataaaccgcctttagtggtgttctttttactccgtatactcaaagctccatattttctctaaaatttcttttccttttccagccatcttttgcatggaagaagcgttaaaagatctgatcgagtgattactcgtcattcgcacagaacgtttgattggaccagcaaagttcttccttagggggaacgtttgatttttaggttaattgcgactactccatcgactggctacgaaactttcaggaaggctttcttgacacgccacttatccctcctgattcgacaagtatgttcaccaaccccctgtgaatttttggcatttcacatttagaacaaaagggttcttgcttaggttagggctaggactattcacatgccaaatagcaggatagtctgtacgaaagaaactccatccttgcacccattagtcatttcaaaaggtttgctttttccttcatagcaatggatttgaaccaagaccttctcccaatcgtggccatatctgttgaaggtggatctattccatctgtcaaaagatctttagtgtagacaggaccaaatcaaggcacctatggtaacatctcaacttgaggaggccttggaaaccattgtgaaaaatgatttcattgttgagagatacctacttgtggagactaggagaggcgaaggggtcaaaattcctccgccagtgcaaggcctatactgagtccatctgggaattggatgagaaagccaactagcttttgatcttatgggatgtttcaagcgtattttgaagttgttggcctccgtaatatccctagactaatgtgggcacaaactttctgtcacggggaaatctgcatctattagtgttgatgggttcagtgcataaagttcgtcccacatttctagtggcgctcaccttcccttgagaacctttttcacgaacctgattgcaaaaattcgaattatacctttctagttgatccctttgtcatataggctcttggctaggtggtatgtagcaatgtgccatctcttcagttaagctttcaactcccaagtattctaatgatttaccttgagttttgcctactttttaaactctactagtttccatacttggactagcatacttgatttgtagcagagcttccccctcaaagtgtttagactaaggagatagtcaaggaaaaagcccaatatagggccttctcagaagagcaattgatggttgggcacctggtgacaactaaactcctccacaagtccagcttgattacaaaattttagagaataaacacagtcagccttcgaggaaagtcccaagctccgagggaagtgaaggaggtgattgccaccgacatggctgttataatcacaaatgcagccaaaaatgataatgccctaaactctgattaggtgtcgtgccatcgcgatcctctatctgaagaagaagagatcttaaagaggtttaccgctacttatcctgatatggggaaaccaggtgccagtacttcgaaaagaggtaatgaacccttctgcatcctccgtacccctagcctgggtcacatgtcccagagtactcgaggaggatttgacaaatatttcctaggcataaaccaccgtagataccccatggaggattatatagacaaagtagaccaaatagttaggagccttagaaatccaggaactccttcggatactgtcaaagtaaaccctttgatggccatgtctctaccctaatttaaggagtatggcagcttcattggtcataggggtattttagcttttactcatggacaaccctatagcacttcacttaatggttgcacccatgcacaagtttctttactggattcttcttcttactgctgtaagtttcctcatgactcaccatcgctcctctcatttacttatattgttgttttatgtgcatatacacaagaatctgtgatgttgaagtcttggagtaacatgatctcagtcgctatggacaaggccaagaaagcccaagaaaaaggcaaggggaagattaagaccagggcctccaggacctggaaacttcgtcccccctcaacttcctcatcatcagacgtctgggagattccccctcccaccaagactgggcctactacactggaccatttttctttggctggtggagagaaggactctagcactgaggctctcgctgctctaggggagcgattctgacaggtcatcccccatttgagaagaacgatcctaggcaccacaccaaacacggtgacttatgatgatagcttggacggacttgtctttcccccaaaaaggactcttattaagtccaaacgcaagggatcacatactgccctgggtcgtagcacaagagggttaaacgttcaatcccgaacttgggggcatctggcgtaccatcgtctagcctaccattacaacaacagcaacaacaaccacaacaaccatagcaacaacgacaacaacaacagcaaccacaaccacaatagcacaacaacaacagctgcaacagcagccacaacaacaacaacctgggcgagtgcctctaccacaatagtagtgaactctatcccctcgtcagttgcagattgtgccatctcagtctacctcacgcccctctcagtctcctactctttaacacgttcctgggtgcacaactcctaggccgcttttactaatccatctcagcacaccgtagggggtgaggttccttctttgggaatctccttcccaatgaggccgcctattctcggccatgattacctcacaaaggcaggcaagtctgctgccattttgaaaatgtgccatgactaggaacaaataaatcttcaaaagagggctacccaactgtcttctatcaagatagttgagattgcagagggagttcgccagccttcatcctccagccctgtgtttgatcagactgcagtgagccagaatctggtacctaatgtgggtacagacattgccccatatgctgtagaaatgttgaacagtatgagccttagtgtgagcaaactcacatcagagaagtaggtcgtgagcagcagtgttgatccatacacattatcagtggccgccaaacagcaggtcgcggggttaaatctcaattttttgagccattcttccttacgataaaatttttattacgaaagtgcatgtgtaacattttccttttatttttctttctctagatggcattgtttgcagagaggaccaccaaagaagtgggtaacatgaccattgaactgagccaactttatgctaaagtctaatccttgacaaccgagaacggggccttacgcacagaagttgagtaggtcaagacgcaggctgtctccaacaccaaaaaggtccaggaagactacgaagccaagatggatgttgaggagaaaaagtgggatgccaaatactggaagatgtacttagataataaggccaaaactgagcaagaggttgagaagactgtacgctcctttaaagagaacctaagcaaggccagggaggagaaagatagagtcgaggcccgcatgatgcttcagtttgaaactatctccacctagatctaaaaagtcaagaccctccaagaggacatcccataaaaggacctactcattcaaagcatcagtgtcgaacacgacaagcagaataaataggcaaagtcttagatatcttaggatgacaatctgaacattctttttaaaggggcccgtcatattacaagaaaccacatttttagcaataaaattttagctaccaaatataggttccagcagttaattaatattagttactaaattttggtagcgaaatgattttctagcaagttccaataaaaaaaatactatgagttttctaccaaatttttggtagcaaatttatattttatagctactaattatttttggtaattaatattttcagcaccaaataaaaatttactactaaattttagtagcaaaatgagttttaatcaaatgacactaaatatgcttgttacaagaatttttggtggcatatgaatacttttagttactaatatttttttgtagctaaaattatatattggagtaaaatataaaattgatgcattttatgtatatattagaatttattgcaattataaattttttgctactaaattatatcatatttttacactaacaaataaagtatttctagctaaagtgtgttgacctcgcttttagccaacgacaatgagtcttaattgtaagcgataagggatataatataaatataatattgtaagataaataaagaacatagagtttttaaagaggttcggccccgagcaattcggtaatag

SEQ ID NO: 296782 - DNA, 2728 bp, Cannabis indica
acactcattccacatagctttaattgtttagagctttttcaacacttttaattagttaattttatttgaaaccacttttaattaagtaataaattccaaaagattctattaaacgacataatcataaaggtagacctctccctccaacattgcgtggctaatcctctacactcaaaaccagctcctattccatcatcaccataaatcaacggtcagtaatttttctgatcgaaaaaagtttcttactgagttttaacaccctataaatatgtttcagtctcttcatcttcccctatgttatataaactatatatatgtgtattagtgtttatatataaacttgaggtttcataacgaacgaagtaagttttttgattaatatataataaatttagttgaattttgttttatcaactttctcagcaaccaaacagaagaaagaaagagaaagagaagcttagcttctctcggaatcggattcgtttttgaaattaagtaaagcgatggaagtgagttggtttcttgcagaatcggtgagtttgttgaagagcagtggtagtgatgatgatcaccattcttatgtgattcctctgttcgtagttctttttcttgcttgcattgtcattggtcatttgctcgaaggaaatcggtggctcaatgaatctatttctgcacttaccatcgtaagattattctttcttcatgccttcatataaatatataaatatataaatatatactgtataattatgaataataggaatgtataattatgatgaatgcagggactttgtactggatgtttgatattgtatacaactggaggaagaagttcacacttattagtatttaatggagagcttttctttaattttcttcttccaccaattatttttaatgctgggtacgaaatttttttgccatcttcttcttcttattattattatttgaattggtatatattgagttaaaaaatgcttctatttatttaatccttccaaaattgacattaactttcactttcacacaaacaactttactaatagaaatatgagtaaatatagggaatgggtctggttgcaatttcaacggtcaattagcttttctttattaagctttaatgtgtattattcagttatatattccctttggtgattcatattatgcttcttttttcgtaccatgaccaattagttttgactgacttgccaacttaataggttccgggtgaagaaaaagcaattttttcgtaatttcttgaccataatgctaaatggagctgttggtacaatcgtatcatccgccataatctctttaggtacacaagttttatttgctttaacttatgtgcataaattatgaatagtactattcataaagtactttgttttctccacataggttctatacacttctttggaaaaatgaacgtgggtcctctcaaaattgcagattatcttggtatgttaaattttgatttaatgtgaacatttttgttttaatttaatttaacatgtttttaattttatcttctcctttttattgcagcccttggagccatattttctgctacagattctgtttgcaccttgcaggtacttgtgggcatttttcgtatattctgtggtcctctcctttctaataattaataataatatcattttgtcattattttaggtgcttaatcaagatgagacgcccttattatacagcctagtttttggagaaggcgtagtaaatgatgccacgtcagtggtgcttttcaatgcaatccaaagctttgacctcactaatataaatacagccattgccttaaagtttattgaaaattttatgtatttatttgtagccagtacagtgctgggagtatttgtaagtatcactctttgtgcctataatgtaacataggttaccatttaccaaatcaataactttgattgatattattattgcaggttggattactaaccgcatatattatcaaaaagctctatataggcaggtttgtgaattaaaactcttatcaaatacattttattagagcaaaattataagtttatatcaaaaactattttggtgtcatttttttggtaaaccaggcactctactgatcgtgagattgctcttatgatactcatgccttatctatcatacatgacagctcaagtaagagtcttcactaatagtagggcaattatttttctctttttctggcttattatacatgaaaagaaatctaacaaagaattttaaaatgtgatgtatactttgaagctatttgatctaagtgccatcctcactgtattcttctgtggaattgttatgtctcattacgcatggcataacgtgactgaaagctcaagagtgacaaccaagtacgttaatattcacaaacacctcataaaagaactaccatatcttcatgtttagcctgtttttgttctttcttctaacatctcaattctttgaacaaattgatgcagacatatttttgccattctatcatttgctgcagagatatttatctttgtgtatgttggtatagatgccttggacatagaaaaatggaaaattgtaagcgacaggtacgttttcataagccaatcttctaccaacaccaccttactatcaagttccatattgtactttgatttattaattttaggctaattagaaattttgctccttgaactttgatatttactaaattatacccttgaacttttaa

SEQ ID NO: 296783 - DNA, 6424 bp, Cannabis indica
ctttttactgctatcgttcacgatttctctctcgaaatcattcttctttacaccgccccttactcgacccttcattattttagaatccttgtcatataaatcgatctccattgtttccatatacctgacctttgttctaaccctaagactagacttcagtggaccatattcaagcttatcaacagaatcaccactaacaccaaccctttcaactttctcacttccactaacactactctccccatcaactttccgaagcttcttttttttccttctttgactattattagcctgaccattccccttcgaaagtttcggactttgattcgaagacttcttaggccttcctcgtttgttgcgagaagctccattaccgaccacgaccccagctgaatccctggctatcacaaccttcttaccctcaataccgcaatcaacagcaaaactctccttcctttctggcaatatcgcattaccttcggagagtttccggccattatcggacactttaacttcaccgtcgacacagcaatcatcaacaaaactttcctgacattcccgtgctttctcatcactttccgatattttcccgtcattttcggaaactttctcaccaccttcaaagacttccttttcaccctcgatactgccaccgacaacaaaactatccttactatagggcattttctcatcactttccgatgctttcccactatttgccaatactttctcatcactttttacgacatcctcttcaccgtcaataccgcgatcatcaaacctgtctctttcacttacccgtattccctcaccacattcagatacttttacttgattctcaaaaacgggattttctttattctctcgcacacactcatcactttccgtgactttcacttgaacctccatatctcgatcatcaacaaaactctcgttaatttctcgtaccttatcatgactgccgaatgctccctcttcagcctccggcacggcttcgcttgactgtgtctgcatagcttgcacttccatgtccactaaaaaaaaacaaatttttagaccatagagagagagagaaagagagagatagtttctgaaacaatggatttgaaactatatatatatcatgggtggggttggggaatgtggagaatatataaaggcggattactgagttagggggaaactcaaaacagggagcggtaaattttgaaattaaggcggcaaaacagccctaaaagaaaataataattcttaattaaaaattggggatttagggtttttgtgtcacttcttctggataatgatcagaaaatatgcttaaatatttatttaatgtacggtttagtgcctaccgacctatggtgattgcaaagatttttttatttttttggaaattgatgatagggatgttctgcaactttctttattcttacggaaaggaatactgttcggtgttatttggatacaaaataaaaatagaatggaaaatgagaaagagaataaaattgaatgaaatttttgttttttttaaagatgaaaatgtgtattatattaaattaaacgttcttaatataataagcatttatagaaggaggcaattcttctaatcaagtacaagtagagtccatcaaaatagcatatttagctagtaagttgagcaacagtatttagtaaatctaaacacatgagaaatctgcactctagagaaattagacactaagtgggaaatatttgttaatagacaatggaaatcggaaacagaaaatttagatgattgcaattatttgaccactaaaagagaatttgtctctatatagtgaacaaataattgaaggtcctttagctattgcagactatacattaaaggcatagcttccatcacttcaaggcgaaaaataccagggaaaggcatagaaaattttgtttttttatttgataaaaattaaaataaaaaaataaaataaaataaaaataaataaataaattagataaaagagcgtctacccactttagtgctatgtggcagttaatatgtcttttaacagttttttatggttttacccagtttccttccttacttttcctcttcttcttgttttttcataccagtaactgctactttcaatccaagtttccttcgtttttgattgtttcttggcgggtttttctagttcctttgttctctttgcattcactgttgcgagcatggattcccttcttgatcgtatgaaatcaactattaatctaactaatactgaacgttctgtggtggccattacagacgatggtgttgctcctgttgttggtgaatctttggatcttgttttggttgtccgcattttatccccgaggaaagtttggctaaacactcttcaacgtcaaatggctaaacattgggatgggcggtttaaggtagttattttagaacatcattcatggttattttttattacttttggttgctttagggataaacttagagctcttcggatggagccatggtattttcaaaatcaacatatagtcttgtatacgcctactgttttacaaaatgtcacacccgaatctatggttttctcaccattttgggttcaagcatatatgcttcctttcctgagtaaatcccaatctttggctaaattgttgggcaatattattggtgaatttcttgaagttcatgaggattcctgtgatgaaggttggggtcattttcttcgatttcgggttcgtatggatattagactaccactgttaagaggtcgtatgatcacccagccaaaagttagggatgaatttcgggtggaatttgatatgaacgtctcctgaatattgtatggagtgtggtataattggccattcctttaacaaatgctttgttcatcttgaaaatatggataatggtattgactttgaattagcttatggctcgagtttaaagggatctgcccttctctctttaaagtatgacagatatcgggctgacttttcgaaaggaaacgcttggtcgctcatcacacgtttggctaggaacaccttaactgctacgattctgcaactgaatgcaagacctctcccgagtcccaagcctttgttatttggagaatcctctactgagaatatttctcgtggtttttagactattacaacaatggatgagactatgccaaatgtgactcccacagttaccaatcattcattgttctccactatcaacactcaagtgccatcctctactattgctgcaaccaccttcactccattggttcctcgaaatgaactaccaattcaacaaaaactttcagcaattcacttggctgatgtatatacacctgatattggagatttttatatatcacaactatttgcaacatatccacctgatccattagttaccaccacgaccaggcctcatttaactttgccaatatcttctgctgctcactgttcaccaatgactacccccattactgctatttcttttctacatggtagtatgtctaattctgcccaattggacaatcaagaaaatttgcatcccaatcaccagttcaagcgccattttgataatatttctttaaggcaaacacttaaatgatgtcatgccattgattcttccaccccgtctgtggaagttatccaagaccaaaatgtttttgctgagttgttggattcatctggttctcaagacgtttcagcgatgattgctcagcaatcccactcctcatcatgaaaattgtaagttggaatgcacggggtttggggaatccgagtacattctgtcatcttcgttttctcgtgcgtaagcaaactccttaagttttgtttcttatggaaacaaaaactactactggtgtacttactcgttttaaacaatctttaaagtttaataatggcttagaagtttctcgtatgggtatgaaagggggttgatgttgttatggcatgataatattgatgtaactctcttgtctatgaatacaaatcactttgactgttacttttcatttgatgatggcccaagatggcatttttttgcaatttatggtttcccggagtttacaaataaaaaatatacttgggaattaattaaatgattggttgatgtatcttcccttgatccatggctgatcattggagattttgatgagattttttcacaagaacacaaaaaaggtggggctcttcgaagtgaaaaccaaatgcaaggcttttgcactaccattgatcgatgttttttttactgaaatgccttatactagacctgattttacttggataaaaaatataaagaatctaaatgcattgcgggaacgactcgattggtgttttatcaacaatatttggaatgacactatagctcttcctaaagtttcacacttggattattatggttcgggtcatagagccattattgctgatataattttgtcccaaactctactctagaacataaatgctctcgattttgttttgaaaaactatggctgacggaaaacgaatgtgctgtcattatttataattgctagaaatatgattctttggaagatccttcaaatgctcttgtttcctgcttaaactaatgtgctactgatctacaatcttggcataatgggaaatttggtatcttaaaaagagatattgttgctgctcaaaatagtgtcaaatctcttcatctactactactccatcacgggatcatccacacaaagttcaaatagccgatacattgttggatgaactccttgccaatgaggaatagtattggcaacaacgctctcaaattgattggttacaattgggtggtcgtaacacaaaaatttttccatacaaaagcttcagctcgtaatgccacaaataagatttgttctcttcgggatgataatggaaatgttgtgacatcaaaggatggaatttcagatattgtgtctacaaattttcaagaactattcacaacaaaagaggaggatcattgggctcttttctgtgttttataatcaatacctaccaccattattgttgatcataactcctttttgctcaaggagttcacttcagaagacatttttgaggctttaaaaagtatgggtggagatagaagtccaagtcctgatggtatgtctgctatgtataatcaacaaaactaggatattgtgggttctttggttactaaggttgtgcttcatgtgttaaatgatggaggaaattcagctgcttttaacaaaaccttaattacattgattctcaaaattaagaagcccaagactatgaaagatttctgaccaatcaatttgtgtatgtaatttacaagataatatcaaagatgttggtgcttcgcttcaagattattctcccacatgttatttccgaaacttagagtgctttcttaccaaatcggcgaattacggacaatgttctcgtggattttgaacttgttcattatttgaaacataaaacccgaggtaggaaaggatttgttgcgcttaaacttgatatgagcaaagcctttaatagggttgaatggtctttcattgcatcagttatgggaaaaatggggtttaattttcgttggatttctctcattatgacttgcttacatacaatctagtttttatttcttattaatggtgtttgttatacccgaaattcgactagcacatcagaggaggacacgtgtttaaattggggaggatacaaaccaacccacgtaacaataattatacttgaaatggaatatctcattaaaagcgaaattgacagagtatatttacatagtcttatgcgagataaagatgtacaaactgttacctcgtgtatttacgagaaaccatgtaacttcaagcgtacaagacgagccatcaatctcgttacgcattagaagacgagatatagcaactaatcacttaacgtataatacacagtaagatagtcgtgtaagcacatacaactaatagtgaggcatccatctcaccataggaaggcatgctcgtggtaccttcactaatcagctccagacgtctttcaaagagattcacagctccgttgagtcagctctctcagatagaagctgacattcaaatgatgttgactgtcgatggtcatcttgtcgccaagaactacgatcgtcaaatggagcgttatgtcttcaagcgcagaaacgacaaggtttacattatcaacctcaaaaagaagtgggaaaagttctagctcgctgccagagttattgttgttatgttctcggcgagacgtcccagaacgatacgagttgcaacgtatttaatacacgtttacatggacctagtaaaagcggatcaatcacaactgtgtgatattcaaatattaatcacatttactttacattgtatgtaatcaaaccccacgatttcaggggataattgttgtaagatatcagtcaactatgtaatta

SEQ ID NO: 296784 - DNA, 5250 bp, Cannabis indica
aactaataaggaaataatttaagtaactacataaagataattacaaatctatttaaacacttgattttatttaataatatcacttcaaaacttttcatccatgttactctttctctttcccaccaaacttaaaatatcattagagagaataaaggaaaggcagtggcatgaagtttccaaataataaaatttcagaagaaaaagaatgaaaacaaagtaccatacaatactatgccacaccaactaaacaccttcctcttttaatttttattatttttaaccttttctatttatttctaagccaagctactttcctctctctctctctcctcttctagctgaacaagtcttaaagcagagacctttctcgagcttcatctctgttttctaactttgaaaatcaaaactttatgattgtgtgactattctctctctctctcttgaattatacagagagaaagagagtttctctcgctttattctctttcgttaaaaccgttcaaataaataagagtatagagtgttgaggatcataatctagagggaaaaaagttttcgggtttttgaatttgaaggagttttgatcattaaaatgtttgggtgtgagtgttggtgttgggacagtgagctggagttcaattactctgagcctaaacccttctctttaccttcaccacttccggcatggcctaaaggtatgtcttttatgaataaaattcaaaaataaatgacaatagaacaaacccagttcttgatttttctggtacagtgttttgaaaaacaaaattttccatttttgattcttaaatttctctatttttctccagaaagcctgtaattttgcttcaaaataatatgcgttctatattgtatgccctactactattacattacccccttctctttcttccttgacattaatcttggtggtcctgattttgtttatatgattttgatgagcctttttttcatgtcatatattttaatttcggtttatggttcggtggttccttatttcataattttcatcatcaagtttcctattttagaagtcggattggaaattaaatatatatacatatcctttatatgaattatcattaaaagattatgtttgatcactaattctcttcatacgtttggcgaccaaagacaaagataatattaatagcgcatctatttgtattaaaaaaactaaaaaagtgggtaagaactaattggcatcgttgattaagaatgtgataagagatttttgaggtattccaagttttaagcacaaaaatttgtattatatacttttagaaaataataataattatttagttgtcatctttgtactactagtcaaagactcaaagttggactgaaggcatacactttaatcgaattttatgcacatggtaatcattggatttcgaaattttgcacggattttgaaagatttcagcaaatgaaaaagaaaagacttttatgatctgatatttccaactttttttttcttaaaataaaagaagatattatcaagttattttgtgtttctttattgatttggataataggatatttaagtaaaagtgttatagtccacaacaaaaaataaataaaacatagtagaaaattattcagatgtcattaagtttatactggtaatcagttttctaagaatgtctatactgatttgtgcttaggccaaggctttggaaccggaagagtatctcttggagaaattgaagttgcaaaagtcaccaagtttgagagcgttactagtctaaatgggaaaccaaatggggtttcattttacaagcctgtgaacattcctgaaggatttttctgtcttggtcactactgccaacccagcaacaagccattgagaggctacgttcttgtggctcgagaagctgctgctactcctaagccacaacactcggaatcaagcttaccggccctggaaaagcctgttaactattccttaatctggaatgcagattcccataatgatggttgtggttttttttggttgccaaatccgccaatgggttacagagcggtgggttttgttgtcactaataaccccgaggagcctgaagttgatgaagttaggtgtgtgagagaagatcttactgagacttgtcgaacaagtgatgcggtatttgccatggattcaaagttttccaaggatgcatttcaaatttggagcacgatgccttgcaagagagggatgtggtgccaaggagtgtctgttggtacatttttctgtagtagctattggaattctgagaaagatttatatattgggtgcttaaagaacgtgaactctactctagaaggaatgccaaatcttgaccaagttcatgctctcattcagcattatgggcctacattgttcttccatcctgacgaggaatatttggcttcttcagttcaatggtttttcaaaaatggggcacttctctgcagagatggctctaataaggctgaacctatcaagtttggaggatcaaacttgcctgctggaggagtgaatgatggtaagttttggatagatttgcccggtgatgatgaggcaaaagaacatctaaagcgaggaaatatggaaagttcggagctttatgttcatgttaaaccagcactgggagggacttttactgatatagctatgtgggtgttttgcccctttaatggaccagccacccttaaagttggtttgttgacatttgcaatgaacaagataggagaacatgtgggtgattgggagcactacacccttcgtgtgagcaacttcaccggagaactatggcaaatatacttctcggaacacagtggtggtagatgggtggatgcttctgagttggagttcatccaagggaacaaagcagtagtttatgcatcaaaacacggtcatgctagcttcccacatcccggtacatacattcaaggctcaacaaagcttggaataggggccagaaatgatgttgctcgtagcaagtttttcattgattcgagtacaaggtatcagatcattgcagctgagtatctcggtgagggagttgttacagaaccctgttggttgcagtatatgagggaatggggtccaaccatagtgtatgattcgcgatcagaactagacaaactacttgacattcttccattttattttcgattttcggttgagaacatctttgatttgtttccaactgagatttatggtgaggaaggaccaactggaccaaaggagaaggataactgggatggtgatgaaagatgctagctgtgccatgttaaatgccacttaaatcatattttgaagagcttggttcctaaatgcaagattgaaaattgtatataaaccattttggagatgatactcagttcatgctgcagcaaaaagcttttgacagcatagaagtgcatccaatcccaaagtagttttaggatataaaggacatgaatatatttagttacaaaaaaatgtcttctcatttaccaagtcttaaactgtgttgaagcttgaaaataacagctagccaggttgtgcttcaacagcaaagaagaaaactggagttggtctttctgtgccaccatcgctttaagccccattcttagtaagattgcttggctttgcatctatacatgcagagccatagaaagacactgaacttctctagcctctctctctcaaaattaattgggtattgttagattggcttgttgtatgttatatacttactatttgtgtatcattccagataattgtggagttcattttaaaattcaatacgattgatttacactgtaagatcactttggagctttagaacatataatacaatagttcgtgtgtgttttgtaaattacattaatacaccaacttttcacaccaaatgaggccggtaagtcatgttatccaatgctatggccactgatgtcaccatatcacattctataaattggttaatgattttctatatttttattaaagtaaaataagtgaaatctaatattaaattgcactaatagcgatgttacatcttacaaggatgttaagcaccatgaataccttttagcaattcttagcactattaatgcttagcacttaagtgtcatatcattattgatgtcattaagcattgaatatcatatatttaatgtaataatctttatagaaatattgctattaattgcaagaggctacctttaagtggtactaagtaccagtaaacaaatctcacatttttcttatctctttttgaacactacttcaacacgctgcctttttcattttctttaatattgtgtttcattatagtcttttatacttgctttaccttcatttaattttgtagagcacacaactatcacaatggtgattatttttcaagcataaatatgactttatttctttctagtttgcaatcattgggttgagattctaactttcttatttattattattttttattaaaatgcggaaaggagtaactagaacttgagtccctttttgtaggaagaggtgtattactgctatgttgtaggaaaattgtctaaactaacaactagggactcattttgtaacgccctaaataattaggcacgctacctaataaacttatgaaatcctaatcccctaatcgggattactagtaaaataagcgcggaaattaaactttattaataaatagaatgaaaataacttgtaataatttaaaccttataatttaaaagttacaaaagttgggatcccaaaagtaattacaaaacactattacaagtttgtttcctctagccgacctaagcggcaaaacagagtctcaaaatacatcactggtagaccccaacgcgcttggtctagtgtggcccgaacatgtacattcgccgttcagctcccatactctgggctgatcagaaacagctttaccctttcctgcacagtacagcacccgtgagccaagcccagcaagacagtataaaataatgataaacatatttatcacactatataatcagtaatgtcattcacatatgtctgtatgacacagacctgcatgttacgctcacatgcctatttatgtctacgtagcgtagacccacgtgttgcgctcacacgtctaattacaataatgtgacagtcagtagtctcgtgatccgtaaggggaaataccgggtaagctgtgtaataccacgccgcccggggaaggtcaagtgggatgattctgagactgtgtaggtatgggactacacagttgaagagag

SEQ ID NO: 296785 - DNA, 3880 bp, Cannabis indica
tttattttcatttctttcctttcatattttcatctatttctactctaaaagtaggtttgatttttcagaccccttcaacattgtttactgctaatatctcggtttgtgactatctctttctgaatctttctggatcttttttcatatttatattctcttacagttgcatgtgtgaatctcaacatctctctctctgttttttttttcaggcatgttttaactctgttttggtgggttaggcttacaaaattctcccacagctttaaaggtcagttttttgaattgtaaaacatatttacagtaatgggttctctcgttttattccaaatattgtttaaagattccaaatttttgctttaaggggtttaaaaatgcactcttgaactcaatcttatcttttgttttgactcgtatagtgtaaacaaatgaatatattgcactaaaataagcacatgtacctttttttttattggattttcatattttcaatttagatttaatagaaattattgaaatattaaaatcagggtgagtgcttctaggttgtgccttggacaaacgaaagaatacttaaaaggttttactggctgagtcaaacccattaatcatgttaatattttataatctctcaaagaaattgatgtaatcatattattctcccgttcttgcaggtttatatatatattatatatgaattttttgtgtgtggtgttgctcttcactagtgtaatattcgttctaaaagtgcaagaaaagtctactaatgtcatgctgcctgaattatgataatattcttaagagcatttagaggttggccttacacaattgattagcaatattctctaatagtttggagggtgttagatactactggtgtcatatcattattgttataattaagtattgggtcaacataatttaatataacaacttttatagaatatcgctaatcacctatccaactatcataattgtggtatgttactatcatgtacttgttgagatatgtatgttcatattagcattatttttctattgtgttcccaccctattcatttcaactaccaaaagcactagcaaaagaaaagagcatgatgatgtatgtaccattgtgtcactttcataatcttgtcatgatgatgatggcattgcagccgtgtgttgtgtttttaatgattgaatctcatgaattggcatgattatatgcagataactactaggctaaacagggtcctagcagaaaacacaacatgaacaacaccatggaagaagacaattacacacaagatgggactgtggatatcaagaataaaccagctaataagaagacaaccgggaattggaaagcatgtcgtttcattcttggtaagttttttcatgtcttttttgttaccagcaaaatggtttgaagtcttctgaaatggtttgatgtttttcttgcaggaaatgaatgctgtgaaaggttggcatactatggattaggtactaatcttgtgaactatcttaccgatcgtctaagcctgggaaatgccgctgcagccaacagtgtgacgaattggtctggaacatgttatgtcacaccattactgggtgccttccttgctgatgcatacttgggaaggttttggacaattgctatcttctccattatttatgtttttgtaagtttcttacttggatatgtgtttggatcaagtatgtgtttcattagtttcattcttgaattcaaatccattcagcatacattctcaaactcattattgaacatattttatccatttaactgacttagtgttcaattttcccttcagggtgtgactttcttaacattatcttcttctgttcctggactaaagccatcctgcaacagctctggttgccaccctaaagcgtcacaacgttcttttttcttcttctcattgtatctaattgcgcttggtactggtggaatcaaaccttgtgtctcatcatttggtgcagaccaatttgatgaaactgacgagattgagaggaaaaagaaaagttcattcttcaattggttttatttttcaatcaatgttggagcactgattgcttcatcagttttagtttggattcaaatgaatgtcggatggggttggggattcggagtccctgctgttgcaatggccattgcagttgtgtttttcttctcaggtagtcgattgtatcgtattcaaaaacctggagggagtccccttacaaggattgctcaggttattttcgcgtccttcagaaaattcaatgttaaagttcccaaagacaagtctcttctatatgaaactgctgatgaggagtgtactatccaagggagccggaagcttgagcatacggacaagttaaagtcagtatagcattcaattcttctaaaatccttgaaatatctgattttttatagaatgtttgaatgtgttttcttctgttttctttagcatctaaagttttggtttttcctatcaatgtaatattgcagcttctttgataaggcagctgtggagactgacactgatgaaaaaaagggcggatcggcaaacccctggagactttgcacagttactcaagttgaggagctgaaggctgttattcgtttgcttcctatatgggcatctggaattgtctttgctgctgtctacagccaaatgagcaccatgtttgttttgcaaggcaacacaatggaccaacacatggggcctcactttgaaattccatctgcgtctctttccctcttcgacactctcagtgtcctcttctgggctcctgtctacgacaagatcattgttccatacgtcaggaagttcactggccgagaaagaggcttcacccagctacaacggatgggaattggtcttgtcatatccatgattgccatgatcactgccgggattttggaagtcatccgtctagacattgttcgcaagaacaactactatgatctcaagtacattcccatgtcgattttctggcaagtcccgcagtatttccttgtgggatgtgctgaagttttcactttcatagggcagttagagttcttctatgaccaggcacccgacgcaatgagaagtatgtgttcggctctctccctcacaaccgttgcactaggcaattacttgagcactttgcttgttactattgtaaccaatgttaccacaaggaacgggcaactcggttggattcctgataacttgaacagaggtcaccttgactacttctactgggttttggccatcctcagcttggtaaacatctttgtatatctattgattgcaaactggtatacctacaagaaggcagtaggtcctgccaaataagaatctaactaatctttctctttgtttagttattttttaaaagggttgttttcaaggtcttgttatattctcattatttgtttgtaaatgtggtagtggtagaagatggcatgtttacattttcattacagagttaaagtcctggtattggatttagtatttgtatggaaggtcaagaaagttggtgaagtgctaaatatgattttatttttgggttgaatctttttgttaatagtttccaagttgtctagccattaaaggttgaagaaaacttttaataaacaatatcatataaagaacttttcaacaccataaaaatgtcttttgcgaaagagaaaaatgtagaaaataaaacaagtgagaaaataataaaatcatgtttttaatttgtatgaaggataaatcacttgtttctggaaatgaattttcagtaattttttaaaaaagaaaatagaaaattaatcaaatcatgttatgttttaatttttaaacacttaatttcctttttttttttttttttttgtagatttcagttagatattacagttaaatac

SEQ ID NO: 296786 - DNA, 3739 bp, Cannabis indica
ttttttttggtattttttttttaattttaggatattatatatatggacatcgtccaaaattatagtgtcactggattaagtttcctaaattactcttatagaaattatatgacacctagctaccacaatgtccattagcatttttctaccttaaaatagtcaaaatgttattagtaaattaaataacaataggaggaatttttttaattgacaaaaaagtttatttattaattttaggtaaaaaaatattataattaattattttggttaggggaatactacgaccaattatctaactttgtgacttttgaatctccacattgaacccactttttttttttttttctttaataattgattttgggtatttgggtgaaagtagacatgtcatttttagtagctggaacctggaaacgtctatggctgctctgtttgacttttatgtcgatttttttaatgcacataatattaaaatgcttgttaaatagtttagtagccaatttatgttatttttgctgtgtcaaaattgttaaatttggtcaattactaggaaatttgaaactaggttgttctaaaatattaggtgcacacaagatgtttgtggaaatgtctatttttttagttgtcaattggagactaatcatacaacaaataggacatttaatacaaacattgaagtttaaactatatattatacttcctttggtcaagtttttgataattgatgtacacaagattcttttcaaattatcttgtaatatttagctgtcattgtcagttgagattttgtcaaatttgccaatattaaggagtaattattttagagtggataaaaaatgttgttttttttttaaaaaaatgttactattataattcaagacatagattaattttaaatattttatacagattcatagagaagtatgggactcacatagtagtgggattaagcgttggaggtcaagatgttgtgctggttaagcaagacacgtcttctaacatagaaccctctgagctcaaaaaacacttggatgagcttggagatcagctctttactgggacatgtaatttctcaccaatgctctccaaaactaaagataacaaactgaaggttcataaaatctttaccatgtttctttacctaactcataaatttgtttaacagggtcactaccaaagaccgaaatccctattcttattcccattctcattctctgacttataatttcaggcacctctggctttcaatttgttcgatcctcagcctatggcccttggcagcgttgtgtccatgaacacaaaagatgtaggttcgaccatataaatatctctttattttctgttaagacttaagattatagaactgtatgcataagtatactgtagtaatatgtcatatatgaaacatttggtaaaagatttagcctagtcatttaagcaattcaggattgactttgactagtatctaggagtattgttttttttttttctatttaagcgtttatatattacattgcataatctggaactcgaacctaggatctccaacacacaccctcttatggccacttgaggctaggccacttaagctagcctcaagtggtctagctcaagtggttatatctaggagtattgtaaactcttgtttacaggcatatgtggacccaagtattgttctatttaacttacattacagctcaaaactatacatatgaaactcaatagtgtatgatttggcatttgtatctggttgttggtagattaagttaactttggccatgatttttcttttattacttatgcataactattccttgtacatcaacttctagctaaagtttttgtgtattatttttaatactaattctcagggtatcactgttgtatcctcaaagagaggaggggatccatccaccgtgagccattgtgagtggcttctaacagttccatcaatgccggatgtcattaactttaacttcattccaatcatttctcttcttaaaggtgttccggggagaggtttcttatctcatgccatcaatctctatcttagatgtaagtattcaaatctctatataccagtgtaagattcaacttttaacatgtgatggttactcatctgaaatgtgaattattgctaacttgtactgatatgagtgtaatgagtttcttaataatgtgcagacaaaccacctctagctgatttagagtactttttggactttcaaactcacaggatttgggctccaatttacaatgaccttcctcttggtcctacaacaaaccgggctactacatcgggtgcaatccagttcaacatgatgggaccaaagctgtatgtaaacactcatcaggtacccatgattgctttatgttcaccaaaacaatttttttccttattgctcttgcgtccaaggttcaaattcaaactaatatgttatcttcaacaggttgtggttggtaaaacaccagtcaccggaatgcgcttgtatcttgaaggcatgaaatgcaataggtactttcactataccttatggcattaagttcatgtcaaagcatgttagtttgtctttctataattaaaagcaactctgataaaataggaaggaatattttaaaatacactctttatgagaactatgtcatctaattcagttttgtagaaatgaatagctgtggccacattcttcaaaaacacaaaaacactttcacccttttctacaaaactgaatagagtacaagttaccaaatgtttgatattccttattcatttagttaagagaaatactaaggagcacatgtgccaaacaccacattaggtgacataattattagtattatcactatctgatctcacacattttgattatcaaatatagttatcgtgtatttatgagaatgctctatcttccaggctaggaattcacctccagcacctaacaaactgtccagttatgttcaaagacaagatagacgacacaacaatatggcgaggctcacaagacatggccggtcacgagcagtacttagaacctatcaatggaaagaagttttcccatatctgtacaatacctataaaatacaacccccaatggaccacaaagaaagatgttgttttcatagtcacaggggcacaactccttatgacaaagcaagactcaaagaatgttcttcatcttaggctcttgttttcgagggtgtcaaactgtttcattgctcaatctaattgggcagaatgttcctcagaattttcccaaaagtctggtattttctcagctataagtaacactttttcaggtactccacaattgcccaaagataaacaacctgctgtgattgtggattctgccatctttccaactgggcctccagtttcccaacaaactccaaagcttcttaaatttgtagatacatctcatttatgtaaagggccacaggataatcctgggtattggttagtcacaggagctagattgtacttggagaaaggtaagataggtttgcatgtaaagttctcattgttaaacaattcttcttgattacaaaatctatatactactcaattattacattttttaataatctactatgttgccaacacgttattaataaaaaaagaaacaatttttgatttaattaatttaatttaaattaatatacctaataaaaataattagcaattataattaaatttaggggctttttttttttgaaattaaactcttattaacaagaacca

SEQ ID NO: 296787 - DNA, 2038 bp, Cannabis indica
ttgggttttctctttttcctttgccatcttcttaataagtttgagtattcccatatatggtccccacaaatgtcatgacattttttctttttcatttttctattggctttggacttaagtgtttggtgatacgaaccaccattgctcccaccgctttcgcagcgactcaatctgatttcacaaaatacaaactgtcaaccggtcaatttctcttcatcatggccctatttttttttatttttttcccaaaatatcacaaaattcaaaactatattaccaaaattaatatattttttttaataaataagtggttggttggttagccatgctccaccttcatctccggcaatgtcgacttccagaatcatctaaacctgcgaatccaaaaacgattaattaataaataataaataataataattaagaaaaaaaaaaataatgggtatctatgacgtggaagtatcacgaagaacaagaaaagataaattcacgcctacaaaggaggacggataacagacacttaacgtgacacgtaacagtggataatctgacagaaaataggcagccattttgttgtgacgctaaccccgtaaaaataacgaacaaactaacggaacggtaacggtaacgggtaacgacgtaacgtaaggcaagttggctagtggggttggggggagaaacggaaaacgacgacggaaggttgctgttatgaaatgcactatgggctttttttttcaagttggggaaaaatcactcaccatgtaaaagagaaaaaaaaacaccaaactggactgaaattcattaatcgccagggatctaaaagcaatccatctcaaacgatatacagctccaaatacatcatatatatactgcatttttttttatatataactcctttgtttttttcgttttttcgtttaggccccaattgtttatactatttgtagtattggctttaaaattgaacgaatattttcattttcgtcatcgtctcttttttttttccttcttctggttattgccagtggtttccatggtgaatgaggtagacttggcctggatttccatgaatattatggtgatgatgagcatagtacggtgctctattagagacgaccgatttttgaaacgccatatgtggagcgatctgtcggaggcaccggccgtcggcgaatgatgacatcggagaccttggagtcgaaacctgagcagtactgtaagatgaactggacgaagccgatgaaggaggaggagagattttttttactgattttggaggaaatagaaacgctctgatcttcagtgatgataatgatgaagcacctcgatcgtattcctcaatcagattaatcagatcctcatcacaagtgatcgagactaaagcgtcaagatcttccgacggcagttgacaacggagacatacggaagttccacacaattccacgagcttcaacgatagctctgtaaacacaaaatccacatatataaacgacaacggaaaataaccaaaacagaaaacggtataaacgaaaaatagtaaaatattactaaccggcgaaggaaatcgagcgatcgacggcgagaacgcgagtatcaccaccgagataccggagctttccgtctggataacgagggaggattttgccgccgtagctacagaggaacttgatattggtgactgtggagggtttctgagtggttccgaccatgcttgctggttcaatttgagagatgaagttcgaatttgagagagaagattgtgtaattggaagagtggaggagagaagactaatctggaagatgctttctgttttgcctcttcaagcctatgtatggtacccttaaccccttatttatagtgtttatgcttcataggctggtatgaagtaaaagtaatgtaaaactgtcaagattaaatgaaaaaatatattataataataataataattaaagaaaaatatagaataggttaagtttgctgacatcagttagattcccaataataaaataaaataataaataatgaaaaaaaaaaaaa

SEQ ID NO: 296788 - DNA, 10529 bp, Cannabis indica
ttatgttctaatattgcagaaatggagcagatttcctcgggcctctacttcctgctgttgctgaaatatgttctgattttgatccgaccatagacgtggaaccttcacttttgaagttatttcgtaacctgtggttctatgttactttgtttggtttagcacctcccatacaaaaaacacaaccaccaacaacgaagtcaacatccacttcattgaacagtgtgggtacggggacaattgctcttcaagctgttgggggtccatacatgtggaatacacaatggtcttctgctgtccagcgaattgctcaagggacacctccacttgtaagtttgtgatgagtatcctggattatttactttttttcctgatctctttctttggaacattttttttttagtaaaaaaagtttatttgggggtaatgtttgttatattaagaataacatactggtatcagtgaaaaatttaggggggtatggaaggatgaactgtgttagaaatccatgttcaacctaggagttcattataacatctttggtagtagtcagtagattttgggaagtacaccaaactattgtctgcttaatttttcataatacatttttttttcttttaaaatatttaaactcaaaataccctctctttttttattcctttttctggatcatgtagaactaaaaatctttttcattgttggcctcttatgtaagaattatgagtttgagttaagagcaccgttttgttgccaaattgcaattggtactcaaaacccagtttctatgcgtgcaagtagagtttatcctagagagcttgacggtagctgggagatcaaacttgataaaaatatttggactgaataagtctattacatctaactcctgatgattgggctacacctaatagctttgtgtgttcattgtgttcactattcgttaatctccttgtatcagaacttgtcattcaaagtcatctaatcaatcatcattttttacacgtgttgtacttttcagatttccatgttgaactaaggctcatttattttagtatatatgcttgtattttgttctgtcttgtgagtaattttgaggcttttgttccattttcctaggttgttggctccgtgaaatggctagaggatgagtttgagctcaatgctcttcacaaccatgggatctgtgaaggaagtggcaatgggaaagctgctctctctgctgctcttggagggcgcatcgatgttggatcaatgagcacaattacaggttatttattctcttataacttttaggatttgtgtttgtgctcctttgagactgtctgagagcaatatacttatttgtcggttttaggaaaaacttttcttccctctttcctctccctttttggtgctgctttattacttgtttacaagaattcatctgcactgtttttcttaaggtagaatttctctttattcttcaatattctttatttactgtttcgaatggtacttttcaatgcttgcaggagtaaaggcaatctatattcttgcagtagcatttttggagataactcgctttggtagtaatggtggcatcctcaacagagataccaaacctagaagtgcgtttagttgtgtatttgagtacttaaaaacaccaaatcttatgccagttgttattcaatgcttaatggcaattgtccatcgagcttttgaaacagcagtattatggctggtatgtattttttgtgggagaacttccaaacttaacccttctcgtttgttccttttcccaaaaatagctgtttcttttcctgaaggatgttacatggagtcaatcttcattttcattatttattggatgctgcatttacattatttattgtaggtggttgctttacccattttaatataaaccaatggattttgttattatttagaagagctgctatgtctatgccttgccaatgtcaccattttttatatgatttcaggaggataggatatcagaaaccggaaaggaagctgaggttagagaatcaactctttctgtacatgcctgttttcttatcaaaagtatgtcccagagggaggaacgtatccgtgaagttgctgtgagcttgttaaagcaaattagagatagatttccacaggtaaattatgccagcaacattgctcattcatttatgcaatttcccttacctatttaagtcataaaagatttcaacatttatacagattttatggaactcttcatgtttcgatttcctgctgttctcgattgataatgattctccttctgctgttgtcaatgatcctactcgggtggtgactattcgttctttgtaccaaaaagttgttcgagaatggatcattgaatcattttcctatgctccttgcaccagccaaggtcttctacaggttgaaaactctgctctcaaataaagtgtccatctctctaagtatcaaaatatgtgaacttttagtggcattattttcccttgcctaaaaaaaatattattttcttctcacatgctaagaagtcttgtttctttgactgtgaatgatggggttgtcaatttataatatgttgctctcttacacggtcatattttgaacggattcactggttttggatcttaccatatttacattgaaattcataaaatcacatctattcataggttgcaagccatcccctttttatttctaatctatttgcattaggaggtgtttcgtggaagctcatttaattttccacgacctcctgaaaataagtatgatgatacatctttcagaccacatgttttgttttatttgtttattttgattttaagtagttttcacgtgcattttccttcaaaaaaaaaagtagttttcacgtgtaaaaatgcgaacctttattctctcagcatactcttttgaatgatattattgctttattatcatactgcaggacaagctttgtaaagaatacacacggaaaagagcacaacatacaactgatactgatgcggtttctcttctaactgagatacatattggtacagcaaaaagtgagtgctggaccgccacacggacagcaaatatcccagctgtcatggctgctgctgcagcagcatcaggagcaaatttgaaattgacagaagactttaatttgaaggtgctcagtactgggatagtgagcgcaacagtgaaatgctaccatgttggaggaattgctggagaaattgctggaatgagaaggtgggcaagttgccgatcacaggctgaggatgggatgttgtcgatcaagtttgtctgtttacttcgaaattttgttaatattgcaaaaaatggtgggcaagttgacaagtcacaatttcgtgaaacttgttcccaggcaactgcattacttttatcaaatctggtaaaaaaatttattgttttacctttttgtatttcaaaaatcagggttggtatttgtgtgcctgaattcattatctatcctattccagagttctgattcaaaacaaaatgtagactgctgttcacaacttcttcgtctactctgttggtgtccagcttacatctgtacacaagatgcaatggaaactggtgttttcatttggacctggttagtttctgctgcacctgaattcggttcccttgtccttgctgaacttgtcgatgcatggttgtggacaagtgatacaaaacaaggtctttttgcgtctgatgtgaagtattctgggccagctgcaaaattaagtcctcaccttgctcccgcggagccagaagggccacctgaagttgatcctgttgaacaaataatggctcaaagattgtggcttggttttttcatcgatcgctttgaggtttgaaattacataacttatatccctctgatcctccctttgctcaaattgatgcgtgagctgaacatttggtaatggagggaagctttgaatcgataaatgcaaccatggtttgttaaattgcaaaatgtatatttttcataaattatttgcaccaaatataatttttctctataagaaagatacgtatggtgtaatagatgatttcctctttatcatttgcctggagataatccgggattgttctcattctagtaggaatgcttactaccttgtacaaattttgataattctcatcttgttgtttgttgaaactgatgagaatcttcaattcttttgttgagaaatagaaatctttagctcttttgaccatgattaaatctgtctttgacaatttttttttctttttcatttatatcttttctacttccatagttgacatggtatcttcatgtataatatagtttttattgtgtcatatcacaatatttatatctttgcttctttgataattgatgtggtatcttgatgtacatttttattttcattgtgtcatatcttaatatgattactgtggatcaatgtgttggtgtgtgtattttctctttctttatgcggttgtttaagatgattcacattatgttttttgtgtgcttgcttaggtagttcgacatcatagtattgagcaacttttgcttattggtcgaatgttacaagtgtcaacaaagctcccgtggaacttttcacgtcatcctgctgccactggtacctttttcactctaatgcttcttggcctgaagttctgctcatgccaatcccagggaaatcttctaaattttaaaacagagcttcagttgctggaagattggatctacaggtgagaaagtcacttcttcatacttaatgcatactcactgacttgcaattcagtcctctgcgctatatcatgtccttgacttgtatctagtgcatctattttcattgagtatttctcttactataaactaaattgattgaatgctttgagtgaatctatattgataaacagaaccaaagttacaaagttttccaagcaattcgagaccttggaatatctccacagagagtctcaacaataactacaataatctactagtttttttactgccttagattctatttaattatctataatacaaataggttgattagaataattaactagctcactagaataaccactcaaacacagattttcacctaataaaacatgctgacttgtacattaattattaatccaggtcagcaatttatcattgcttgcattgctgctggaatattttaggcgaacaactggtctaatacgttccttgtcatttgtttctctaactagtatccatgtagcttgaaataagttgatttgttggttggttccttgtcatttgtttctctaactagtatccatgtagcttgaaatactttgatttgttggatgttctcagtatcatgaactatgatgcatgtaaatgctactaaaattttgaatcccacaaagtcccagggtgtgcataaacttcaactccacatttcaattaattagtttttttcttgaattctcaaaacgtcttgttcaaataatgttggcatgtgcaaataggtttctatgtataccttatctacttgaatttgtaagttatcattggatttgatacagggtctcgttgggctggtttgcgtttgggcctgagtggtatgatgccaacaattcgagttttgcccagagtgaagctcaatctgtatctttatttgtgcactacctttcaaatgagcgagtagatgcaagtcaatctgattccaagggacgagcacgcgaaaatgggagcagtgtggttgatgtggtaatattattgaattgtagaacgtaaatgttttgaatttttaatgatatctgaataaaaagagtaagacctttaatatacagataatattttattcagcaagtcagttattatattgttgggattgtgcatgacctgttagcaatgttcaataatagtacttacaaaattgcaggacaatcaacatcaccctgtttggggcccgatggaggactatgctgtgggaagagaaaagctgaagcttctacttttgatgctatgtcagcatgaggctgataggcttgaagtttgggctgaaccctctcatgcaaagtaaacttaacaacgaatctattaactttgtcgtattattttgaaagaaaaaaaaaacaaagaaccttgcaattgattgagtgtagcaagtgatgattttcatttttatttttacttttatttcaggaaaaatactccctctcggtctaaaattagctcagataaatggattgaatatgcaaggactgccttctctgtggatcctcgtatagctatatccttagcatcaaggttcccaacaaacacattcttgaaggctgaagtaactcatttagttcaggtacgtcttatgatggtttgaatttatttaacttgagttgattggtaacagcaatggtgaattacacgataggtgacatgttgttgaaattaattttcacaccttagtttagttctcaaagttgacatgaaaatgccaatgatattggccactaaacagtggccctagggcttttgtgctgtagtggcaagggttccttgagttgggtccaacttaggcagagctcttagggttcctgtgagactagttcgggtagggccagactaaaaagagaataaaaggcactgaattacgacaacaactttctattccagatcaaaattatgagctagtcatattttttgatatacctagattaagacagccttacatatgatctagtagtccatgaaaaatatcctagttttatcaaactttgctgatgctttattatcatagtttatgatcctgcacaacccttaaactcgaatatttcttgcagttgcatatattggatatccgaagcattcctgaagcattgccttattttgttaccccaaaggcaatagatgaaaactctgtgcttttgcaacaattaccacactgggcagcttgttctattacacaagctcttgaattccttactccggcatttaaagggcatccgcgtgttatggcatatgttcttagggtcttagagtcatatcctcctgagcaagtaacattcttcatgccacagctagtacagtcattgcgatatgatgaaggggtgagttattctgatgattccaagtcttggattatccttttctttttcccaaataaatgttttggagttgcagactttcataatttgttatatgtattgtacatcgattttgttttcacaatactagattctgattcctacaaaaaaaaaatattttccagaggttagtagaagaatatttgctgagggcagctcaaagaagtgatacatttgcccatactttaatctggcatttacaggtaatgatctatttaataagacaacaatattattagctttttttctcctctgcggaggagatgaggggttttacatataaataataagattttgtatgacagagtgaagaattaggaccagaatcagggaaagaagctggctctgggaaggtatgtctgcaacccatgctttatatttcattgtaacatggctctctcctgctcttattaatcaatttctaatgctccatttacacacttccaaattagtatgttgtttcttgaaattcctgtttttttagtgttaccaagtacttaagcagttaaccttttaattaaaagcagaaacagaaaaagttgattaggctgattcacaattaacttaagcctagtttacaggccgcacgcagggataatgtatgttcaaaataacgtttttaagcctcgagacgcttttttggtctaattatgatacacgaatgttccattccaatattaaaagaattagaaaataggaatcttattgatatcaaaggaagtattacacatctttccaagctttttgtgacacttggatatctctcagaataaattttactctaaacaatactaactcatccctaactgtttctttagctacaccctttaggactattaacatagctcacttaagacattcaatctcagccaataagagttctataaacctaacagactattttctataatttattgggaactagagaagagtagactcttttttgcattaacattaattgttctagtaatttatgcactatataacttgtgtgtttactctaatgacagaatactcccttccaagccctgctgccacttgttagggaacgtattattgatggtttatccccaaaggcacgtgacttatttaaaagagaatttgatttctttgacaaggttacatctatttcaggtgttctttttccacttcccaaagaagaacgaaaagcgggtattagaaggtatgcttcttaatctttaaatgatttactttagtcattgagaaatacatttctgatagaatgttactcacatgaacagagagttggagaaaattgaaatgcaaggagatgacctttatctaccaacagctcctaacaagcttgttaggggtattaaggttgatagtggaattcccttgacgtcggcagcaaaagttcctattatgattacatttaatgtgactgatcgggacggagaccaaatgttgtaaaaccccaagcttgcattttcaaggtgagcttattagttattccctaatattttcaattttcttttgcctgtgacttagaattttttaccatgattctaagatgcataaatgaaacttgccaatatacagaaatttaagtactaattttattatattggctcgtaccaagatttaatagaataaattcaatctgaggttgtggttagtatgatttctggttgattacgaatagagtagagttatcttactggagttttctaatttaaaaggtaggggatgattgtcgccaagatgtccttgctcttcaagtgatttcacttcttagagatatatttgaagctgttggactaaatctttatctgtttccttatggtgtacttccaactggccctgggagaggcataattgaggtatgtttacatatgagactgatattgatgtaatgtcataacccaatctcaatcccatgtgtatcttttccaattatatatgtccagagataaaactagatttttactgtgattgtatcgttctttgcgtatgatgtctctcgtcctcaatttttaccctgtaggtggtgcctaatactcggagtagaaatgaaatgggtgatagaaccgatggtggtttgtacgagatttttcagcaggactacggttctgttgattctcctattaatttcgaaactgcacgagataacttcattacgagcagtgctggttatgcggttgccagccttctactgcaaccgaaggatagacataatggcaatcttttatttgacaagtaagatctttatcttcttaactattctacaatttgtcaaagtaacaaaatgttgagttattccttgtattgtggtgcagcgttgggagacttgttcatattgattttggttttatttttgaaacttctcccggtcgaaatatgcgatttgaaagtgctcattttaagcttagccatgaaatgactcaactattagatccttcaggggacatgaaaagtgaaacctggcaccagtttgtaagtttgtgtgtgaaaggataccttgcagctcggcatcatatggatgggattatcagcacagttgagttaatgctagacagtggactgccttgctttagcaggggtgatccaatacataatcttcgaaacagatttcatcccgaaatgactgatcgtcaagccgcgaatttcatgatccgcgtctgcactgatgcttacgacaaatggaccactgctgggtatgatttgatccagtatttgcaacagggtattgagaagtagaaactcatttttgggatctgtacatacatatgatgtttttcttacctacaccataaatataagcttagtttttcaaggattttctatcctagtataatagaattccatttgaggctgtttacttttgctaagtgattatcatcttctcttttccaagtttccaactaagtattaataagatgacaattttcaatctctttatccaaaaaattggaaactaatcctctaataacttccaaaactacatgtagcttttattatttttattattacagtagaacttttattaaagaatatttttgggaccaaataaattatattctaattgagaagttataactaaatagagttacattagaaaaagataatcaaaacactaaaaataacaacaataataataaataatttttgatactatatcataatagtattattttttagtaaatataatatttatatatgtattataatttagaataaaattattaagtttacataaataaatttataaaatatatttatatattttattaagatgtaattattcttatatagagatatacttttgataagtacatatttgtcttataaatatgattaatttatgtattaatatttttaaattgattctttaaattattgattagtgtgattttaattgttttggatattttaaagactaatcttgcatttagaatttggagggatgttagcatatt

SEQ ID NO: 296789 - DNA, 1869 bp, Cannabis indica
aatagtttaataagaaaaaaacttatatatatataataatacgtaatatcataatcatagcatttttaaaaagtattataccattggattattttttaaagtaaaggtgacaaaaatgatgtggaagaaaaataaaataaaatattatattttgaatgatgtgaagatctataacatcttcaaagaatactatcattggagatgctctaacgagcattaccatcggtccgtaatcaatgctatagagggtgagtattggtgttggtactaggccgataatagccatccaactggagctactaataatcaatagttctagactgatgcttaataataaaaatgtaatttttctatcattttccttgcattaaattcaaaactttacagaaaaaattcatatattatttttagccacaataatatctcaaaagaacaactaattaatttacaacgattgagtaaatacaaaaatatttctaatattaagaatctaacttagttacgtatatatatgtttaagttagtaagtccaaaatattttcctaaaaattatgaaactaacttaatcagtgtataaactaactatactcaactcatgctctcctcttggcaacagctcttcattgacataatcaacccattcattacgtagaacattgacttcattgttggtgtaggttgttccctcattgaaattatttaaacaaacttaaaattacttatcaaatgatttacctaaattagatgtacttgaacatagtatccatattaaatgtcatcgagttaaattagacatattgcagtaatccatgttagagattcattgcatcggtttttagcactacacaaaaatgaagttagaagatgaaatattgatgattttatatactatgttgctggttatagaacttacttggttacgcgcgcagtctcatatttttgaatgtatattttgatttacaggatttaaaaaggccaatgtttgtgattgaggttggacaagacaagcattcaatgaattttacggttgaattttatgctctaaataaaatctaatttcaatgttatttattagtattaaatattagaaattatattttgacattatattttgttttgtttacatgttttattttcataattatatatctaatatataaattttattaaatactgaatataaaattattaacaattatagtgatcgcagtgaaaaataattgtgattatatgtttcaaatttatttagtcctgagatttaattaccaatgcaccgaatttatactgacgtgataatcggtgatgtggtctactcactcttaagcaagtggaatttcttttccaaaatattagtaaagtagacttgtatcgaatgtataatatttacattggactagaccgatatttacagtgaaaaagattataaacttactgttacgtctattctatgtcagtatcacatagttgctcatagatcaatttgatcttgtttgatgcccaaatgtgacttccactagcggtggttgtagtataaatcaggcggtcgattctacaggaaggtgattatggacaaaaatgctagtagaaaaataaaaacaaaaggttaataataagtgacaaaggtaaccaaatgaatttgagatttttgttttgaggataaaatgttataagaagcaataaaatgtgtaaccaatagtaaagagagaaagacttcaagaatcatccatatgcttgtttggctagtttgtacctttaattcacaaagttgacacaaattatataacattcaagttcattatagttttgagtatacaagttcttacaaataaaagaaatgatttaatcttagaacctagaaatgacattata

SEQ ID NO: 296790 - DNA, 3854 bp, Cannabis indica
caactcgtgccctattcgggtccgggttcggttttatttttttgaacccgaaactcccgaacctgaaacccggtaaacccgcccgatgttcacctctagcaaatatgatatataaggaaactttactaatcatgtttaaaaattgacctattattaaatttagacctctaactaatttgtaccataatatgtagggttgttcatcaaattgctcaaactgcccgcaccgtaaaaaaatgaggtttgaaattctttgtggtgcggttgcggtttgaatttttcctaaatcgcgcagtgcagtgcggtttacggttttaaattgttaatatgcagttcaaactacaccgcatcacacattataaaaatactaatttttatatttattcaggtctaatatgtgaaggtcgagcccaaaaaggcaacttattttttttttttttataaatcaggaaagttgtattagctcacaaaacttttttacattctaatagcacctgaaaaaataggcctaaattaagtatctatacaaattgtacaaagtaaaacaatcagttctataacaatgaattgaatcatctacattcgaaactttttttaggccaaaataattccactcttttgaattcacaccagcctttaactctttacacattctcatgtcatcttgattttcatcatcccaatatgacaaaattcgcatcttccatatgtagtaaattaagcttgtaacagcagcagttattacaggcttcttgaaactgctcatcttcgacctaccaagccagcgaatcagacccgagaggctaactcattgtggcttccattgcagccacaccttgacttgctgcaggcacacccgggaaacagagcactcaaaaaatagatttactgatgtttcaggctgttctttacacatcaaacatccacgatcaacataagttcccatcttgtatagtctatctcttgttttgagtctgtgttggatagttataaccacccaacaaaactgtgctttgttgtgtttagtctaccccatatttgcttattctaaaacacattctcttgatctgggttcagcagtttgtaaccatgggcaacagtgtatttttgcagcaccaagttaccatttagagcagccttgaattgctccttaagtcgatctcatcaagttaatccagtatcaactcgattgacttggtgggatgtgatcccatcaatcttcattatgcaaatatacactatttatccatctcaaccataagctatcctccttattggctatagcccaaaggtacttccccatttcagctttattccgtgctgaaacatttctgaatcccaaccgcccggcagactaaggttggcaaatagattcccaagccacaaggcccggtccaagcccattaattattgtattgttaaaatttatttttttttcatatttattttcaagccttatggtatttcttacaaatgttgctcaagctttgttgtatttgtgatagtttaattatttggtgataatctaaactgtagaaatcgcaaaaactgcactgcacctcacattttggccagaaaacattataactaccaccatctaaggtttcagcaaacacaaattaaaaaaaaaaaaaaaacacgaagatatgaagacgaaggctgaatttggtgggcttcgagtcgggctcaaagatgaggtcgccttctcagtattgacgatgctcgcagacgaaaacggatgttcggggcctttgggttttgtcagcgctcgagtgctgtggaggtccaggtcccgagcctttgggtttcatctgggtttatgggagtttcggggtttcgtcgccacttaggttagggcgcttccgatagtggtgttgagcaacagagatcaaagagagggagataaagagttgtgactttttaattaaaaggggcagaatatgaaaaggaataaaattaagtataattgatataaattattaaaaaactaaaatttgatattgaatatattacataagagcttcgttaaattgttttaacttatctattgttggtgttacaccgtaataattgttaacaaagaaaactacgtagattagtgttaaattattttagaagttaatataattattacattattttttatattcgtttaaataattgtgaccaatattattttttatatatagtacgtaagtaggtataaaagagtcaatatatcaaatggtaataaaaggggggttggttaaaataataataagaaaataaccttattctgattcggcagttaataattactatataaatacaacaaaaaagattccattattactactaaatatatcttcttttttttcacttgatcgtacatgatatatatacatttataaaagtaatgattaattatcacatatatactaaaattatttatataaataattaatttcatatacttaattaaaagtgatataataatcaccctttcaaattatttatattattattattattattatttattttatttttttatgagaaaaaaaggggaggcgcgtctctctacttagcaacaaccaagcatgtgtatcaacacgataaaaagtaatatttagttaaaatataattattattatttttttgactaaaagtaatttttaatcacaataaaaaagttatttgtaattaaaatatagtatatttagatacaagttgtcactaatttaggcttgtgactaaaagtacatttagtcacaataaattgtaatttttatgactaatacatttctgtgcaatcccacactgcttgaggaagttcaagtgtgatgattctgagagtttatacgtgtatgggactacacaattgaagatggtttaaatagattaattggtactacatgtgcatcttaatttttagtagatcatcacgaaagaacttcacaggtcgaatgggtgatctcttgagaagtacagaaagcgtgcgagtaaggacaaagtaagtacgctgaaaacactcttattggtttataaggtcagtcgtcagttcatgaaacaatcagagtagtgtactcgtgtataagaatcataaatatgtaggaatgtaagcttgaagcgagctagatgttacataagtatttaattacaaaactagtagtctctatatttaatttttttaattattttcttatagattgataattaaaattaaataaacatatctatgtgtttatttttattgtcttcatcatgatctttactttaataattttccttttgttaaatttgtttggagtgcttaattgtaatgacactattttcatcaaacgtatgtacaaagcaaacttcatgtttttaaatattgaaattattgtttaaggtttctatttatataagaatttttctctctattaattatgattaattaaagatcattgagacataatatctttgtaatgacacacattttgctttttctttacaaaatagacaaaaggaaaaagtggctagctaataatatgcaggaaatttccattaataattaatataaatatatataatatttataggttcctatatttataagccataaaataataattaattctttgatgttaaatgatcttattttagaggcaacaatatggagtatttttcttattaccaaaaaaaattattattaaaacaaacccggccatctagctagagttaatatatatgtatagggatatgattttgtcctgttattgtactttcacagattgtaatccgtgatgtacggcagctgtcagatgagggagttatttgatctgacgactctgagattgatctagggttaattagggttaaaaagtagaaac

SEQ ID NO: 296791 - DNA, 1997 bp, Cannabis indica
gtatcaatatatctattttaaggagatgtattatagaattttctaaaagtttttatacgatgatctacatcataataaaattattaggttagtttggtaggctgtataaaagtcttattgtattaattaataaatactactactttggataaaacaatattaatttagttagttaaagttaatgttaaatgtaattactgaggcttaacagccacttgtataatagattaacacattataaacttctactctttgactaatgaaaccattcacattcattcttgaaattctttgctctatgaactgatagatcaataagttgattattacaaggagattcgatataaatgtattacacacatatatatttttgtatagatgtttgagccatggatgcaaaaaagaaggcttgaattcgtgttaaggaaatacataagaaagaagttagtgcagagtcttctcactgcagggggtaggcctaatatacctgcgataaaggagtaagtatttggtctcaaaatcccaaatttaagagataataatgatcttcatgaaaaactgtgtagcaatgtcagatatacaatattcttgtgtggcttccaaaattaacatgcgatacaattcattaagtgacactccgtacgttcaaccataataaataattttttcatttaaaatgatctgcaataagtggtacatatctgatttatgtgtaactaataattttatgaacattttcttatttgtttgcagaatatttcataggatcgatgagaatagaaattcttacatatctactgctgaactaaaaacattaatattaggaatacaaatcgaaaactctggattggacgagcaggattttgtggcaaaggttttaaaagagtttgatagttctaatgattctcaaataaatgaggcagagtttatcaatgggctctcaaactggctaatttcagctaataaggatgctttcaagttcgtttctcaggctaaacaaaagttcttcaacctcacttctgaggtatatatatatatatttacataaattttcttcagttgtttccttgtattttactggcttattagtactatatgtttgtatatatatataatacaacttaactattgcaaactgtagaaatctttaaccaaggaagaggaaagattgctcgtggtggctccaaatatgaccagtattaccaccaaggccactaaagaagtttggttcaactacattaaagcttctctttttatacttttcggggcaagtattacactttttcttgctgcgccacttatggaaactgttcaaaaattctctactgctgcaaatattccttcattcttgggttcatatgttatgctgcctttggctttgacttacagtcaggcattcaatgtcattacctcagccaaacataaaacagagaacgctatttctttaacattatctgaggttagtctcctacaataattactttataatttatcagtaattttgtaagcaaatgggacttctcttcaaaattctttatatttgatgctcttttgaattatctatactaacctacatatatgttatcgttatgtgcagatttataatggagtattcttaaacaacatgatgggtttgatcatactgttggggcttgtttattgtcgaaacttgtcgtgggatgtctcatctcatgttttagttgttctaatcatttgtgcaatcatgggtttttatacgagcttttgctccaagttcccagtttggacaagtattatagcctttgctctctaccccttctcgctacttactatttattatgttacttctgttctagacctgtcttaagtgtttcagtttaccactttttatataggaaacattttcgtcaggagtataatattttttagcatttccaggaattaaatttttatttcttttatttattttatgtatgacatcttatattatgtaatggttgactattcaatggttacat

SEQ ID NO: 296792 - DNA, 7081 bp, Cannabis indica
cttttctttcttttttctttttcccatttatgttaataatcttcattggggtctgcttgttgttgtcggtgtttaaagtttttcttttaatcaattcaattgccctctctgtctttatttaaatatgtttgtcataacattctctcgtttataacatggttgagtttcaactgggctttgttctttcatatataattctatttaccaatttgttcatttcctcccattccctatgtgtataaatgaacaaatgattagtttttttctttttatgggcaatatttgtaggctatgtatggtcatgatgtgttatggttatgttggtggtgcctttgagtattgaacatgctggtaaagtaagatttattattcttaagtgagcttagaaaatgtggattcagtcgaaatgaaggaaattttaaaaaattatattggttaaattaaactgtagttgagatttttaagcagtttgttgatgcattagcaggatgggaaggcttaaactaaaaattcagagattagagagcattagcaaccgtcaagtgacttattctaaacgcagaaatgggattttgaagaaagctaaggaactatctatcttatgtgatatagatatagcccttctcatgttctccccatctggaaagcctacattataccaaggggagcgcaggtactataatagtagcaacttaacaacaatattatatatatatatatcatatttaagatacaattcttatttggttaagctcttgtttggtgagtatgataggatagtattgaatttaattaaggaaaagaaaaaaaaggatacgttagttaatcatttgctaacaataacttgtaagaaaataagttgataaaagtacaaatttgatcttaccaatgatctatatgaatagggagaatgatataatgaagatgaaaattatgtatgatatctttatttctcaaatgggagtaaattattcagtgctaggtagttgtattttattggaaccttatcatgaaatggaaacacttcaaagaagacttttgaacaaaagtttacaattattgatgtcaagaatatagaacatagaaagcaatggttaattctttgcattatttaacggtccttcaacaacaagggtactctattatcaaagcagagtgttacatttgttcttgcagttttatttgtggagacgaaaatcctacctttaatttttaatctgtgtaactgaccatcatgtgatttctagtttagctataggtcaatgtctgacaaattattctatgattaatataattttcatttcgcctttttcagtaattttgaagaggttatcacaaagttttctcaattaacttgtcaagaacgagcgaaaaggtattgaagaaacccactgttgattcatgacttctttattttaattggtacttttgatgttgaagtccgattctaactgattcttctgaatgcaacaggaaactggagagtcttgaagtaagattgttgtaaattttccactttgaatatattgatgttcttagacctctacattcagtttatgtgcatatattgctgttttataggcactgaagaaaactttcaagaaattggaccatgacgtgaatataccggatttcatgggttcaaggtttgttgctaccctatttagattctaagcctctgtttgttgtaacatttggaaacatctgagtcatcacgcttttgtttctgcagctctcagacaattgaggtactgcacttatataatgttcatggactatgcttgatggtgtaattgcatcaataaacctcacacataccccactccttaatggttatgtggggttgagtaataaacatgcctcagggctttattttctctatactgactagtgtagttacagtggtgcagctggatacttttaatttatttagtttatttgtattggtaaaacattgttgtatactttttttgtcaggattcaatgagtcaagttagggtattgcaagcccagttgacaggactacagaggagactgaggtgcacctttggagcttttggttgttaaagtattgctttttcttattggtcttgttgatgataataataatataggtggcattatacaaaagaaaaaaaaaatagcaacggcattaaatttttggtagaaatttttcacaaaatatttctagtatgtcgcatttcttaacattttatcctttggaactggggttcaaacagaacagtgcaactatggagtttacaactttgttctacaattgacctacgaatagtaacttactgcgcaaaatatagtgtgtttcggcgtccattttggcccattcctttttcatgtttgtgttttcatatgcatgcatacatggcatacggccatagcagctccattcatacttactgctattagcatatttcagatttagtatatttcagatatatttgtcatgctctatgtttcaaacaaatttgaaatgcattcttgtattgatacagaattgcaatttgttagagttctctatcatcagaactagcttttagatgtgatatgttgtaaatttattgagatgtgattatgctatttgttataatctgttttctttacgctgatgtgattccaactattattgagtaaaaaatttactttgctgttcacggtttgtggagatcttgacctgttttgcaatttttattttctttcttttccagcttttggagtaatccagatcagatcaatgatgtagagaatatcatccaaatggaagacatactcagggagtccatcaacaaaatccaaatttacagagtactatctctctctctgtctcttcttatttcaagttaagagggttaaaatgaaaattatacagctattatattttcttatatattatgcgagtagatagtccatcaatggcatataaaatattatgtctataacaaaccagctgaccatattatattctatctaattttgacattaattgcttacactagtgcttctctccttaggaaagtttcagaaaacaccaattattgccgctaaattgcacaggccaggtgcaacattctttcctttctcattcgcggcgggatagggtgggtgaatataaatctcttctaagttattatctcactctcacttaccttgcagttgcagaatgagatgtattcacctttaatggtaggtaatgcacaagaagcacaatctttgtcatggattccaaataatgaaaaccaacccttgatggtaccgggtaactttctgccacatgggtgagtgacttactgaaccaactatctattactttatcttgatgtttgaaatgatccacttttccctttacacttaataatggtaaatttttcagtgtatgtttttatcttacatctgtacatgaaaggtttatgttatatcttactcgagtattctctcaaattatcaatatcccttttcttatgttctcttgctttcttcttaatagcgggattcaatgcaccaccgatttttcacttccaggatgctctagttacaacagcaatgggagtggcaaacaaatggaggttggtaatcgaggacaactcaataatatggaacaaggtggttgttcattgaatgacctaagtggaactgctggcttaaatcttgattttggtgagcattatgcatatccttctttcgaagctagtttactggacaataagaaattgaaaatcaatatggagatgaacctacaaacgacttctgtggattatcaagtaaataacaattgtgtactgcctacatctatatatgacaatgctcagcatgactggatatctgcttttgggccttgcggtcttgcactgtgcaacgaaaattcctgccagcagaggtttttaatgtttctcattaaattgagtcatatgttcattgcgttgcataatttagatgaaaataaaccaggggttatggtttttagtatttagctgtgattattttaacttcaaatttcttttcttgtcatttcgtgcaggaattaaaatgatcttttgtgattgtactgaaagaaaccatggatgtgaattgagtttgaagttttttggtgaggcctaattcacgctgtggagttactcacagaatacccaaaatatgttagtcgtcacaggttgtatactatttcggcagctctctgctaccatatcccttaactgtatataacaatatatagcataaaaaatatagtatcatagattttgctgtataatattaacattcgtgtttcctcaaagcaaatatgaagagcttatgctgaattcagggcaagagttgctgtctagacatattttagtgtcatgattgaggttcattcagctcttgtggtagagtagatatatataagcaaacacaagaatttgattaggatttaggaagtgttacagaataatttgttggtttgtaaaacaaatattttaattgtagatagtgatgtaattgaagtgataataataataataattacgatgccatttaagtgccccctgtacaatggtaaaaatccttgtctacattaaggttcaagtctcaccacaaaaacattcattcactcttataaaacaaatgaaacaggttttgatcaaatctatcttagatatgatcttagttgccacttagtgtttggacaatggtgttgtgccatgggtcagacaggtgctgcaagaggttgtcgaatggcccttttccagtcacgttgtgctgaacaatgaatcccaagaatgccaacatagccaatctacctgtatacacaaatccatacatgaaaactcaaattagattaaagcttcataccctgcaatgcctaaaacaaactcagaaacattattggccaaattgacccaaaaaaattatagtttaggattcataccattggcaagctctttctccttggcttcttcagttggagcaaagttgagggggttgaagatgccaccagggtatccaacctcatttggggtaagctgtattgcttaaagatgggatcttggttgacacttcctgggttcttgatgtcttgccaccttctaatctcaacatagtggaacaaaatgaactcgatcacgaaaagggtcgaagaagaagcgaagtactctcttttccagcatcataccatttaggaacattaagaattccaatactggtgaacacttctggcaagagcattcctgccactcccaacattgcccaacgaccattaaccaactctgcttggacaaaccatttaaggttctctgggtcctcagctagtcctaatggatcaaatccattgtcaccaggaagactacacaaacatgtcttagtaatcagtcattatctctcatcaatgttttcttattattttttttaatgtgacaaaagttggtgaattttaataaattaaaagccaattttgaagtcacataccttccattgaggtaagctggagatgtcaagcctggtaaccactcaccctttttggcctcaaccttaagggaagtagaagatgaattagtcatcacttctggcctaatggacacttgtctgtttaatttactagaagagccagataggaatcttgatcttgaagcacatggccggaaaacagcagccgaggcttgcgtggtgacggtcgccatcctttttcccggccggaatacgatattgaaatggatttttgagctagaatgatggtggtggtggtagcagcagtaggagtggtaaatgagaaagtctatgttcgtgcatggcttttgtaaatttcataacatgacatatctgtggtggttgttgtctattgaaattggacggttggattgtgtgatttttgagatccaacggtggagatgcgtttgtgggttttggattagccaatgagtgtcattggaccttatccttttatctttgatggtgtatccacaaatctgttactttgttgctgttggttgagtaatgataccgtggggtatacttaacaaggccacgtgtgaagatttttttaggtggatatgatagggtcccgcatatgacttcaacatcctatgagagcatgacatgtcacaatatggtttcagcaactgataattttaatcttctattctttacttgggctggtcaaccatacacaccattgtttgttgggctttgtaaccattgtccataatagtaaatatatatatatgatggaggtttttatggcacgtttattatttagaatagaataaattaatgaacaaatataataaaataaatgaagaataattaaaattaatatttgtaatatgttgtttattaaaattgcttgaaaatagaatgatagagatttattttgtttactttattagaaaacataatcgaaatgcttaaattgactaaattacccttttgagttaaactgtaatatatagtagttattttgtaagaaatatattttaaggataaaattgtcattataaatttaatattaaaaataaataaaagatgttatcacaatttttgctcacctgacgtagcagtgcttacatagacaaaattagcgctatgtggcaatacaactcgcccacaagaaggccaagtcagtacctcagcaatcgggacatcaagtgacagaccaacttcctcacaaaagctggtgggccccatggccgatctacctctagacaataccatggtcggccagattactctctgcaggtgtctggttggccaagagaaggcctgtaggattttttgtgtaattcaacacgtggaccgaaagattgggctacaaattgggccctaaaagcccaataaaacagctggataatatctatgttcaagggtattttggtattttgtaataaactaatttaatatacaaatatttagggtttcaagttgtaaattaggattttaggcttcctatataaatgtcttaactccaacctaaaaaacctaaagtcattaagcctcatactagcctacaagtgataaagctctaagcctaagtatgataactctcttcctcactctctcatacgaccacacaagtgttgcgatattttgcacacgcaag

SEQ ID NO: 296793 - DNA, 715 bp, Cannabis indica
ctttattgatgatgaataaaatagattacattgaaatggagttttatttagggcataaaacccaacagcggataccctcaacaatctcagtcctttttaccgcgaacaatcagtcggtccgagattggactatgctacgttcttatgccagcctttactttatataagcgtctgccttttgtagcttgaccaaaacctctgccttaatttgagtgagcttcattggaaccttaaaaggcaacggtagaatcttgggcaagttggtctgaaggcttggtattggcttggatggttgggccaaggaagttaagccagatatggattggttgcttgaagttgggggtattgctgttaattgaatacatatctatttggattggatttgggttaacgtgttggaggtcacaaggaccaattgtctatcagtgttgttgcttcgtggttgggtcaagataggtgtgtgttggccacgagcaggaagacttcctactctctcagattcagagtgttccaaagcagagtgtttaggcctcttgtcctcccttctaggatggggagcagtgttggagtgcttcagcaaagcgttcgactttgggatcaccagtccttctaccaaatcctcttcattagacggaagcatggattccctgttgttaggatctattggaatttattttaccaggatcttagatctactcacaagtatgttgattaa

SEQ ID NO: 296794 - DNA, 5317 bp, Cannabis indica
tccattgttttagaaattcatatttaggttattaaataacatacatggcagtaaatctagatcctggtaaaataatccccaacagttcttaggtctattactcctcaatggagtcttagacaaggtgaccccatgtccccttatttgtttcttctctgtgtcgagggcccttctagtatggttaagagggattgtgagaataaattattgcatggcttcccttgtggtcgcgatggccccgtcatttatcatctgctttttgctgactatagttttttttttcaaagcctttgaagggaattatgtgagattcaagcagcttttgaactggtatggggtagcttcaggacaaatggttaactttgacaaatcgactatttgcattagccctaatgttctaaactctcagaaagattacttggtggatttattgggggttaagggggttgagtgccatgtcaactatctgggtcttcattgttttccaaggcatagaaaatctggtttgtttaatgctattaggaaaagaatttggaaaaatcataatgggtggaaatcaaaatttttctctatggctggtcgcgagatccttataaaaaactgcctaatgatggacctttttaagtttccaaaagcttttgacaaaaatgttcatcgtatgtgtcctcgtttttagtagggaggaaatgatgttatgaaaaaagatgcactggtgtacctaggagaatctttgcttgcataaggaagatcgtgtatgggtttttgagacctctatttgtttaatcaagctctcttggtaaaacaagcttctcgcatataaaatgtccacaactttttggctggctgtgttttaaaaggtttgtacttcaagaagaggtcgcttgctaaaatcactaagtccaagcaaggctcttttgttcgaaaaatattatctggggaaaggaactctttgattcgaggcaatttggcatgttgggaacgatttgaacatcgatatctactctgataattggattccttcagttccaccgggtcttgtgttaatccctcaccgacttgatgggttggctaaggtctttgtgctttgtgacacttcgggaggttggaataaagagcttatttggtctagttttcaagttaatgaagctaagactattctctctatttcttggtccactaacgatgtttcagacaaacttattttgaactatgagaacttggggtagtttactgtcaagagtggctattggttggctcgtcgcaacttggctttgactcgtgcctcatcatctaatggtttctctggatggtggaagaagattcggcccctcaaccttcctcataaggtaagactttttgcatggcaaatttcccataattagattcctactaaagttaattttgcttgccatggtcttttatctgatggtttatgccctttatgtggggtagaagagaaaactcatcatgctctttagggttgtctttctttgatacattgtagtaagatttgtaagtttttgttgggtgactgaaggagccattgcgtagattttttttaactttgttcatagatttgttgatccccttcccaaagggatgattgaattggttatggtaattttggcaattttttttttcagcataatagaaatgtccataacaatgttgagttgactcctaagcttactgttatctaggctagagactaccttgggaatttccacaataaacagcaggtggtggctagcccccgtcttggccgagagtgacgggtcctcaaaatggtgcttcgaatgaatggttgggttctactcttccaagctaaagcctcgactatttggcacttggaaggttgttttgatccagaagttgctgaagctttagctattcaaaatgctctctgtcaatgcctctcctttaggtatgaaaacatcattattaaatgtgactgtatgaatgttgtgcttaaaattaaaaacaaaatttatattattacttctttgggtcatgttttagatgatattcttaagctttgtaataagatccatgttgtaaggtttgttcattcatagaccttgtaatggtgttgttcatactttggccaaacttgctttgcctacacgtaatggtattatttggtggtcagaaaatcccaattatattgagaacatattgatagcatatgctacctttatttactgcccgttgcatccttagaaaaaattattgtcttgctatcattaatttattctaaagagtatttaaatgtaataatttgtaaggattatgataatttaaaactagtagtggcttgctaaaaaaaaaaaactagtagtggctaataagaaaattaataaaaaaaaaaaaaaaacgaaagaatactaatattattttatcgtgctgtggaatgaatttagatctaaaaagggatgtagtaaattgggatgcagttatttctttattttttggaaaccgggatgcctttattcacattcagtactatgaaatgaatggttacatttcattgggactcattgaattacgagattcagtcccactactcgacaaacccatctccttaccaactcatgtgacgcagctacatgcctatatcttcaggattttaccatatcacaataattgggcaaaaccataatattatattttaaggtccctcacattccaactcatgtggaccattattattattattataataaatatttctattttaaaaaaatatattttctctgtcctcagctttttttttttagctttatccttcacttacttcgttcaaagccaaaaacgtcatatgtatacgatcctcttaggactgtacggcaaaccggccaatactagacccttccggtgaccccagtaaaccaaaaaaaggagacaacttttttggttccaatactcgacatgggaaggacaccctgctgcaacgtccaaggtttgaagaaaggcgcgtggaccaccgaagaggaccagaaactctctgcttatattacccaacacggcgagggaggctggcgatccttgcctgagaaagctggtcggcgtttttattttggggttctaattctgacagtgtggttaataaaatgtgtgtgttaaaatgaactcattttaggaaatgggtattctggtttcaggtctttcgaggtgtggaaagagctgcagattaagatggactaattatctgaggcctggtattaagaggggagagttcactaatgaggaagaagagactattatgagacttcatgctgttttaggcaacaagtgagtgtttgatttttattttcttgatgtgagttggacttgtactcacaatgttgcatatttttcattcgttttccctaactgtttctacccatttcatagacttcattttcctcatttttgttcctacctttctgggcatactttatatataaatatcattttttttcttttgctgtttcatttagcatattatttatttaattgatctcactttctccagttaccgactttatttatttattcttttttttttttgttcttcttttacataactaatttccgagtaattgtagatggtcagccatagcgaaacagttaccaatgcgaacagacaacgaaatcaagaaccattggaatacgagactgaagagaatcgtagctgaaaagggcaaggataatttaatcactagagccgatattgaaaatcttgtagctaaaaatggtattggtaacaatgctgaaacagagaaaagtcctatgaagaatctcaacgtcgttgagtctaaagggtcaacttttaagctacttaatgatgttgcttctaagctcaaagcatctggttccattgtctcattaattaaccaacaagttgtgaagtgtaactcaacagaggccaactctgtctcaagtcctactaatactactacaaccactagcaccaccgccaatactccagctaatttactcaacagggtcgccacaactctcaactcaccaaaatcaaattctcttggtgccattaaagcaatcttttccagaacattagaaggcagtacagttagtggtagtagtgacaacagtttttccgaggtcggtatggggattgaagatactagtgatgagagaagtagtcctgaatctgaaaatgcagttcatgtttcaattccgttctcttcctcaaccaggttactcaacaaaatggcttctaaatttgctctaatgaatcatgttcagacagtggctggtggcagcacccatatgtctaagcctccggttttggaaccaaatcatctggatgattggagccaagaaatctcccatttgggtggaatttccggtacttgtaaagacgaaactagtaaccaatttgacatggtcttcgaacctgatcatcaagatgaatttttgttggaagtgggttgtgaggatcagaaagacaaaggcaaagtttgtaatgaggataatgagttgattagaagtctgtcaagggagactgattctaatgaacaagttttggtattcactagtaatagtagctcttcatatgaaggttctagtcatatcgaagtggtagtaagtgacttggaggctgcagataattgggaggactgtgttaactttgatgaattctttgatgctgcaactcttgagtaatttcttgagtttctactttcctgagaatttttcttttcttcttttctttttctaaccttacgtctgtatattatatcaaatataataatccaatatgtatgagacacgaatcatacttctttgaatgaagatcgcgtataacagttcctgtcccatatgatatcttttctaatgaaatgctaaaagtgtggtgggtaggcatttttttagtccatatttataaaatttaactcaaatagtagtatacaaactacgatttagtctaaatttagcacattaaaactttattaaatttgacacaaaaatatagtataaaacaaaattttactctacaataaatatcacttttattttatacttttataactcattaatatatttaataactttttaaattttatttatatatttaatagagttttttatactttaaattaaaaattaatatttttatagttttattaattattttaatacctttctattaattttgtagttttaaattggagtacaatttttttagctaaatataacacaaatttaatatcatttactataaatagcgctaagggtgactattcaatggttacatttttattgtaaccatatggttacatttttctttaacctgtaatagcaggttactaat

SEQ ID NO: 296795 - DNA, 5334 bp, Cannabis indica
  modified_base (4245)..(4245): a, c, t, g, unknown or other
tacaaccactttagaaacctaaaaagtaaaaccttgaaaagtaaatccctgaaataattgtctggcaaaaaagtgtaggggtgtgcgcactaccatagcctgacacaaaagacaagatctgatcccgtgtcaaaaaaaaaagcataatcgtcgctgggcggtctgggtttatcctcaaggttgacgttcgtctttcttttaggtggtcagcatccacgataggcccttcgagtaaccctttaggtatcgctttgggcaaactttgatcctgggcaacctcggatcccagagtaagggtaagcctcccgtgtctcggatggcatgctgaggctaggtgaatcttcgcgtatcctttatccttgatttatcattggattcgcagagcctctttatgatctggtttcacggaggatacttattgaaagattattttaagtcgtacttctcttcttatgtcacatattgccttgtccgggaacaaggattacaattattattaattttctcttttttattttattttttctaataactaacaaaagaatcatgactctttattgtataaaaataattaaaacggtgatgacaataaatttaaaattatatgagttttcttttatagatttttcttttgaattccaatgtaatttattcaatcaaaatatgcatttagaaaactaatcgcaaaataaataaataaattaaaattattatttattaagttcaaaataattagaacacttaacattctacaatattaatttattttcttgtgttactaagagcaaaaaaaaagtttaggactcattattagaaaaaatattaaaatttaaaatttaatatagctttataatttaattatcactaatggtttgtttcctaattttgaaaattttccaaagaaaattcagttaagttaagtgtgtacttttttcaataaaaataattttttttttaatttttatacttcaaagcagttatttttttatttttctttttttgcattttttacgaaaattcacataactagcagagcaacataaatcacaagtaaaatttacataaaaatcaccagacaacctaaaccctaaatttgaaaggaaaaaaaatagtataaaggataatttaattgaaacatgttgcagctcataaagtaagccatattggtagcttcaaagtcgttttagttgaaagcaacaagtagaagttagtttgtcgttctaataaaatggtgatttcactcttccttggccaagggactgagccttacatttcatttaactaaaccaaaaaaagaaaacaaaaaagaaagcaaaaccaacgtaggaaggaaccttagacagcataagtagtagttactagttcttataacaccaccaaataactaatacctgaactcaattacaacaaaaaattcataactttaagctgaaagtttctcaggtgggaacctattttatgctcatttcgggtgcttcaaattactgacagagttgttcgactgcggtgacgatttgggcaggctgaaccacagtccattcctctagtgacccggcatatggggttggaacatcctgcgaagacagacaaataattggggcgtccagataatcgtggaagttttcgttgattgctgttgttaagctggcaccaatgccaccagttctcatgcattcctctacaatcagcacgcggtgtgtcttcttcacagagttaccgattgtgtgaagatcgaatggcttcaatgacctgatatcaatcacttcgggatcataacccttgtttaccaatgtttttgcagcctgcatcacatgatacctcattcgggagtatgttagtatggtgacatgctctccaggccttaccatttcagcttcttcgagattacagatatattcttcatctggaattctttccttgagattgtaaagcaatacgtgctcaaaaagaatcactgggttctcacttctaatagcggctttcattaagcccttagcattatatggggtcgagcatgcaaccatttgaattccaggaatagattgaaaataggactccaaacgctgcgagtgctcagccccaagctgcctacccactccaccaggtcctcgaataactatcggtatcttgaactgaccaccagatgtgtaatgaagcataccacagttgttagagatctggttaaaagccaggagcagaaatcccatgttcataccttcaacaactggtcgcagaccagtcatggcagctccaattcccatacctgtaaaggaattctcagcaataggggtgtcaagaaccctgagatccccatacttttcagccatgcctttagtcaccttgtaagaacctccatagtgcccaacgtcttcgcccataacgcaaacagtagcatccctttccatttcttcatccaaaccttctcttaaggcttcaaaaagtagaagttcatggctgaatgaaaattacacagatgcatagttagcacctggcttaattaatcaaatattattacaacttaggattagcataataaaattggtagaaagaaattaccgaggaccgcatcattatgaataatcccagaaatatcataaacatgattaagatagaacatacatctatctaagaacacaatacatcaaacatatggtaaaaaattggccgataaaatagttttaatggtggcttatttgaaaaatgctgcatacaattttctaacatgtttattcagagtcctatttaactacttaagtttagtcccatatttagtttctcaaccaatataacctgttatcctcaaagtcagtattctacaccatttctctagtatataaacaaataaaagtggttaaaactttagtaatgagattcaaatttatatttgtaatcacacatagcagagattctaacataattactcagagtcttatttaactattcaagcttagtcccatttatcaaatttagtttctcaaccaataaaaactgttgacctaaaagtcagtattctacaccatttctttagtgtgtaaacaaatgaataagaaaagtagttaaaattttagtaatgacattctaaaatcacacatagcagagcttaataatggatcagagagaaatattaaaataactagaaaaagaaaaagcttttccttttaaaagaaaatataattttcttacaaatcacagaacttaggaaaccaaaccacttttcaccaacaactacatatcattaaacaacatattaaacagtaacaacacacaacataccaattatctttctatagcaaaatcaagcacaaaaaactggttaaaattgaagtttatgcatgtccttataataaaaattttaaagcaagaaatgatgaaaataacataataaacaaacattgcaatatgtttgagctttaatttaacgaaagagaatcataccctggtttcgatgctgtcgaagccgcagagttatctgtcttggtctacaaaaaaccaaaatcaaaagaacaaacaatgaaaacccaaacaaagcattccacaaactcaattcaataaaaaaaactaagagaaaaacgcaaacccaaaacaaaaatcgaaagagaaaaggggcaagaatgttatacagcaacagcgttcataacaaggtgatcagcccgtcgagctttcggattcaaaccagagttcagctgggatctgacacaaaagaagctagctttcctctctgaatcaaagaattaaacaaaacccaatctcagaaaaagcaataacaacaaaaacccaaatgccgaaaatcagtcgtaccggagagagatctacgagattggagatggaattttgtcgaatccaaagtgttagactttgaggtagctgataaagccgtggcagcaccaataccctgaaaaatggttgccatttcaacacccaaaaaagagattcgagtaatgggaattgagcagagcagagcaaccaaactgaactctctctgtaatatatataacaaatatatatatagatatagagagagaaagagaggacggagaaactgaggaatcaagaaatgggtgttgtggatttattcacgttgctccacttagcttttaggcgattcaattgaagaagaagaagaatgggaagaagagagagaaagtcgatacagagagaaggagagagaaagcccttagctgccacatattaacaaaagctttctcacatagtttccatcgcctccatctctctctctctctctcncttttttttttttttttgaaattttgatcagttaagagtgtttccgtaactacgtgcagctcaaaaattataaccaataaaagtttgccacgtcaggtaatggtttttgtgagaatacgtggaaggttttgattgggtgaaaggatacaatgttcgttgggactaggtagcctacctgggaccaaccctaacaagaaaaggtcgttgtaaatgtaatgtctttgtggggtccattaatctgctgatgtggattcatgctggtatgtaattggttagtttagcttagtgagtggtctgtgtatctgatcatctccagcttagatccgacccgacccgacccgatccgatttgacccaaaatgtttaattaattttgcttgctgtgttgtagttggaggaaatggttaattgttaattttggcattggggaaattccaccaaataagctctttctatatatgttttttttttttgagtcaaagtgaaaattttatttaaacactttcagccattacaatagacttaaaatcagcagaaacattatgctgattaaaaacacaatctgacgaaaaacaagactctctagcaagacaatgagcagccctatttgcagatcgtttaacaaactttaaagaaacattatttaaagacgagagtaagacccgacaatcatcaacaagtaaaccaaactgagaaggcattaaaattgagctatgaatagcttgaaccaccaccaaagcatcagtttcaatgactacactgggccattgctttctttctatccaacttaaagcctccttaatcccaatggtctcagcaatctcaggcttaacaaccccaaaccgagactcagaaatagcttcaaggagaaatccattcgaatcacgagccacgcaaccccaaacttgttttgttcttgaaaaatagccccgtcgacattaatcttgaccatattagcaattggtttcttccaccgctcatcaacattattaatatcattaattaacaatgcccccgtcttttgagattgagcagtacaatattggtcaagcactatcctagccgatcggaccacatcaatagcagaaca

SEQ ID NO: 296796 - DNA, 4258 bp, Cannabis indica
cccccaaacacattaagatgggggtcatgaattctgggttccataagaatcaaagagagaaaaactaccaagaacattctttgtaataaatattctcattaatacaaaagactcgtggactaaggctcattaatgcccgaaccacttaaaaatctcatgcattaaacttcctacagctttcttatatatattattaaatcggttgccgaaaacctcggtcaacaagatgtaacctgcggacctggacctatatttcacagctccaataaatacttgattattattaaactcatcaatataataatctaatttattaattctattattactccactataaatatcaaaattgctctctttgacaatatagaattatttttacataattcttacttgtagtttattgatataataaaaataagttgttcattctccaattatcaattcataagtagagttggtcaaaattactattttacccttctaattatgtcttgatatcttttgtactattaatttaatgagaacagttaatttatagtataattatagatttaaatataaggtttatttttatgcatttttagagtctattttagtgtgtgttttaatatttttatcactttattgtttgtacttaagcttggtttttcttttgttatgttttttaggaaaaatattggaagatctctatttttgataatttgggtgttcttcaagtatttttaagataaaattggataattttgagaagaaagaaaatttttagaagcttagttggattttttgctacctcaaatgggtcaaagattgtattttcaattcaaaaaaatcgtggtttaaagtgaagaatgggcactttccaaaaataaagtgaaaacggaagaaaaaaactatgcttatcaaggccgcaacttagcaaggaaggctgcatcattgctttggttgctagaagaaaatagaaactagaaaaccaaaattagcgaagaaatttaaaagtagaaacttgcttggaaggtcgcgacttttaagcaaggttgtagccttgtggattttgagaaacttgattttttttttcattatttaaagagggcagaaaggcaagctttgatttcgttcgaaaatatagaccaatttagagcataaaaggaaggctaggagcataagacaccattagaagattcagtgttatatctcccatatctctatattttatatttttaattgaatttctattattttagaatgacttcttgtagctaattttcctgaaggtttattatgtgtactacttgaatttattttatggattaatgtaattatttaatttcatcttcttctcttactttaattccattaaatttgttttaattttataattatttactggccatctataattgttatctatgaattcgaatcaaaaatctgaaaattaatatttgaatatgctatgattgttatggatgaaattaatataggacgaaagtatctagattatttttataattttgtaagttgatttacttaatgctttctttgtgattaaactttaccacgtgaatataggaagaagagaaattgaataatttccttagaaattaaaataaaggattgttggtgatcataataatccttgtctttattattgttatttttctcaattataattattatttttttatttacatttctccaaataatttattattaaaatagaaacaaagaattaattacttagtaattgataatcaatcctcgtgggaaatatactctacttcttcattatattacttaattcgattgcatatacttgtgtattaattttaccgaataagttttttgcgctattgctgggattgaaaattatcaatatcagtctaattaacttttattctaatatgatctcattttctcttattgataacctctttagtctcttaatttatctatctatggtgaattgtgttatatgtgcaacagaagaggagcagacagattcttgttcctttgaatcctaagattgaaaagtcttgcaaataaaatagaaagaacaagtgcatgcacataatgatggggatgacaggattgatcttattcctacaattgtatataggggacatgctcaaaataatgctaaaaggagcctgagagactatgtactgctcactctgacttggtacaaaactatataagaccaccaatagtttaagccaataactttgaaatcaattcaacaattttataaatggtgcaatattctgttcaatttagtgggttgccgactaaagatcctcacaatcatctgtctaattttctaaagcttttttggtatttttaaatataatggggtgagtgatgatacgattaaactgaggcttttcttattttttgagggaaagagaaaaaagttgacttatttccttacaaccgaattctattattacctaggatgatctggcttagaaaacttatggctaatttctggttgggctttaaaggaaacaatcactctaaaattcactggaaagcctgaaacaatctttgcaaatcaaaattttttgggggtctcggttttcgtactattattcaccaaaaccaagccatgttggctaaacaagcttggaggatccaccataaccctgattcccttctggcctttattttaaaagccaagtattttaagaataacgattttctcaatgcttccctgggtcactctccttcttattctaggaggagtcttctttggggtagggatttgctttctaagggtttaatctggaagattggagatggtaaaactattcctacccttagcccaaattggctgcgtgatcacataaatatttcttataaagatgattctttgcctcctgaaattactctttcttatttcattaaggaagatggccattgggatatcaacaaactcaattcccattttgacaaggataccatatactccatcctctttgttcctactaatccttactccaagactgtctcatttggggccatgttctttctggtatgctcacggtaaactcagcttatttaccttgccaactccaaccaatcctcaccttcttcctctgtcccgaacaccttccaaacctagtggaagactgtttggtcttcaaacatctctcctaagataaagcacttcatttggaaggcttttaatcatctacttccttctaatctgaacctttacactagaaaagttcttcctagcccttactgctctatctgtcttagtaaagtggaatccaattctcattcgctcctagagtgttccagagtaggtaagttttggaagcataccaatttttttgagttctttaaagctactagatattgtgacattaaggaatttcttttgagaggttttgagaagtatccttaacatgatctttacacattgtttggtatcttgtgggctatttggaatcatcgtaacaagtctctttttgtagataagaaccctattttcaaagacatagaaccttttattatttcttacttgcaggaatattctgaagcccaacacaaagttctccctagacctgaaactgctacagaaggcagctcttcaacagcccttatcattgattcaattctgccttctcctagaaattacaaactcagtgtggatgtggctgtgcaaaggcaacataatatccatggttatggtgcgattgttcaagatcatgttggccgagttattgctgatttttattcctctgctatctcaggtttgcctcctatatttgttgaagcagaagcccttttacgagctttaaattagtgcaaggaagttcattttccaattgatttgatagtctctgactgccaagtgctcatctccaaaatcctaaagaagcaaaaagatttttcagctctttcggataaagtttggcaagtcattttctctttatctcattttcctcgtgccacaatcaaattcattcctagaagacacaatactcttgctcctcattttcaataatttgctcgacaacatttggcgccgtctgtgggaaatcgagaattaaaatattattcacttcaactaagaataccatcatggctggaaaccaaacaaacgaacgtgctaacaatgggtccatctgttggaaattatgttaccaggatcttagatctactcacaagtatgttgattaacaccctaaatatgaactttctaaaaagatgaaataaacacatatgaactttagtaaaccttacattgggtg

SEQ ID NO: 296797 - DNA, 4288 bp, Cannabis indica
catatctaattactaccatattatacataaacatactatgtattttaaaataaaataatttacgatataaatatttaagtttaactctcggtaataatatttaaataataattctgaaatttttgtaagtatctagttattaagtgtcaagtaaattatcacgtgataatctctgattgatcctaatcattaaatttttatttttatttaaaaattattttaaatatactaataaaaaaataacactaaaatgatttaaaactcaagtacctatagaaatttcgaaatataacttatgtattataatcgtcaaaaattaaaattaaatatttatttgtatccaaaatttaaacttaaatttattcttaaaaatataaaactgaataattggaaaagaaaagaaaaatcaataacaaaaagaagaggataatttgaaacatgctaataaattgcatcacccgttaattgaaagaaaagaaaccattcctccaccactaataaaatcaaagaaatccgaagatgactaaaaacccaatactactaatactaaatattggaaatttaaagggcatattggtccagatggcataaagtataacagagttcacttccccgccactcatacaaaattaacaatggcttcgaagctcgtagctcctccttcttctctctcccgctccaccaagctcttctccttctcttccacctccaaaggacctaaactcgtttccttcccgacctgttggaggtccaaacgaagctcctgctcccggagaatggctgcgaaatcttgtctcaaagtggaggagaagagttcccaaaactccgcccgaagtgagtggggaaagtctctgcggtgcttttcgacatggatggagtgctatgcaatagtgaagacctttcgaggaggactggagtcgacgttttcgccgagatgggtgttgaagtcacagtggaggactttgtgcctttcatggggactggtgagagctaatttgtaactggaattggaattattgcacagttgtttattaatgtatatggatttatttgtttctgatcatattgtgtggatgaaactatgagaaatgttgaactgaaattttataaatgattcgtggcaatgtgaaggaacagcttaaaaaaactgtgttaacgtttggcgtttgaatctgtcaattcaatttggttaattagaactaataatggtaataatgagtcggagattgcatgttcttttctacctcttcaatatggcaggtgaagccaacttcttgggaggtgttgcgtctgttaagggagtgaaaggatttgatcctgaggccgccaagaagagattctttgagatatatttggaaaaggttagcagtaattatgtttatatatatgagagaaaccattcaatggtgctatatgacacttataatttgcaatttaaaatttccaataaccaccaaaatttctccctcttgtagtatgcaaagccaaattccggaattggatttccaggagctcttgaactcattactcaggtatgggaaatgttgactcattgtaaaatcatgtccctcattcgtgacatttggcttatattggttttatacactaatgttaaacagtgtaaaagcaaaggccttaaagttgctgtagcatctagtgctgatcgaatcaaggttgatgcaaatctagaagcagctgccttgccattgtcactgtaaccaatctagctgtgtgctttttcctttgcaagagcataaaaaaattcttgctttatttttatgcttattcttgttcatgagttgctattgtggtcatggaaatgtctagatgatatagaaggggcttttaccctcaaccactacaatctccaactgcatcagattgtgaagcttgtaaactgaaacatggctaatgggttctcaatgcttttaatattagttctataagggtggaatgagatacacaatagtataagaacttacaaataacatatggagctcttttaagaaagttgacagaacagtagtagttgatgcttattagaatttggaaaggggttccatctcaaaatcaattgacaatgagaggagtagtccattcatcttatatgtggtattttattttcacacattagcaatgtgagactaattctaacaatgttaaatgattaaaaaatatatcttaaagttttgtgtataatatgaaaactgcaaaagactttattttggtcgacctgctaagtttgtctagaactaagaagttacccatttgacttggactgtgtacttcactgtaatatatgagttttgaattctgactgtatattttggagcatacaattttattctgtatgttttactatcaggtttgatgccattgtgtcagcagatgcttttgaaaatctgaaacctgcgcctgatattttcttagcagcatcaaagatcttgagtgtacccactagcgaggtatagtagcataaaaataactacaaggcatagtagtgtatatggtattattaaatgccacaccatttctctatattgtgaaaataaatattgtttatgccttcgaatttgctttgcaataagcctcctcaaccaaataatgtggttacttttggtgagcaggtaaagtcaaatgtttctggggaattattaatacatatatgcaatgccttactgagtcttattcttattactttttctgcagtgcattgttattgaagatgcacttgctggagtgcaagctgccaaagctgctggaatgaggtaaaatcaattgcaatagctacttaatgttttctcaagttgtggattcagtatgcatatatgtttgtttttcccttttgcataccttgtagtctcatttgtgctagacctttcgttaagcttattaattattttcatgccacttgttggcctgagttctttgttttataaattagaattatggctattaatgtatgataaatctttttctgcttcttgcagatgcatagctgtcaaaactaccttagcagaagagactttaaagactgctggtccatcacttatacgaaatgagataggaaatgtttcacttgatgatattctcagtggtggctctgatgactatagtatgtagtcttgagaatatgctgcgattgtcattttgtgccaataatgtagaatggtgaagctatacttgtggcttattttaagaactataaataagaccaatcttcttgtgacgggtgttctttgtattgaaattttctgtcctttttggctgcgcgaactctttggctccaattactgaattagatttatattgtagtttcatcaagaagatggatccttgctttttttctgagtgaactatttggcaccaactatttaaataaaaataattaaatcttttcatcaagatgatgtgtccttgcacttaatatatacaataatattctccgaggaaagtttttatggtatgaaaagttgtatttaaattttctgacataaattcttataaagacatgccattgcagatgagacgatgcaggaaagccaagttcttcagacaccatcccaaaattactcaggcctggttacagagaagattgataatgggccaatccaacaagagaagtctgataatggggattccttaaatggagggtaatagcttctctggttgagtgttctaactgaagttgattatttttaatttctttttgatcttcctgtccaaagtatgtttcctgcaaagttattatcacttaataatgagcaaattttgtctactcttttgtgctccccatttgcaatgattttaaagagtgttcttggaaaaccctagcttgaggctggaaaaataattcatggacaggttgcagggttctcggcgagatataataagatatggaagtttggggatttctctttcttgcctagctttcgccatctcaaactggaaggtccgacttacttgagaaaggaaagcttgatagtaaacatatcattttagttttttcggtttaatttcaagtgaattatgcaaagataatggcttcaattttctctctagcttttcatggtttggtaaacatatgaacttccattaatgcccaggcaatgcagtatgcatcaccaaaagctatttggaatgcattgtttggtgccactcaaccatcttttggtcaaaatgaaggtaataacactataagtttctgttttctattgcttctgctctgtcacatttgttttgggttccttcatcatcatcttttttttcttttttcctttttttttgt

SEQ ID NO: 296798 - DNA, 4267 bp, Cannabis indica
tttgtcaatttggatttcagatcttatgccaggtttttgagctggatgcctgctgcattgaaaatgccagaacctgagcttatagaccatgcaggattagactctgctgtttacttaagaatttacttgattgggtaagtttgtttatttgatctaaatttaagtatttctcatgctcctcaaatgctcattattccagctttgttgtttttcatctcattattccattttttgaactgcaggctcaaaatttttactcctattgcctgcttggctttttcagtcatggtaccagtcaattggactaatgtcaccttagagcgttccaattttacatatagcgatgtagataagctttccatttcaaatattcctcttggatcaaataggtaaaattcaattcaattatatatcatttacacttgttttagaacttcccaacctgcaatgacatctaattagatattttctgatgttttcttttattgcatttgttgcagattttggacacatttagtcatggcttatgcttttacattctggacttgctacatattaaaaagtgagtatgaaacggttgcatcaatgaggcttcatttccttgcatcagaacaaaggcggcccgatcagttcacagtatgccttcgctttgaataatcaagctagtatagtatgccagttatttcaatctaaaatgccattgaaaaccagttttctctcagtatactgctaaaggttgagtttaactttttttgttgtaggtacttgttagaaatgttccaccagatcctgatgaatcagtaagcgagctagtcgaacactttttcttggtcaaccatccagatcaatatcttactcaccaggttcgattgtcgtgtatttattcacataagtagtttacaaaactgtggtgtgcatgagtacttttccacacctttcttctttccaatttgcagactgagtttttgatttttatatacagtttctaacattaagcactgtcaatgatatcttttcaagataaacagtagttttgtggatggtaatttaatgtactaattaattccctagtcatttacaattcctgtacagcactgttaaatgaactttaacaataattgcagtttgttatgtgctgaattattttgcatacaggttgtttgtaatgcaaacaagctttctagtttagtgaaggagaagaagaaagtgcagaattggcttgacttttatcagcttagataccttagaaatcaatccaagaggccaattgtgaaggtactgtattggaaagaaaatagctgatttttctcagttcataagttttgtttgataaatgctatatgacatttttctgtgtctaattcatgacaaattatttttaagcagactagttttcttggtctttggggaaaaaaagtggatgcaattgacttttacacatccgaagttgacaggctatctaatgaagtaagaaactatcctcaagcttcttaatggcccttgtacctacttttccaacatcatttaaatattttccatgatatatatccaaagctgtttaagatacatgcacaacactgatttatcatacttttcaactttgttttcctttcaaatttagtttctgaataggaataattgtgcattgcactgagattcaaaatcattgaacaagcctgatattctatttttcaaatgaacatcagatgtcttttgagagagagaggatttcaaagaatcctaagtctataatgccagcagcttttgtgtcgttcaagtctcgatggggtgctgctgtttgttcacagactcaacaatgcagaaatccaaccatgtggctgaccgaatgggctccagaaccccgtgatatttattgggataatctggcaattccatatgtttcactcacaattaggaggcttattgctttggttgccttcttctttctgaccttttttttcatgatccccattgcctttgtacaatcccttgcaaatatagaaggtattgagaaagcagtcccatttctgaagcccataattgaattgtgagtacctttttttttgttgctcctatggttttcaaattgtcactgagagagagttttcaaattgagtactgacatcatccattttatgcaggaaatttataaagtcagttatacaaggtttccttcccggaattgctttgaaggttttcctgatgtttctaccctcaatattgatgttcatgtcaaagtttgaaggatacagcagcatatcaagtctcgagagaagatctgctactcgatattatattttccagtttataaatgtatttcttgggagcataatcactggaactgcatttcaacagctggatagttttatgcatcaatctgcaaatgagtacgtaccaaccaaccccacacacctttgtttattttatatatatccattgcacaaattaatggttactctaccctgtgtaggattccaaaaacaattggtgtctctattccaatgaaggcaacgtttttcataacctatattatggttgatgggtgggctggagttgccggggagattcttaggttgaaacctttaattatgtatcacttaaggaatttcttcttggtgaagactgaaaaggacagggaagaagcaatggaccctggaagccttgagttcaacacaggagaacctcgaattcaactttacttcttacttggtcttgtttatgcagttgtgacaccattcctacttcctttcattatcatattctttgctctagcatacgttgtatatcgtcatcaggttagtttgacaacttaaaaagattaagagtttcttatataattatattgttttaagaagttatctaacttgaattcttgcatgatcttagattataaacgtctacaatcaagagtacgaaagtgctgcagctttctggcctgatgtccacggccgcataataactgcacttatagtgtcacaactgcttctaatgggattgttaagtacaaaaaatgctgctcaatcaactccattactcataacactccctgtgttaaccatatggtttcacaggttctgcaaaggccggtatgaacccgcttttatcagacatcccttgcaggttggttgtttttcaagtcatttacatggcatttcatattgcatatttctgaattccacaaagttagatacataatcttgttcattcttttggcttggggttttcaggaagcaatgatgaaagacacactggaacgtgtaagagagccaaacttgaacatgaaagccttccttcaaaatgcttatgttcatccagttttcaagggcggagatgatggtagtgaaagtgaggtgtcttttagaagacttaatggaagagcctgcaatggtgcctacgaagcgtcactcgcgtcgaaatacaccaatgcctagcaaacagagcggttcattaactaaagttgatgaggattattaaacttgttactatctctgtatatttttcatctctttttcctccctcttttggcattgtaaattcgcagaatagtttagaggagttcacagtgtagtgaaattgaaatgataccaagatttttaggtaggagtgttaaagaagctcttgttgaaaatagattttgaactatttttttttcttttggctcatttcattaatttttttgaagttccatttttttccctataaatttgtattaatcacaaattgcatttccatatattatactgaagagataaaaatgacaaaactcaacagtactgtctacacagtactcagtactaaataacatgaatttgctcggtgcttggatcaattttcgtacttagcaagtgttgtgttggtcactaatagaagaatgacacatcacctaagtctaaatcctactcaactaaacataacggttttacctaactgtctgttatgacagttaggatcgaaccatgtaggataaggctataaatagccatctgctgcaacatggaatgggatggtattttggaacttagaaagagctagttcagtgttttacaaagagaatttttgtgtgagatgagttgttattgaagcatggcttcttgagtatatgtgttagtgaaaacaccttgtaaacaacttgtaattctctctcaatctagcattaataaagattcaaagccattggggctgttctggccgaggagtaggcaaatgatcaacagatcacttgttcgaacctcgtaaatctattgtgtttgatctctcttctctaatt

SEQ ID NO: 296799 - DNA, 1425 bp, Cannabis indica
ggaggaagaaggttttttctacagtaatggctgctgtgttataccatatttggaaaaatcctaatcaagcattttggcttcatagagtctaatgtcctcgtgttattgtgaaacaaatcatgtttgaagtcagaagtagaatacaattttaaatgtcaaagaaaatatctatatatacatgatagaaattggagtgatcacttataagtttgataatatttcaggttggaaggcgcttctaggatgtaattaaaagtttgttggttgaataattataactcatttgattcatcaaaaaaaaagtaaaatttaattttctttaaaaagaaattaaaaatatataattttaaattttaaaattttgttatatataaaaatttatataaataaatgttgacgttacctatgaatgaaaactaaagaaatatgatccaaaggtattggacacactacagaggtttataggaaagagaaaaagataggacgagttaagaaaatttggaagactaaagttttatggtggtcgatgctcctaaaacagtagtttcaaatggccaagattttcacgcaatcaaggggaaaaaatcattgttgctataccttctaaagttcaaattagcaatgctttttaagctttagaagaaaaagatgttgtagaggtctaagttggagaagttgattatgagttgaggtccattattgatggagggcgagattctttaccaataaatagataggttgtttttaagaaatgtgaaggggattaataaaactaacaaataaaaaagatatgagaatgatgcataataagatcatattagttttgttggtctcttcgaaacaaaggtcagggctcgtatggggaacttgtacattaatatgttccaagaatagtagtgctttacttcaaatcatacttatcatcctaataggagacttgtgattgcttagaattcgaactcttttgaggttgatataaaaggagggtctagtcaatggattaattgttatgtgaagccaaaaaagagtcctagttttgctgtttcggttttggttgtgtatacttttaatgataataaagggaagcttgatttatggaaagccttagagaattttgttgggaataataaagatccttggattgtgggtggtgactctaactcaattttataaataaaaaaaggttccattttcgtggtaatattaatgggtgcgctcctttttagtagtgtgttagcaattgtggttagaagatgtgaaattcaatgggagtttttttacttggaacagtaagaggggaaggacaaaaactatgggaagctaaattgtgtgttaggtgaacactttttaccagtaaaaataacttatgcagtggatcaatatgcagagttgtatgtgaaggggatagtgttggatatttatttt

SEQ ID NO: 296800 - DNA, 5408 bp, Cannabis indica
aaaacaatagaggcagttgaatatattcttgaaggtcaaaggcctacctcatgaaagtcaaactcgggatctcgagctttagagaatccgtaaacatgaattaacggcaggggatattcttcctctttggttctacctcttaagattccccgaaatgaatctgttcgaagggaagtaattagaaagtacattacatgacaataagcactcttgaccacatttgagacaagtttcatgtcaatgatgaatgaataatctaatttataaactaaagagagaaagtccctcgtgtacatttttagcagaataatatcacagccaagtttagatagtcaaattgtgagtgggcaattatcgattaataagtttacttagtagaaaggagattattattgtcaaggcaaaaataacaaacctagaaactccacagcgtcattaggcaagttcattactacttgtgttattgaaggagccttctcacttgtaaacaaagagactatgaacctccttccatccatgttgaaaacctttacaaagggaaacgcgccagtttaagaaaccaaatatgaagaagaagaataaaagggtgataagcagttatttcatactcttatcttcttttcaagtttgttgagcacactatttctttccaaatactcgatcgcttggggattcaaatcattagcatatactctttttacaatcttggctgctgatatggctattggaccaaccccagagaaaacatcacctgcaaatagcaagagcatatgaatcaagctgatcgtcatgaaaggaaacaatgacacaatgagaattttggtggccatgaaaataatgacatgcatgcccattgccttgagagcataaagtaatttgaaagctatgcagagtaacaacaagatatgtaacctacaaacaacatcttttcgtgtaaatccatttaaaagcctttgtcgttcagttgcaagccttgagttccaatacctgcataaaatgtaaataagaataagatcctctgccctaacctatcgaactctaaggtctaaggtgaacaatcagactacacacacacacactcctagagcaggctgctaaatataatctgtgatccataattacagatcactggttgcacccttattttacaggtaaatacttgaaaagccccaatcaaagcttgcagcctagtgtccattacaaggatgtgagctatcttttcatgtgtttatgaaaagaaatttagcaccacacagaacatataaaacaaaagtgaataagtgataattatggtgaaaaaagagcgactaaagtgcaattctgtctgcggacagaaatgtggactgtatgcaactcataaataactaggactagttgcagtacatgagaaaacagcatttgaagtcacaatatatgtatgaattgtggataaacataaatatatataagcagccaatttccccagaaggttgagtaaaagagaacacacactgttgataaatcaacttgaaactgcaatccattctcaactactgtagtcaccagggagtggtttccagctaaaacctcaagctgcattgttctgtagtcattctgaatggaatcaatcttattgacaactgtttgaatctttggcttatttttatccaaaattacctgtaggagagaggatacatcttctgtcaggcaattgattattaacagtagttgataaagtatagaaatggtaaacttatgtacataatgagcacctttcctataagctttttgtagggtagaagctcgtctctcaggttaaggtgtgcaacatgtccaactgtttcaaatgcggaaggaataataatatcattgggcagcatagcctccaaaatctgcaagaatggttctgttaagttctctgcccctgctcatcacaccctccataaaacagcctctcaatcaaatgcagtttcaggcagcatattttcaagtctagttacccagaaagagaaagcgaataatatgcaataccaaccacataatttataggacatgaatgtcctggtattttaagaaaacagacttgtacaagaatcaatgatatattgtttacttataaaggaaaaaaaagttcaacaagcctatatagcaatgctcttaccaattagaagtgacacaactgaatatagtttaatttcctcatacggaaattcatttaatcttaatcaaatcaatgaactgactgtttcagtattcccctacaatgacattattcaaccacaataaaatcatgacaatgtatttgcatcaaaaggcacaacttttgtatttcgcaaggcaaacttataagtggaaccttctttattatgtataattaggaaatacttcaaatggtgatactcatgagctgttctggttttattgttgtttttctctatccaggtcacatgattcaaattagtcaaattcttacaagttggtacaccaaagatagcaaaacaaaacatgacaataacaatcaattatgataattcccttggtgcaatacctcatccatctgccagtagtcatagaacaaagtcagcctgcatctaacaagctcaaagtctgatcttctatcatccatgatagtttccttcaatacaacctgaaaagtagtaaattaaggacattaggcatgagagttaatgaaataaagaaagtcatactcagacagtcagactcacacccacttctaactgatgaaggttaatttgacaaacgttttacaacatgaagctcatttcatgagagcaaagacaagtttgtttcttaacaaaatgatctctcacataataaaaataagtaaatcttcgtacaaatatacaagagaatgacaccaagctacacaagaaggccctcattactatgtccattgtacaaaaccattttaaggataacttttttctttgaatttgataagtttcagcaaacttatccctaccagccaataaattagtagcaattatggagaagaaaaaataagaaaatactcgactggagttcaagttatctccagcaagagtgtttatattaattcaatataaggagattacaactgataaagaaacaacctccaggtcttaggacacctgatcatctccctataccataccaatttcccaataccccaactctgcctactctcctactcttattctaaccgaaaacagcacacagctgcccaaaactttctatattttctctctttgatgaatcatcacctcactacacgtcatttcctttttctctattctttctcctcacataagtgcatttaaccacaggcttatcactatgtccattttacagaaccattttaaggataacttttttctttgaattcaagtcacattttccccacattgaaaacaaagacgtcaatgaaatgacttaggaagttttggtgttctttacatagcagagcaatacttttaccaataatttaataaaagatcaaccttgtaaattttttatttataataataatttaagttcgattctgaagtcattaggttgctacaaaaactagaagctccaaagtagtatacaaagatagcattgagctacttctaagttctaacagagagcaagtatacttttacaaattcaaaaaataacaagaaaattaaaatttcaaacttgaaacatctatatggaaagcctaaccaatattccaaatttcctaaacacattacataaactttaaaagcgaaatgatatttaaaataataatgaactcacaagaatcagagtattggaacataaaccttaattgcttcaggcaactcttctgcgcatttcttcgaatacctctcgtccaagagcaataatctcgttggccctctccatttcctgcaatggaaaccctctcccagtaaacccttcaaatcctgtccttccattaacccatcctcaacaacctctacaacagagaagcccttccttccgaccttatccttattcttccctccactcctctcttcatcatcaaccattttcttcttcctcgaactcggcctcgtcatcttagcaaggtttcgaaaattcacaaacccaacagagtcaaatgtcttcacaagcttttccctgtgcagaactgggctcaacggctcgccatcgccctcggctttcccatgcatacgcctgtccagcgaaaccagagaatcttcgttgcttggggtacccacaagcttcttcacctcctcgtcgtcaaagtcgtcgcccgggactctggcaatgtttcggattcgaggccagttcaagaggtggcctcgaagtcggttctcgagaatgaaacaatccttggaagagactcgaatcgccgcgatatcgaaaacccttgagaagctttcctcgttgaatgcataatcatcattgtattccccaccatcatcatcttccttagtaaaggttctgagggaagtttgggaaatgggtgttgggggtagggtgcccttgcgaagggagggtccgtaagagagctcagggtctgaagattggttatgggcatggatttgggtggtaaaactgatggaagatacagagaagtttgggagttttgaaaaggaaagtgttcggggtaagagagtgaagagaggaagagtgtgagctttgagaatgtggaacttggtcaccatgttgatttggattttgattttcccgggaaacaaaatacactatttttataaaatagcatactcatttattattattattattattatttctttctttctggtgagaaatggctctataatttgagtttgactatggaagagaaattgattattttttgctgggggaagagaatttgagtttaattgggatttttctatttttggtaattaagtgtgcttaattgaaggaaaacaaaattacatgaaactagtagccacaaagggggccacatcccttagataacccgacgacaccaccttagcacatctagaccaacccgctaacgcattagccaccacattaccggaacggggaatgtgaatgaaagacacagacttaaagttcttacacaatttgatataagcattgaaggcacggtaagagccccacccaaaaggcgaaaaacccgttgaaagggcttaaaccacagccagggagtcagattgcacaatgatcttcaacagcttcctttctttgcccttacgaagagcaagtcgtatagcaaggagctccccttcaagaacaccagttacacaggcgaaatccgtggcaacctaacatctttcaaagtccgtgatcgatttttccactactgctaaaccagcatagttttttactactgaagcatcagtttggaaacatgtgacaccttcaacattcacctttgcatgctgggcagactcctgcacactttgctcaagcgaaacctg

SEQ ID NO: 296801 - DNA, 4128 bp, Cannabis indica
tactatttattgagctaaaaatatctaaaatagctaaggtttacatcactttggtaaaagcttaattttataattttatctctataatttaaaaattgagctattttctcgaagtgctctcgtgtcaaaagtaagataaaatatttaaattttatttttcaactgaattttttaaaaatttagaactgcttctaaaacttaaaaaaacaaaaaacaaattcaaaaagtttactgataaaactaaatttgttaatttaaattaatataagttttaacgtaggtagtaataattgaagatgtagatgatgcaagagtgccagcaatagagtagtagtactagtaggggtcagggcagggcagggcagggcagacatgagtgggcacagaaggaaggtgcaagaaattcaacggaaaataaggcaatcgcagtgggaaaccacgttccaaactgaccaactgaaatgtccttttgtactgtgcccttaattacttcaactaacacacattcacacttatgtgtgtatgcattcttttagataaaaataaatattacaccaattttaagcaaatttaatacttcttcatcattatcaaatatggaatgttacttttcaaaaataaataaataaataatgttagaaaagcacacgtacgtaaaaccatatttctctacatataatcccaaaaacataactggagtactccttttatttctctacttttaattttaaccataaccatatatcagtataacatggttaactttaaaagtatttcttctactcctctatatcttatttattattcttatgaaaccggtggtactaataatgataacatcataatgccacacgtatgcaatcaatatttaaattcaaaagacatggataaaatttgttgatatcaaatttgaattaagtcttttaccaagaattagtagatcgagaatttatgacatgagaaagtaggaggggttaacttgtgaaatatatattattattatatatttatgtgataagattttattatcattccatcttaatacccctcatgcacttgtcattcactgctgatcattatataatggcatttctcatcatcaccatcgtgttgatcaaccatcatcatcatcattgtcaagtttcttccttttttatttatcttcatttcactcatcccataccctttttcttcttcttcttcttctgccttcctcatctcctcaaataagaatccctaaataaataaacaaaattctaaccccacttctccccttcttcagaaaaaccaaacttgttgcattattacatggtccaaaccatggacttatcctctaatccaacaaaaaccacccaagacaaagatacagaaaccccacctctacctcagcccaccaggcctttatccttcacaaacggctctcttaaacaacaacaccgccaccaaaatcaccacgcgctcactcacgcgcctctacccacggttgtttcttaccgggaatgcctcaagaaccacgcagcaaacataggcggccacgccctcgacggctgcggagagttcatgccctgccccaccgccgagccttccgaccccacttcgctaaaatgcgcagcctgtggatgccaccgcaacttccaccgccgtgaccagccagaggagcccacctctaagcacttccttcgtagcttccacaatggtcatccgttccaactccaaccgcttcggctgtcttctcagccacgccagggccggagctcaagcccaagtcttagcccaagcccaagttcgagcacaggcccaaccccgagcccacaatcgccgccgccggtttcccatttaccacccaactcttacttcgcttcaccacctcagatgcttttagctctcagtaccggcttctccactggaccaccgtccgataacctcccacatgcccacaagagttttaatccaacggttggggttaaatcttcggaggctactaactattccaacgggaagaagagattccggacgaaattcaatcaagagcagaaagaaaagatgtgtttgtttgctgagaaattgggatggaaaatgcagaggagtgaggagagactaatagaagagttttgcaaagagattggtgttcgtagaggggttcttaaagtttggatgcacaataataagcacacagtggggaaaaaggacagaggattaagccatagtaacaacctcggcgatgaagctagtaatggagataatactaataatgaaggtagagtacttagctatgattcaaatcaggataatgaaatcgttgatgaccagaaccaaaatggtgaggatagaagagctaattttaattttttcgctaatgggtcttctgcttcatcatgaatgtgagaaaatggagggagggaaaaattaaagtccaatgaatcttcttcttttactattgagtcatccatatattgttccaacttccattacattgtattacattgtactctgttttagtgaggttgaagaagagaacagtaagattgcagcttacatggaaccgttattttttttctttctttttgatagaattaaatggaaattctttgattttatttaattctatcaaaacatttcaaatttctagcgtacacattttctagaccaatgataatttttatcactttcggataaacacataactatgtttgtttttacatgatattgcccattatttccttaaaagtaatctgctttccatactaattagttggtccaaaattgaagctatatggcaattttaggtgcaactggtcatgatatcatgataaggcatctgctattctatcctcatgcatttaaaacatcgttttctacttctgcaaatgcacatttatatatgatatatatccccattatatattatctagaataatataaatataatatgtaattctgtatatatatgttctgtacaaaaattacatatggaccaatgaaattgctgtagaaaatggatatatattgtttttagaaaaaaatggatatgtatatatatttatctatggtgctcttgtgttgttgtgagcagtaattaatcatataaattctctaatgtttggtgcaccttccatcaagcatagccattattgattgacattcttcttgattgcccatttgataaaatactgatttccgttagaatgaggattataggatacgtatttccaaaacaagacataatgtatcaacctctttctcactccaattagtattgctaaaagtaatattaattagaattggctgtctaatttagtatattatcttctgagtatgagcttttaaggcaagcaggctttttctcaaataaagaaaggttgataaaaaccgagcccaaagtactgccacctttccatatttggttggcttaatcaagcggcaagtattgttcttctcatacttgccaatcataatactaataaaataactctaaaactattatattcttattttgtttaatcactaaagattcagtaatcacattttttaaaatattgtagtttgaagatacattacttaattatcttaagaatatagatacatgttggtggtgattgatttgatatacataatgccacgtgtattcttcttgcattgtacttcgctatgtggcagcctgctagccaaagaacaatattttcagtatatatttagccgtttctagcttccaattagaaaattttatcattccaacatatttatataattttaaaatagaaggtaggaaggaaggggggccctcctaccatattcaactcagctcattcaattctatctcattggagtatttaatttaaatgacttcacttaattagtaaattatgtactagctatgttttttgtaaagttcttttttggtaagttagttgacaaaataacttttttttttatggtaagattgttttgcatgcatactcgatttcttaccttgtgttttcagtttttagttgctcttttccttgttaggaaaattgcacttttcaactatactttcctttatttggaaaattcttgtaagagaagcaattctcttatggaaagttagtttttttaaggaaactttgattattgtattttccttattga

SEQ ID NO: 296802 - DNA, 2745 bp, Cannabis indica
atagaagctatagattccatatctatgtttggcgctcccactcaattgcactaaatgctcccaaaatgtacgtatcagagattgatcctaagcatgtctaggattaagatcttttaatctaagatcaaccagtgatattgacttaggaagatacaacggtatctttaccaagatcaatatcggtcctagtccaatgtatactccatacatccgaaactagcatactttgccaatgtcctagaaagaacataacacttatccaaggtgtaagtatactttatcgttgattatcacatcaatgtaaatccagtgcactgatgaatcaaggacattatcttttgaagcatataatcacaattacattccaactgtgttgacatcactgtaattgtgaataactatatgttctgaacttaacagattttgtacatattaaatcataacacatgaaaattacatgtaagcataaatgatttataatcttctattgataacaaatcagattaaattaaaatgggttttatttatggcataaaatcccaacacatatctggtaggatcataggagtcctcgctttgcctctctgggattttttctctagttttctcaaaatctccaacatttcttctagaatagggagttttagtggtatttgtcctgtgggaagtctgatgttcctttctaggacgttgggttatctctcctagttgatcctcttcatttcgcggaatatcgtctgccatgagttaataatttgaatttgttttcaaggagagttttttttctgagttttttattacaagactctcaataagagcaccacactgttaacgtaaatttttgttaactaaataatatgtcttttctataataaatgatcttcagaatttattatataataataataatagaaataattaagaagaaggtttttacgtaattttgaatttaaatcttcatagtctaagagtccatcttattcagggttagaagattgtatacagaatataattaattatttttcaagaatgaacaattaatataatataatattctctatttttccaaaggttagttgtcccttattctccgaattctatatttagttatgggagtctagtatgacagttattctcttagggtctaatcatttgcaaccgttcatgaaacgtggacactcccaatttttcatatttatgcacatgagataattataaataactgcacaattgttctttatctttatctataaacaacatatactgactatgctttgttgctcttgtcattcaatgaaaacttttcttcaacatctccgtggaataatgtctaagtgtaaagttagagcacatttcaaactcttccttaaatattgagtgaagtatatgcgagacgcttacttcaactcgtcaagagcgagatgaataatgttgaagttgtccttattctggtaatatactcacgggtgcgtgggtgaatgagctgcaaaactcattatctacccattctaaataattcaataatgtattctgtttatcccgagatagacttgttcacctcgctggtctcatcagttggtagttattactcacgtctcgtcattgcttatgtgatggtgagttcaagtatttctatcaactgtatttcctgagacgagtcatctaaatgcatttattaattcataatttgagatagtttgtattccaattttgttacacgtgtcaacttcatattgttgctcgaaatatgggtataatacttacacatacaatacatattcaatacaacacaaaaaacatacatatataatattaaagtttagattttcactatattactgaaatttggccattaataccgaccaaaatttggccaccacgcacaaccacaagaacacaatcttaacaatgtagaaaaatcctaataaaattacaaaataaaaaataaagcaatgtacagtacaaaaattattagaaattaaatttatacctaaatagatgttgagattcaacgatttctccaccaaccgacagtcggagctacaaccaccacagccacatcatctaagctctaaaaaaatataaaaaagacgttcaaacactgagattatatttttgggtataaaaaaataaaagatttaaaaaaatgagtgaaaatagtggagaaataataaaatggtgagggtttggtggtggttggcaagggtttctctcggttggcaagagtttggtggttgaaggtgaggaaatgaggaagacgaagttggcttagggttacataaacccctatataatatggtgttagttattaagaaataatcacgtcataagtgacatgcatcatcatcaagtgcacatatgacgttacttattttttaataaccaatgctataagagtccctaagtcagtttctatggcattagttattatgaaataactgacactaaatgttaatttccaacctaaaattgataaacaatgaccgatcttttttttttttaagcaaaaataatcgcctttaaagatgtactatttttttaagaaaaaaaaaaacaaccttcaatactaataaatactccgacttgaattatattattgtcaagtcttgaacttttagttagtgaccaagttaaagtgtcatttattagtgacaaaatttgtgttgcatacaattaaaataaggctaattagcaatttttcctctcgaatttagacatatatcaaatcatgctccctgaattttt

SEQ ID NO: 296803 - DNA, 7062 bp, Cannabis indica
tttttttttttttgttattttgctcaacggtatttttgttgttattagctggttgcaatcccaccattttaagcctttttttttctttatcggtccttttttttttatgacggtaatgtcagctacccaataaagaaatccccttttcgcctaggtgacagcgatttacaaactagaaaactattcaaggatcaaaacctttacaagcaaacaaagatcagtacttcaagaaaaagtactcttctaaacatctaaacagactatacatcctacttagttgaaaaatcttcacctttcacctccatcatctaagcaaaaatagcttctcttgtcataagcttaatacccctaacccagagttgtgccgattcaaagcccccgccacatacaaaatgcacctctttgttacctttagtaaccactctaaacagtccaggttcgtctgcatcgcctttattctttctgttcttacggaaggtaggacttggccccaagtttgcctcttggcatatcacgtttctccggcttgattttccccagcttagtactccagcattcctcgccatttttatctccttctggtgaggactccccttcccaccctttgtgtgcttctgaacttgagcaccatccatcaccaagttgcgagcaatttcgtccagcaatacatgctctgcttcattttccatactgccatttttcctagcgagtgacagtgcagtttcacccttgccattcttaaaattgatcttggctccatgagagatcaacagttgacaaattctaccatggccttctcttgcagctaacatgagtggggtgtaaccatctccgtccgggacattcacatcataacccctgcttgtcaacagcttgacagcatccaaatcaccacgacgagctgcacaatgcaaagcattgaaccctccagcattccgattgcccttttcgagtgcaaactcgagcataactttctcaaataggtcgtgattttggttcgattctgatagtgtaattgcagtctcaccaaatttgttagacagctttacatcagcacctgcatagaccaggaagcgaaatgcttccacatgacccttcatagcagtaatcattactgctgaaaagccattgtcatcttgataatcaacattaaatcctccccaactaatcagagcttccaaggcctcaatattaccagcttgagctgcaaagatcaaggatgagaaaacagggagattgctggagctgggtaactttcccgcttttatcacatccattactgcttgctgaaaaccaagaagccacctatttgactcagcaattgaactcacagactgaccttcgacgttaaccagtccaaaatcagcaccagccatggctaatactctcaaacatgcatcttgtttatatcttgcacaaatcatcaaagctgtgtcaccattgccagtcttggagtttatatcacaaccagaatctacaaggcattgaagaattgtagagaatcctagacgtgcagccatgtgtactgcacgaaatatggtacccccggttgttttaacaggggattctacatcggctccacaacttaagagcacgcttacagctcctgcattgccacacaagatggcatggtgaaggagggttctttcacagtgtggggtatggagggagagatgttgtaaaagcattcgcaagatggcaccactactttcgaagtactcaacggcacaccaggtaacaggataaggctctgcaagtccagctccaacacgaaactcttctcctgtagctgtgtcccaagaccatgctcccaacggtacttcgatgtctgtcttagcaccagcctgtttcatttcggaagaagagccaaataatatttcagtgacgtggctttaaaattgagggaaaataatatatttaactaaattaatcagtgaaactttgtcgtgcacgactaaatgtcctactgcaaataaagaaattggtacattttctgttcagatttgtgcaaacacagaacccacaccacgggttatccaaagtttcacttccagctgtcacagtaattgagacgtcatgatagagggaacgacctacccgtttattgggtgtcagatttgcatggacaggaatatggatatcaattaaaggaaagatcttctcccatccggtgtggagttcgaaaaaaaaaatgtagttgaaagaactcatcgttcacaaagctaattaggagtatttgatcccaatttagcatatgctatatgacaaacaattggatcttaaattcctaaattttttacttatggggttctatactgtataaccaaactaacagagtccaacttataagacgcttgtacgatcaataaacaaaaaacagaaaacacggaagacttctaagtgacaagtagagcggggaccccacttaacttgtccatatacgtagtatggtgcatcgtaattgtctacaataattgattaataatgcgaaaaggctacctgtagcagcaaacgaacaatggagatctgcctactaacgactgcggcaactagcgctgtacagtcaacattggcgtgcaaggaaggtttagatgattggagcaacactctatctgctgcacttgcatctacaccacactgcaatcaagcaagaacaataatgttaatttgggtccctgccagattaagatctgcctctaaatgctgcagcattaggttagttatgagtcatataatcacagacagcaatatattaaagtgtttttcctcatcattcacttatatcaattaaaagtttctggagtaaataaaggtctctgcaatttcagtaaaagctgtgaaaaagtttaaagttgtaaactgagaagatctctggcatcaaaagcatttaacatccaaacaaccatcctgaaacagagtaatactgataatatttatctacccgacatccaattcagggtgcattatcattaataaaaaggagtagggggtgaaactctactaatataattaatattatccgtctgttaggctatacttatgacaaagtcaactttcctgtggtagcacgtaaacagttgctatgttcactataagtaaatataaagtttttaccttgatgagcgcatccaccaaatcgacaaaccccctgcagcatgctgtgaccatggcatgcacagcaacatggggcctaattagatccgaagccattagcagctcagcaaacttagcacgtccatgacagcttgtctctaatagagcttcctcacaagctggctgagaagccccagccttcagtaagatttcaagaatttcaaggtggccctcccttactgctgctgttgttgcgaagcccctaaatagtttctgatttacatcggctccaatgctctgttattttttccaacataccagctgttagtttgcaaaaccaatgacaagagtccacagagacattattatcaatcatttgcatattggtttattcgcttagtacgaaatatcaaggcaaagaagcatggaacttttgatagggaagtgaatgaatgtcacaaaaacaaaagggtaagggagatgtattgtgtgtacttagagacaaccgcgtatgggctttcaagaccaaataatcaattaaatagtgcaaataaaatttagaaacagaaacatttgttatatcagctcttccattattgaatactctaaatagcttatcatttttttccaaggtgcatactgcaaatcattttctcaaatcttgtttatctaggaaattcatagtctactacatttttattttgtttttaataaaagactacttttcactcagtcaactgagtttcaaaatgagtgagtaaaaatttggattttacaattcggccctcaacaataacaaaaatatgttatgacacttaagtaaggactgaaagtagtcatttcaaagaacaaagtaaaccgtacactggttgataatgtccactaaatgttacatacaaacgaaaacagtgatttttagtgatgaaattcagtcaataggatccaaagaagaaaacaaacagtgaatgaaactgttgctacagatgtcaaaaggaacatatttaaaaaacacactgtaatgctttaaattcttgtactaagttttgaaaaaaatcacattatattaaactaaatagacaaaggaaaaccttaagtttaaaatgaaaatcttgaccaaccacaagaaaaggctaaagttcaaattacatatcacaaatactcttgtttaaaatcaaataagaaattaagatccagcaataagcaatttattacttgtaatttcgataagaatatattattaaattcagaatcgcagaaatatgttcctagcactaagacaaacaattataaagtataaacctgaccctgaaatcaacgaaacctaattaaactacaaaaaagaataacttatgttctaagctaaataaaatttcaaaaataaattatgcaaattaaattcaaattttctgaagaaaaaaaaaatgaaaagcgttgatagaacaaactcaaactcaaactcaatgaaacagttcaagcctcaacttcaataagcacaatgatctggtcaaacaaacaaacaacaaatcaaaacctcagccaccaccttaccagtaaattcttaaccaaaccaacatttccagcatgaacagcaagaaacagagcagtgacatcagttctaaactcctcgtaatcgacgcgtacttcactcgccgattcatcttgcaaaaccacctcagtcttccttgtcttgaggcacacagcgtctacgaagttgacatcgagaaacggatcagcgatacagtcgagtgccgatttcagatcgccagataacgaagcttcgagaaggcgtttagatacctctgcctcgtagtccaccggaaacacctgcttactcccggagaagaccgtcattttccggcgcgatgaaatatggagctcgacaatagctctctctctctctttctctctcttcacctgaagaagaagaagaagactagaagagcatacgtttctcacactaagattgagtctctctttctctctcttatatatatatattatatatgtattatatctatatttctctctctttcgttttgaaacggccgcaaagctcgagagaagaagaagagaaaaaagagaagttgaaataagtgagcgccagagacagagggagggaacgaaggttgcaaatttatcgggatggtttaacttgggtttaccgcagtaaataaaaaataacacagtaaatactgacctcgaatattaaaatctataaaataataaagacaaattgcaaattgcaaatttgtcctcaattattgcacttatttaatttcgttccctattttgggaaatatttaaatacaaataaagtatgcagaagaaaaaaattaaaaaatatgatagacataattaaccatttaatacttataattacaaaatacaattaaaactaatatttaatcagatattaaaagataaatttaatttatttttaatttaatagttacgatatctactcaactttaaaattaataactatcgagatgaagagaacactataaagattggattagatttttttttctttaattttggttaaacacactcgtagcatattttgtatgtaggtcggcgtaggtcagcacaacgggtggcgaaaattgaagtttgatgttttattgttatcggtttattagagttttagttgaaagagtgtttaggattttctttcttactttgataattggcttacttagcttatttttgttaattttattttataaaggatgtgtttatgtcatagattatattgaatttgcttattaatagaatttttttatttaattactttaaatatatatattattttttcatattattatatataaaaaaaattgatatataatatgccatctacatccctaaattttaggataacttaaaattagatcaataattcattagaactcaaaagttattacgtaattaagtattaaatgttatataacttaagaaattaatttttaaaaataatactaactaattatgaagtaccactcataaaaaaaataattgaacaccactaataatactcataagtcatactcataattaagtattaagtcttaaataatcttataaaaataattatttaaaaaataatttttaaaaaaataaatactaactaattataaagtaccactcatagaaaaaatacttagacaaaacaaaaagacaaaattagacaaatataataatttgagggaaaaattttgtcaattgccttaatattaaatttaattttagcaaaaacattatttaaagaatgtagggtccactcttttactgtaaaaatgtttggttatggcttctactgtggtagtagcaagtggatgagcggcaatgctggctcggctcgatttgaattttttttttattttgatttttttatttttaaaattaggaaaatagtttggtggggaccagatgagattttggctgggtttgaatcgtgcagtacatgtcgtatggtataacagttctttgattagatgggggtaatatcaaatcatgaccgttaatacttattcgtaaccgaaaatcacaaccgtcaaacagtgagtggggtcagcacactctctaaataactctagacaatcgctgaagttaatgctgacagcttttctaaatgttatgtatctaaaaaatattagtgtcagcgtgttgaatttagcacctaatccttggattgttctataataatatcattctaattggatattatattccactattaaaaaaaaaattaaatgtgttattctattttagctccaaaaaaattagcaaaatccaaattttgatactatattaatataatattatagaaattttgttaaaaaagataatattgtttaatttttgttttctttcattgattaatctttaagaaatcaattttaaagattgaaaaataaaaagtaatgtgcttttttttttgaacaaaacattgtttgtgcttgttat

SEQ ID NO: 296804 - DNA, 3254 bp, Cannabis indica
ttttcgtctcatatatatatatatatatatatatatatatattttgatatcgctgtgttgttatcgcttacgattgtattttatatatcttttaagaaacgttactgctgggaaattaacatctttcgatgaattaatctttgcaattattactaagatatggaaaacttgtaattatgatttcattcttcaaagcaagaaatttgtaaggtggtgattacttgactcggaatcggtgaccatgtaaattgatctacgattcaacacttacttgttcttctagtacttacttgtgatattagaaggaattgcagcatatttaggatgaatgcttaatctaaaatttgcttagttaggttttctcttggatcagcaatgtaatccattactataagtcacacaatatgaaatatgttatgaatagttttctggccttttctgtttcctaattttcttttctaaaatatgtgtaatgcgtttgtaaaatattatgagatcattaactctggaaatttttgatcggatcagagattggaataggattgaccggatttggcgttttcttctcatttctcggaattatcttcttctttgacaaaggattacttgccatgggcaatgtaagttattctcaaatgtagttttccttcccagtagccttcatctttgtttgtatgtgtattcctttttcttttgctatttatataattttactttttgtatgaaaggtactatcttaacatgttatttcttggtgttacttaatcagatcctcttcttctcaggggtgactcttacaataggactaaagtcctctatgcaattcttcatgaaacctcaaaatttcaaggtttaagttgttaatctctcctctctttaattcattgctcttgtataaatatctctttttcacacctgctttctttttgttgattgtacagggaacaatttcattcggtcttggctttttcttggtagttataggctggcccatttgtggcatgattttggaggcgtatgggttcattgtgctcttcaggtatattcaatctccactttcacgattttcacagtaatttatttattctcttctgatgtttgctgattgcaactatcttgcagtggtttctggcctacactagctgtttttctgcagaggatacctgttcttggatggttgctacaacagccttatattagatcggtatgtttttacattgaaaccaatacgtctcttttcctttcgtttaccaaatttattttctattaacggtctataccagttcgtttagatgtaaaataaaattttgtcttcagatatgaacctgatttactttgggtttagccttggaaattacttggtcatcttgatatttgtacaaagcatattaaagttacctgtgtcaaaggaaaataacttataaatatgagaagtctcatttagtaatacatatcattttatgatcgttgtgaattatcctttaagctctatgtataagggtttttagtcttctggttacactaagatagcataagtaaagtaatttatgattattaattcgcaactatttccttctattagtatgtagtagcatcatattattcattagagattattgagttgtcttttatatgtcagtcatttgttaagtgactgttttcatctacattccttgtatacggttttcgaaatcggtgaaggcggttcaaaaccgaatctgagggtacgcctctgctgttgccattgaggcatacacctcacattgacaaagcacacacctcaggtgaggcgtactgaggtgcatgaggtgagaggcacatgagatacacacctcagcttaattgtgtgttaggattgttttattgtggtttcacttggggttttatgagctatttttcagggttatttttaggcttgtgaatgacttaaatgtggcctttagtttgaactatttttagcaaatttctaataaataaaataggcaagataaatgaaaacctaaaaaacgttatttctcaatttcaagtcaactcctaggctcgtgatgtttgttttagaggggtaaatcattttatttcatttcttgattaatattttattttatttttaaaattttcctttcattttctgtttctaagtggctgatttttttttttattcttttttgttggtatgtttttagttacttaatttaagttaggatgcgtagaagtgaacacaatgatgacttattggagatttaataaattggtttatgttttatagacttataactagttttattttcttttactttgatatggaattctgtcttgtttgttatgaatttttattattattattgttaaggtctcaaggcttattccttgcggttccaagagaaaacgcctctcctcaactttcaaaaccttttttgcttttaaaaaaaaataaaaacagtgatagttaagttatgtttagaatcagtttttagtctcattcttttgtttaggttttggtaattgcctgtagtgtcgttttgaatgaatttgcataaataccagaaatttgttcattgaatttgcatgttgagagtatgataaccattgattcatgaaaaaagtaatgtgagattatgaatacacatttaaatatgaaggttgtacttagaaacaaacttattaactttgagcgtatgcatgaaagaagaatatatagctgaacctttttttttttttttttgatcaagctgaagaacctttttggtaatacaacttatatgaaatgcagaagcaattagcgagcataagttttttttgtacccctttttcttttttaaaaatagtttattaaagtaaacaaaagttttgaagtggaaattataggtgacatagtacttttgtttttaaattttttaatcacaaaaatgaaagtaaaatttttgagaaacaaaaatgtgttctataatcattttattttttaattttaaaaataaaaaataaaagtgtgttctataaattttatttttatttttatttgtggattttatttaagttgggtttggggtccaagtccaggtttgggctggggttagggtccggggccgggatttgggtcccagtcgagtttgggtctaggactagggctgggggctgcctctggctttgggtcaaggttgaggtttgggttcaaaggttcaggttatggtcggagtttaaaaggtctattaagaaaaaaaaactgtttaaaaaattttgaaagtgacttttgtttt

SEQ ID NO: 296805 - DNA, 5327 bp, Cannabis indica
tttttttaacggtgaaagcacttcttcaaaatgctgattatcagttctgtatgcttataataatacgttcgatttgcaggtttcaaccatatctacgcgaagctcccagagcatcccatctagaagccctaggtatgatagggatgaccgtgttcgtgacagaagagagcatagagatcattatgatagggatgaccgtgatggtgggagaagagactacagggatgacaggagggtaagacaaggacatggtaacggcagtaaaaatcaatattatggaagagaatcatctgatcgttatgaaccagtgtatagtggagataatgaaagaaagagaagtagatatgaaaattcaacaagggggtctggtaagtgatccttttgcatgcgtgtgcaacgtgtaatgttgattttcctaaatgaataaacataatgctacaaatacaaacatgtctttctttttttgccactatagtcttgccagtggtttgtaatgtttgttatcaagactgggttaatgagtactctttactgggatgattttgtactattttgtggaaatacatgtttattactgtttactgacttaatgccgaaatgggcaactgcttcaggcagatcaaactgggatgatgggaaatgggaatgggaggacacaccgcgtcgagatagttattctaattccagcaggcgccatcaaccgtcccctatgtttgttggggcctcaccagatgcaaggcttgtttccccatggttgggtggcaacaccccccattccaacggtatgttatacggaccatggaacctgctgttatttcggattatcgtattttaggcagatagattgacttgggagtttttgcaggctctaatgtttcttcctgggacaatatctcgccctcaccagctcccatacgtgcttctggatcctcagttagatcttcaaattctagacatagtgggaagtctcatcaaatcactttttctacaaataattcacaatcgaatgaggtaatatagttttggacttctgttagctttacaactgagttagtatatttctttaaagtttgatgttctgccttctgcgtttagttcagaaagaacagacttgtagggctgtcatcagatagccaattagccatgaatggtctcttcacattctattagcttaccatattaattgtgtccactgtcaatgactacaggatgaggaagctgagatgactgatttagctgaagagcagaagtacgagatttctgaaagcatgcgccaagagatggaatacaattctgatcgtgcctggtaatttaaaagatggattgttttatttgttttcttgcactataaatatgatcttaagataatggggtgtctgattccttgaaggcagatttatcatagccgactaatacaatctttttgtataggtatgaccgagaagaaggtaatgctatgtttgatgcagatagctcatcatttttctttggtgacgaggcaactttacaaaagaaagaagcagagctagccaaaaggctggtatgtcttgttatatcttaaatactgttagtctgcatgtcagcaccctcttgatgtaagtttataaatctggtgcaggttcgaagagatggtactaaaatgacacttgctcaaaccaaaaaattgtctcaacgcactgctgataatgctcagtgggaggacaggcaactattgagatctggtgctgttcgtggcactgaggtacagactgatttcgacgatgaagatgaacgcagggttattcttcttgtgcatggtaaaaacatttgcaatgagctatctgagtcattcaatgttaaaaatcaattgtagcttgggcagagacatggattggataccgcaaattagctaacttacgtttaattgtttttacagatacaaaacctcctttcttggatgggagggttgtttataccaagcaagcagagccaataatgccaattaaggatcccacatctgatatggctataatttcacgcaaaggatctggtttggttagggaaatccatgagaaacaaagtatgaacaaatcacggcaacggttttgggagcttgcaggctctaaacttggtgatatccttggtgttgagaaaacggcagagcaggtattttatttgaaaattacactgcaagtatgatggtatgattcacactcataagttagatgctaattctttcagattgcttttagattgatgcagatactgctgcagttggtgaagatggtgaaattgattttaaggaagaagcaaagtttgcacaacatttaaggaaggaggaagctgcgagtgactttgcaaagacaaaaactcttgctcagcaacggcagtatctgccaatctattcagtgcgagaggaattgatgcaggtgtgatttctttctcactagacttgaatgttattattttttgagattgttatgtctttgatatacttgtgagcatatattaatatgagtttaatttcttgcacttttgggtggtttctcaaatcttctttgttttgaatactattgtacagaccatacgtgaaaatcaagttgttgttattgttggagaaactggttcaggaaagaccactcaattgacacaggttcatatactctttatttttatcaccaaaatgattgtaccattactttaaggtagcaaggattatttatcacattggttggcatttaattattttgctttggtttacagtatctacatgaagatggctacactgttaatggaattgtaggatgcacccaacctaggcgtgtggcagcaatgagtgttgcgaaaagagttagcgaagagatggagactgatttaggagataaagttggttatgctattcgttttgaggatgtgacagggccaaatactaaaataaaggtttcttcctctctcttgcttacacttatttgaattgtatatcttatggcatgtaaccatacaaacactcattgtttatgatggtcattgaaatattaagatttcagcctacattctgttttccaagtgttctctagctgcatatgctaattttatgaatttgcttatctaatttctgattacagtacatgacagacggagtacttctgcgtgagactcttaaagatgctgaactggagaagtatcggtatgtgaagttgattcttttctatttgtctgttccacgtaattttgtgtacatatcaaaatcatttactttcaatgttttttattgtagtgtcattgtgatggatgaagcccacgagaggtctctgagcacagatgttctgtttggaattttgaaaaaggttgttgctcaacgtcgcgattttaagctcattgtgacatctgctactctcaatgccgaaaaatttgcagatttttttggaaggtatgctatattttcatggattctggtcatttcatcatctcttacaccaactttattaattcttcttttttctaatactgcagtgttccagtttttaaaattcctggaaggacatttcccgtaaatatactgtacagtaaaagcccatgtgaggattatgttgaagccgctgttaaacaagcgatgactatccatatcaccagcccaccgggggacattcttatctttatgactggccaagatgagattgaggcagcctgctatgctctagcagagcgtatggaacaacttatctcaacaacaaagaaaggggttccgaagctcttgatacttccaatatattcacaacttcctgctgatttacaagcaaaaatattcgaaaaagccgaagagggagagcgcaagtgtattgtggccaccaacatagctgagacatctttgacagtggatggaatatattatgtcattgacactgggtatggtaaaatgaaggtgtacaaccctagaatgggtatggatgctctgcaagttttcccagtcagccgtgctgctgctgaccagcgttctggacgagctggaagaactggcccaggaacatgttatcgactgtacacagagaatgcatacctcaacgaaatgcttcccagtcctgtgccagagattcaaaggaccaatcttgggaatgttgtcttgttgctcaaatctctgaaagttgaaaatttactagattttgatttcatggatccacctccccaagacaatattcttaattctatgtaccagctgtgggtcttgggtgctcttaacaatgttgggggcttgactgaacttgggtggaaaatggtggagttcccattagatcccccacttgctaagatgctcctaatgggggaacgattgggatgcttagatgaggttttgactattgtatctatgctttcagtgccgtcagtattttttaggccaaaagatagggcagaggagagtgatgctgcacgcgaaaaattctttatcccagagtctgaccacttgactctctacaatgtgtatcagcaatggaaacaacatcaatacaggggagactggtgtaatgaccattatttgcatgttaaagggttacggaaggcgagggaggtgaggtcgcagctgctagatattttgaagacgctgaaaattcccttgacaacttcatggccggatacagacattgtgagaaaagctatttgctctgcatattttcacaactcagccaaactaaagggcgtgggagagtatgtcaattgcaggaacggtatgccttgtcatttgcatcctagcagtgctctctatggcatgggctgcacacccgagtatgtggtttatcacgaattgattctaacaagcaaagagtacatgcaatgtgctacggcagtggagccccaatggatggctgagctaggacccatgttcttttctgttaaggactctgatacgtcattattggagcataagaaaaagcagaaggaagagaaaacagccatggaagaagagatggagagtttaagaaaggagcaagccgaggcagagagacggaacaaggaaaaggagatgaagaagagagctaagcagcagcaagccgtgtcacaaccggggttgccaaagggctcttctacctatctgagaccgaagaggtttgggttgtaagtgtaaaacattatttattttaagttccttgaatggcaaacctgttgtattctcaaatcatagaacataaattttgttcctggtttaaccaaaagtggatgaagcaaaggaaaataaaattcattccttgtcacgatgggcatatacagtgtcttctgttctgtcaagcaaagcagagcttggaatttgtaatcacccaaaaatagttataaagaaattattgctaaagatgtct

SEQ ID NO: 296806 - DNA, 3264 bp, Cannabis indica
ggcataaaacccaacacttattcgtttatttggagacaaatttgctaattgttgttattcttccagtcaacttctggacatctttctattttttgtgtgaaggcatgtccagaagagcgttaattttctccgggttcgcctcgatttcttaagaactgactataaacccaagaatttccatgaagaaactcgaaaagtggatttcttaaggttcaacttcattttgtactcttagatcatgtcaaggcctcttctaaatctttgtgatggctctcgaagggttttgattttactagcatgtcattgacgtaaatatccatattcttctccaaaatattcttgaacaatttattcaccattcgttggtaaatggctttggaatttttcaatttcattggcatgaccttgtaactgtggattcctttgtcagtttggaaattgctacactcctgatcagccagatgtatttttatttggttgtagccggagtacgcatccatgaacgttaagagttgattttctgaggtagcatcaaccatctgctcaatgtgtggaagtggaaaatagtattttggccaagcttagtttagatctgtgaaatctatacacattctccatgtcccattaggctttgggaccagaaccagatttgcaagtcatatgggatatagagcttccctaaggaagtcaatgtttatcaacttgtgtaactctatttttattgcttccaacctcgctagatctagaggtctctgcttttgtcagacttgttccgcattgggatctatgtttactgcatggcatataacatggggactaatgctggtcatatcaaaatgattccaggctagcacatcactattttccttgaatgtggaaacaatcttttccctcactactggaggcaggttcttccctactcggataaccttggtgggatctccatcagctattaacatgttccatgccaattcgtggatcaagttcatcttcttagaccaccccaagcgttggctaggaagatgtttagacattagagttatttccttcctggacatgagtacaattctagttgaaacgttgtagcaacttcacgtacttttttgatctcctctaattgtccttattcttccagtattgttggggaattttaagcaaaaatgtcagatggatgtcaatactccaaaattcattaaaaatggtctttccagaatggcattataagtagtaaggcaatcaactattactaatacaacaatgctttcgggaacttccccatctattttcatcaaaagttgtattttccccatgggaatcaatgtgcctccattaaaaccttacatttggattgtgcatggtagcagattggcttccaccagactaatggcttggaaggctcctttaaaaatgatgttcacagagcttccattatctatgaggattctggaaactcttttattttctatttgagcctctattaccaaagaaacattatgagggaagtgaacatgtctggtgtcgtcttctgtaaaagtcaattgtaaattcatcatccttggatgttgggcaggtgattgtaccaagtggcaagctttaccttgattcaactcattaaggtatcacttttatgtattttgagtgctttcggcagtatgacgtccacttaaaatagttgctacatgaccatctaagacttgcaatgcaactcctagagggtacggatttccaagaccgggggctatagctattgccgctactagagcgttttgtgccccttgaagagcttgtgcatttggagtttgcatccttacccaatttgttaaatgttcgctccatactaatccctcaattttatcttttaaatagtcacattcgtttatggtgtgactaatatcaccatgatatttgcactttttgctcagatctcttgtttattttcttcctatgtacaattgcgaaggcttcctgtagtgtaccgtgttacaggttgccttgtatacattttcttgaatatctatgagacttgtgtactcggtgtatcttgattcttgggtttttcccttctttgcaaactcactctgatttggaccctttgaacttcttttactccgttagtgggttaaattggaatctagaacttccactttttggttcatttgtttagaagcagtactatatctggtttatgcagctctgaacccagaataactagcttgtgcagctggctgcacaaaagtagttggcaatataccatgggagtagtaaaagcagttgggggagggtaaatggatggagttttcatctataaaggctaggcatttattacatcagtggaaggtgttgggactactccatatgcttgagcgtaagcatcttctatatttataaattctttagctcttactaagaacacactcaatgtatcagccctttgtaagtcctgatgttagggccaccattttcatatcatcggtgatcttcgttttagcagccacatccatcatgcattggataaagtttttcaagctttctccttattgttgcttgacactggtcaaggagctaggttccaaatcatagtccttggctactataaattactttctaaattttacttgtaggtctctccagttgtggatcaatcatagagataacctcttccatcagtcctccacaaacttgcttagtgctaatgataaacataaactttatgcatcatcactggccttggcaacttgcatgatgtggttgtacttagacaaatggaacctggggtccgtaagtccttcatatagctctatctatggcattcaaaaatgctccggtagtggtgcatcaatgattcctttcacacaaggcttcatattttcttcctcacaatctgatacagccccactttggtttttagaaattgtttctgtgattttcatcaactcctccaccttacattcgaggcgttgagtcttatcacttgaagattctcttccgcaaacatgattgttggtgtggtttctcaaatcattctcgcgaggtcttgctttttctgctttggatctttccttcttagcattcaatcttcttcggagataattcgtggaaaggcttctgctactaaggtctgacaccggatgtactttgtcaacatcctcagcgtggttactggaatcgctgggagcaggctcaccattccttgaggtgcggtttcctttgcacttctgttgaggttggtcaacagctttagactttttatgctgcttggtggaa

SEQ ID NO: 296807 - DNA, 1459 bp, Cannabis indica
attgccccaagcgcaaagatactttacccaacggtctagctatgtgttttatattacaacctcagcaaaacataacattctctaatccatgtgggacaaaacaatacttgatgcttgaactatgctctacctcaaatccatgtgggacacaaaacaatgctggatgcttgaactattctcttgaacgctttctatatttatatgtctaaatcttacatctttcgggaaagaggagaaaaaagggttgtaaatgcaatgatgtaaaaatatagtcgatagttacaaacctggtagcccagctatactgctgtcatcgatatagcagcagaacgaagcttcacaccatcttcatcccacttggactctggggcagttgctccagctataattgcctttatcatagacaagggagagaatttttttttctttgtaagacacatattaatttaagggaataacgaaaaaggtctagagccttagaaagagtataacaccaggatcttgacataaaattcacaaatgaacatagcatgccctatacatatcgaatggatacttatgatatttccattttccagtgtaattgagtgaaggaaataaaatgccattcttagcttgtgactttcaacaataaaagttcatgtaaataacaaacctttccactgttaacagcagcatacaatgccacatgctggtcgtatcggccaaattcatagaagtaataagttctgaaacatatcaaaatatataaatattatttatgaagaaagataatataaaatattaatcggaaaggtttcttaagaagagtactcaataaaaaaaacattaatttgtgaatagaaatcgtaaatatcaaatgggaagtccttagtcacttataaatatttatagatacatgttgatatgaaggaaattataaggacaaataggcagttctgagaagcaattaaacaaacagggataaggtttctgattatgcccaataggtaggcaaacctttccattttatgctcagatacacaggtcatcagtttgaagatgaatttacctgaagccttcatcttcctttatttttattgttctagcggaatacaaagttgctccacctggcattgccacattgtcagaataaatagcatatgctatatatatagcagaaggaagagccaaggaaagatataaagagtcactgatttcagatagtaattgtcaagctaaaagtgggatagaaagagtaaaaacatagaccaactccgtccagaaagttgatcaaacacaaaaattaacagcaacagaaaaggaagagaaaaatgcaaacctggaacaaagattcttgctgcctctttcaaggaacctaaatctgttatgtcttgggcctgtttaattagttaaatatcatgtaagttgcacaaaattcatcgaaatataaaaaagtatgtcctcatcacatagatgt

SEQ ID NO: 296808 - DNA, 3150 bp, Cannabis indica
tatatttaaaaataacatccaatccgatccgatcacaattggatatccaatgtttgacggtcagttataattggatcgatcagttctcattgaattgatcgatttatacacaccctaaataaaacattaagtgaggttgttaattaagataaatctagtgcacaaatacaattaagattttatttatatgtgaaaaagttaagatataatttctatttttatcaaaagataataaaattacataaaattgagtttcatttcaagcataaaatcccaacacatgttttacataaaattccttacaataactacatacatatatgaatgaaatagtccacgtgaacatgattttatacacaataaatatataattatacataaacaaagatgaaaaaaaatagtttggtaaagatcaatggtacttatccattattcttattgacttggcagtggcagtggaagaggtggaatgctctgttcattcctgaagaaattttggggatcaactttagtcttcacatgaactaacctcttgaaattgtctttcccaaaatactttctaccccaaatacttgcttgtgtgtaactcgtgggtcccttgtcgttatttttacccaagtcaagatctctatagtttacatatgcacttcttgggcttttggacacataaggagtcatgtagttataaacacttctaggccaattgatactcccatcatcatctcctggtttttgaacccattgagcatagtagagaattttgtagaggtttccggctctatgggagaatggaatctctgattcagaaatctcattcattttcccaccataaggaaacaactgaaagaatcccactccaacatcttcttcatataacttttcaagcattgttttcaatacattctctggtatagttttcttcacgtagtcaagtttacctttgaatgaaaataaccattgttgagttctattaagcaagttttccatctcagctccaatagggaatccagcaaaataagaaacagactcaatccaactcatttcattgcaatcttctcttttcaaaccaaactcaggaaaactcttttccattaatgaaagaagattatccactccaccaagaaacaatgacaagaattgggcttggagtataaccttattattttgagtagaattcacagtcgagaacctaattaagataaccaaatcatcatccaacttgtcagcaatgtattgccacttgttcacaagcttcatggtctcattttggcccaaatccctattaacaatgaatgttgtcactgttgatgggacaggaaccaatctgattttccaagcgagaacgattccaaagcttgctgctccaccaccacgtatggcccaaaacaaatcctcccccattgattctcgatcaagaattttcccatcaacattaacaatgtaagcatcaatgatattatcagctgctaggccatattttcgcaccaaaggtccatagccacctccactaaagtgtccaccaacgcctaccgtagggcaaaatccagcaggaaagccgagatttcgacttttctcggcaatcctataataaacttcaccaatggtagctccggcttcaacccaagctgttttttcatccacgtttacgttgatagaacttaggtttctcaagtctattataacgaatgggacttcagaaacgtaagagagaccttcgaaatcatggccaccgcttcgtgttcggatctctaacccatgtatctttgagcagtagacagaggcttggacatgggaggcgtttgaaggtgtaacgataacgagtggttttggagttgaaggaaaggaaaattttaggttttgtatgttggagttcattacagacataaacgacgagtcgtttcgagtgtatgtgagttcagccaaaatggttgtgtttgagatattgtgggacagacattgaaggaagtcctcatgtggttgagaagcatgagtaacgataatgcaaaaagataacaatgaaaagaaagctaagtagtacttcatttttcttggtaaagtttttgcctttttggtatgtacaatatcatataagtctgccatatttatataaagttattatatgcttgcattgacagagtagtattgtatgaatatatttaatatatatatctatgaaatttcaacgcgtataaagttcagattaccattatttgatctagttaaatgcttactcggatgatgatactaccagttcaacaattataaattaatactaacaagtgtgtaatttgtttttttaaaaaggatttatctgtatatcttttgaatttctcatattatcatcttattttaataatataagctttacgtaggtactttattcttatgtaaaaagggtacgcaaaattgaagcggacaaagccgacaagaaaatattgacttttttttttgaaatcaagaaaatattgactatatatatacatataaatgaacacacattattgtgtgtatatataacatatagtagtcaaataaaaatttagtaatattattcgttaaactcaattatggtggattggtagaagagttatatatacatattatatatatttttcgagaaatatatattatatattaaaactagacggtttgaacacattaagatcacgcttctataatatattaaaatttgttaaaaaaatagctggatttattttttagatatctcttctgttcacaaagtgatattaattcaacaactaatgattataaaacatttatttagaaagacacgtaatcgaaacatcaacgaagctgaaattcttttaaattgttcaattatgcaaatatatgtttacatatattaatatacttgtcctatatatattattatgtatataaatatatttaaatacatctgatcaaacattgttataaatactagaaatttggaactgggtcagccgtatttttattattttttaattgaacaagctacgtacaagttacatgctttttataaaattatattttttattctattttaaacgaaaattcaatatcaatgaattattctagttgaactcttttttttttgaggaaaaaaactgctattataaatcaaaccagagagtcatttacaataacaga

SEQ ID NO: 296809 - DNA, 2511 bp, Cannabis indica
aaaatgtgataatctcatacacaggaggtgttaaacagtagtaaaactataacaaacaaaaaatacatgacttagtagttaataatgggataaatgcgttaattatatatatacaaaaaatacatttataataaggaatgatcatctaatatagtccacatattatataatataaaaataataacaaatttatttatgatgaaaaagaagaaaaaaaaaatggataatgtggcagtatagataatgaaatatatgctccatgatcatgcaataacattcgagaggcgaaaagaaaagagaagatagtagtggagatgggtcgttcttaatgctgtatatataatatatataccattaattatttatttatatatgtatatgtatgtagataatgtagtctccaccttccccagctgaatattaatttttgggctgtctagatcattaattcaattagtgctattgctatatatacacatatatataaatgcgttactatattaattagtttgatccagaataatgattctcaccacttgatcatacttattataactttccgtgaatgacacgaattaattacttttctttttctttatattctttttttccttttcccttgtaaaaaagtgagaaaaaagaaaaatgatcaatcaatccgtgagtgagatttattataatgcatatacatacatattcaaaaattgtggtgaacattttattttgactcacatatatatatgtgtccaacactttataaggctagctttagctattagtataaataaatactgagtctcatattcattaatattgttttaaattattaaaagaaaaaaagacttattaaaaataataaatgaaaaagtgttattttagagtctccatttgtaaaggtcacacttaatttagaacactatggtgtctctcaagggtacgtaccaggcaactttaatggaagatgaaaaaggataacctaaccaccacacaccagctgcccgattaaaattaattctcataatatatatattttcttagcccaaatatcactacaatatatactatgacgaagtaaaaaaacaccaccaatatttctatataacaacataaactaataattatatatagtactggtattgttgtgtgcgtttatgcaatattatacatatatcatatgctatatttaccatacataggagataaggatgaataaaatgtttaatagagtgcgtgttgcgttattaatcctagaaaccagtgctgtaacgtggtatccgatcatatattcttagtttctttcttcttatttatttttttttcctgaggaaataatattctttcattccttttacagttatctatttatcttatccatctttctatctatatatcttatccattgaaaataagaagttacctccactcaaactacttcaaagtaagatggggaatcaatcacaggtggctgatgttgtgaatgttgaacttttttgttttgcttttttcatgttgtactaactgcttatctttttttcttcgtagacaatatgagtcttttggctgctatggcatcttattcaaacttgaaacaaaaaattctggtgtcgaaagaatttgaacctccaatcagggaagttgtccatggtatccctgttgtttctgttgctttaaagaagaaagtcaaaaagaggagtagacctattgatgttgcttctactactcaagactctagcagagagaagtttagtactgctagtgctgatgagagaactacaatcgataactctctagatgaggctgagactggtgttccgaactctggtttggatttagtggagcagctgcgtgcacagggctccgggcttcttgcccatggtgataccttgattgattccaaggctgagaatatcctgttacaaaagttggtcagcaccaaacctccacaatatgttattgctcaaagatgcttcaccaaaatcttcgaggtaactatttttttttgtctccttcaagctaaactctcttttgtttaacatcacctgacatcattttcttatcttcaggcttgtgttggttatacttacaccatggataacgaacacaagaaggtagttgagcttgctaagaagctcaaggctatagaagatcgtgatgttgctgcaaaagactaggtgactgctttgaaggagaagattgattctctagacagtgagttgactaatctttgagaagtggctattggtgccaaagctcaagagagtagcttgaagaaaagcttggaaattgctcggaagaagactttgggtattgaagagccttcttgtcttgcacttgatgtacatagttaagctgctgctgagcttagagatcaaatcaaggtcttgaaagatcaagtaactactcatcaagttgttcttgacatcaccttctacgacggcttatgatttgatgcctattgggttttatgccctaaataaaactccatttcaatgtaatccattttattcaaca

SEQ ID NO: 296810 - DNA, 1042 bp, Cannabis indica
ttaaagattctcaaactttaatatgttgttgattgttttatttatgactaattgatcttaattctctgtacagctacaagtcacagcctcatatttgaataaggaatttttcgatatttatatataaattattcaatattcaatattaataatttaacattcattcatacatcaaaatattcaattcttatttaataattagaaatggctttataagtttttcaaggtataaatcttaattattgggcttgcgagttgtgcaggacgtaccctataaaattgttgcacaacacgacacgactcatattttttatggtataacacgatatgacccgtattttaaaaaatccaaaataatatataacgggctaacacaacttatagtgccttgccatgtttagatttttcataaagtaattaagagatagtagtgaagatccaaaataataaataaaataaaatatatacgaacccaaaaagatactgattcatgaaactagctattagctaagatattattttaatgttcaatcattctcacattcacatatataaagccaccaatgtgccaacaatttcctatacgaagttcactttaatacttgatactaaatgttgctgttattattaaaaatggttaacttgaaaatatacatatttttaatacttgccgaggtaatcagtaagtagtaagtgtttttattttattttattatttctcatagaaaaaaaggggatttaaaacaaagtataaaacaaaatataagtatatataatataattatgtacaatagaaagaacgttcacccacgaccttacttgaagcttgtacctcttcctttagttctaaggagacagaaaactatgacctttccatcaaaacaaagaaagaacgttcaccccatgtgattgtgagaagttctatataattatagaaaaatagtaggagacaattttaagtttgttatataataatataaaattatataaagtagatgagaagaaagaagaagaagaagaagagagaaagagaaagtgaatg

SEQ ID NO: 296811 - DNA, 1915 bp, Cannabis indica
gtggctgccctgacctactcattctttaatcggtaaatttgttagagatagaaagcgagtagcagcaaaaccctagaaattgatatcatgttcaggaccgtaagaacttagaaatgaaaacaaaatcataaacacagaatgcacactattatcaagctaagtacatgattgttaataattataaataaattctttactgaaaacttttgtttctgactactttcttatactaatcaacaaacgcttatcaccagagttgaattggattgaaataagaacaatgaaaaaaaaaaaaactcttatgcttactagctgagataggctataagttcttaaatcataactacttgttatctatattaggactaatcaaaacaatacaaaacactattttaaaaaaaactacagattaaatgaagaaaaaattccttagaacgaaaaataaagctacattcaatcaacattagagagcactgtatatcaaaaacatataacattccaaaatttcttttaaagagcaaaaattagagcatactgcttagtgcgtctacggctgaattgttcagtttgtgatcagaatttttattttctgaggatccaaacagaaatagaggaaagtggaaaggatcgtaccgattacgttgtggagagcacagggagggagcaggagacgatgcggaagagtgtgatggcaaaggagagttttagggtttttgagaaatggttgtgtgggccgacccagtacagagaccactggcccaggtttcaaaaagacctcaatagtacatctgttttctctcttggcccagaaacctaaataagaattaagaaagacaaaaaaaaaaagagtttcgaaatttacactaaattttgttgggataattacatgaaatactattttttaaaaaaaaattacattttcacgtttaaagatttttttttttttacatttttacagttttttatagaaacagcaagaaaactacataaaagtaacaggaaaataacatcaaaacaataacaaaattaacatatagataacaaaaaatcaacaacaaattaacaagagtacaacataaaaagactgtattttccgtaaataaaattataaaaatcgtaaaaatatttaactctgtacaaccgtatttttatatattttttttattatttgtgtatttgtgaaataatcccaattttaattctaaaaatgtcttgatccctaaatggttaaatggttaaaaatgtggcaaaatggttatggacattttttctttttcttttttttttttttgaaaacaatgaatatatcgttgaacaaaaaacaatgaatgtttgcctactaagatgaatcttcgtggtaagaaaattctcattgacattgtttgtcctttagtatcttgtggattttcttggagttgttgggtcgaggcgaggttagatttggtaagccgcaagtttcattctttttttacctgacttggagcaaagtgagtggggtagacgaggataagctgggaagagttgtgatgctttgttcggccatttaaaatcttgtaattagatagcatggaataaaaaatgatggagagtgaaagacgtggtatcgttttcttcatgaaatcttgatgaatcgattggtgctcaagttgtagggaatatcccttcccataatttgttactagcttgtgatggggcagagcgttggacaaaacttgtgatgaatacaattaagattaatgtagatgcgactattttttaggaagatatgtagtttggttatacttttgtggttcaggaattaaggggagagtttgtaacgtccccgctttaagcctctattttttcttcccccatagatttatggttcttatacacgagtacgtcactctggctgcttcctgttgggttttatgcc

SEQ ID NO: 296812 - DNA, 2673 bp, Cannabis indica
tgtatttgtagacctaaataaataacaaataccaagtcctgtccagatccgaacaatattgaagatatttacgaaaatgtcactgccatacaaactaagcatcagcatgcacaccaccatgcgccaccacttgaccaccacttaaccaatttatgagcatcacctagcttgtaacgtaccatcttggcacgcaagttacactatatatagtattacattatgcttaaagtaaataagtgatgtaaaattaaaaactagcttacttaataaaaaaaaaaagtactctaatggtatgtaaaaaatttaggggacttatattttcaactcaaaaatatataaaacaccccatatttaagtttatcctattttatttttaaaaaaatatatatttttataaaacatcctaattttattagaaaattagttctgtaagttacaccccttatctagaatacactctacacctcacatttttttaaaattatcttattccttcacctccttcttaatcttcctctttcttaattgaaaaatgtttaaccttcctcctaatatcttcctttttattaacccttttagaaaaatgcatgtgaaaatggaaacaatgcataattattttttttgtccccttacaaccaaagagatctgaatttgttgaattttagaaaatattacactcaccggtaattagagaaaaagaaaaaagttgagtatataaactcaatacattaatatgcttaatacactaataaaacaatgataacatcactcactaaaacaatgataatatcagctatgcatatttatatacataatcgtatacagtaataaattcattaatgaaatttcaagttccatctatgaaatctctctttttcagggattaaagattgatagtgtaaattttggattaaaattggttcaaaaaataactcaatattatatttagtctaaattttataattttactcaaatatattagaggtaaattaactttattttcgataaaaaaaaaatatataaaaaagtcaaacaaatacattaaattttgattaaaagtataaaaatctaattaaatatataaataaaatgtaaaaaatcattaaaagtactaatgactggccaaagaataaataaaagagtaacatttactatagtataaaatttgactcatgttatattttgtgctaaatttagcataacttttagcatgtgtcaaatttagaccacattatataccaccattagagtttaattttatgaacatggactgcaaaatatatgtacactatttttatagcactctatttgagatgctctaataaatttaaaaaataaaggtgtacttgttgaaaataaataattttataaataaattaattttaaagatatctactttaattatttcacacaaagataaaaatatcttaaaaattttggggtatacttataatactaggggagtaaatataattcaattaacccttcaaagggctcgcccctgttcctctgtgtgaattccttcacctgctctgaatccttcacccttttgggttatgctctcgctccgtcaaagagccttctggtgcatacttctagagcgcgactgagatagacaacctcttggagaaaacaaagaatctgaacctcatggcagaagacgattaggagattgatgactcaagtgcggcagaggtagggaaactctgcttccttggccgattgtgtacccagtaggaattctgtaagtcccttcttaaaactattctctgttgaattggaaattgactaagaaagaatgggattttaagttcaaagagaaaacaaaccaggcgatattcctcgtacattctttcaaggacccacaacaattagatcatgtgttagctaaaatgtcgtgggtcattcaaaatgagttcttgattctcaaacggatggaacgaatgtcaatatgttgggaatctaaattgttgttgttcctattggaagggcgagtttggaacctccctattccctcaatgataaagaataatctggctcggttaccaagtatggtaagaatttttcggtcaatgaacttgatgttcctaaaatggccgacagtggatattttttgttcaaggtcatgagctccattcgatccaagatttgtctcaaattctcgttccctttaatggtggtaaaatttggctccaatttatatgtaaatgattacaatttatgtgttttaatggtgggatgatgggaaaagagggtaagcaatattcgaaacaagtggctatggttgagaaagaagtgggcaatttgactcaggcatatgggactcagctagagatagatcctcttctcgatatacgggggattagttcagtaggcggcattagcgaacatcattaagttctctacagggaaatgtgtctgggaagggaaagaccttgatagtggatacaaagcttccagggagaatcattatctctttgggactctcagtacaagggatgggcataagatgggagataaagtgatgtttcaagaggaatcttcagggactaaggtcatctcgatgacttccagacaattgatagagctaccaaattctgagtctcctgtggaagtgtcacgacccgatccctaggtcgtgacaaatatgtaatatccataacttgggtggtc

SEQ ID NO: 296813 - DNA, 3234 bp, Cannabis indica
aatagtattttgtgtaaatttctaatttgtatttctttattataataattctacactacatctcccaaaaacgttatacatattctatctatctattttgttttctaacttcaaaatttaaacgtgtaatttctagttatttagaaaaccatataaatctttgggtaagttcatacactctgtttcagttgtttttatctgtttcggtatttaagagagttttttttttagtctaattttttcacagttgtgtacgttatagatatttaggaattttttaaaaaaatcaagtagtttacagtgtaaaaaataaatttcacatattttgttgcgtgtgcaattatttttcttataagcgtataattgtttaaactttatttcggcgccaaaattattcagaattttttaaaaatttataagtgttcctaaataattataacgtacacgatcataaaaaaaatatcagattaagaattttttctgaatgtcaaaataaataaaagatttaccgaataaaattttctaaatctttgaaaagttctataaattattcaaaatatttttctaatatatctctactaaataattgtttgaactcaaataaaacaacacatcattcctttaaatattttcttctttttttttcaaatgatttttttcttatatgtatattagataattatttaaattttatttttgatattataaattatttttaaaattctttgaaaatttactctaaatataactatatcatgcattataataaaaagaaatagacagaaaacctttcttaaatgacaaaacaaataaaaagtgtaagagatggatttttaaaaggcatactataaattttttcatttaagtaagggtaaatacttttttagaccctctgttttgcaaaagttacagattgaaaattctatattgtgaaataacaaaatggactttgtattgtccaaatggtaaaaataggaccctgactttaaatttcaacaacttttttttaatataaccaatttgaagacaattcttaacatgaacagatacaaaaaatataaacagttttgtcataacacatttagatcggaattattattaaattttattttgacaaaaatcggttcagaatcctatttgtactgaccttaaaagttcaaggacataatttattacatgtcaaattcaggtggcgaaaattctaattagtctagctcaaaattgaaaattaatatgtttttttttatatcaaacagcttaagtaaactgaaatatttgcattgcttcatagaccttaatttttttttttttcttttagcaaagaagcagatcaaaaaaccaaagttaagattggagaaaggttctgaagtgcttaccatcgctgggatcggtaaacgaagacatcgagtgaattagtacagagaagaaacccaaaaagagctgcaacgacctacctcccatagctgcagtccaagtccccccttaactcaactcaactctcaattatattaacaagcagttgatatactcgtttaacaaaaacgactacagaaacctaccaaatttcacaaaagcttaaacatttttccatgcatgccaacgtatagtcgattattacgtcaacaaaaagtagaagaaagtgtctatctaaaaaggtacctagggagatagagagagatagatagatagagtactgatgtgatctatttaacagagggagagagagagttaaatgattctgctgtttagttgtatttattatattatgttatgattagttctttgagttacgaaagtatataatatacacaattataatattatagttgttgatttcaagaaaaaaaaatatgaaagttgtatcactcagtcataaccacttgaggttagttggtattggggtgtgtgtaggtgtcatggatccaatatttataaagacacttctaagaaaaaagaaagaaaaaaattgtctgtcaaaatgtcaatcaacgtttttattgaccatgtctcagcgtttccttggtctaccgcggattgtccaagtaagtctaaaatgatcccccacatgccaacttgtcttccattcagatgatacaaggcccaagcatacaaaaatctttcctaaacaaaaaaacatgaataaaataggctacttatatactaaaaaaagacccaaaattttaataaatactaggacacagtagagtttacatttatactgttccaatttattttttaacttttatactgtggaggagcgcccaaacaggactattcatcttcaacctcagcagccacgatcgacagccacccaacaatcacaaatgagccagaaaacaaccataatatccgacaatacaaggcgactttagaatgatgtgaatcaatatcacaaataaccttgacaacatgctaaaatcactcgaaaacaaaaaatagaaagaaaactcaaattcattaacactactataaaaattacttttcccaacgatttataactatcttttataaatctaaataatgaacaattaacaatgttaatcgattgttctgataaaaactaaatctaaacaactaatggaatcactgcagatctgatataaatagttggaggaaagtatcaatatataataattttggaattgacattttttgaaatcatgtcaaaattatggctattctttcttctatataaattatctcttgatccgggttgttttggtgttgtttgtgaataataaactaaaattcaatagaaattactaatataaaaaataatgagatatctcttgataacaaggaacgtatttttcaaaacaacactatagtgatagttgttctaatattattttgttgaaacaactttgttgaaattttgttgtattgttaaatttttatagggcatgcaatctatactagttctaataaagagcaaccgaaaattcatctctaaagattgcaaatatgaacagctggtatacatactaatgttatcattggcatgcgataccacaacaacatgttaacccaaaatatgttttcaagagggggtgaattagaaatataaactaatttcggtaaattaaaacttttaacacaaaactatgtaactaaacgcttaatcaaataaatgcaagtaatatagcaatcaataatgtatagcaaataattaaacttgtaaagcaaagagtttaagggtaagaaatcgcaaactctcaattttcacaaggttcg

SEQ ID NO: 296814 - DNA, 804 bp, Cannabis indica
atataaacgcttaaaatcaaaaaaaaaaagatttgtctttccacaccaccttatttagggatttctttatagcctaacacataatactaatctcattttgtttgagaaattttataaatattaattgaattaaaatgttaaacatcaaaatttgaagccttataataataataatagtatcaatctagaatctaggaccctccttttttagtgtgtcctcttcaactaattttaaaatataaattatatattaaaaataaaaacaatgaaaaaacaccttaatttgacaggatgcatgagatcaatttctaactcgatggcccaatgtaataattatagtgatcgagtttatgttttagttaattttttaagtttagctagaattaatagtttaattatgttggacaagttgattatcttttctaacacccctatcaacttaatttgcaaaccttttgatctcgatacaactagcataaaatttgagatagagttttgatatttgagagtaggaagaaaaattacaacatagagccttctcctaaggtcttggagagcctaaaacaaacgtgtgtacataaataaaaaaaatagaaacttacaaaaatattagaatttgggttaatttttacaaaaatactgtgtttttataaaacaccagtaaaacacaaagcagtataactcaaaacaacagtagaacactagtaaaacactagtagaacaccagtgaaaacttaacacagtatactgcagtatgaaacttataaaaaaacacagtaaaaaagtaaaaaataccgcctgaca

SEQ ID NO: 296815 - DNA, 2226 bp, Cannabis indica
taacaatattaacacatagaaaagtactataaataatgtactttaacatttctcataacatatatactcttttactctttttgttggtttatttttgtttgcaatggaaagaggacataatttttaatgaaattaggttccaatcaactttctcttttacagctgtagtcattacttttggaggctcaatttgattaatttgttcgtagataattgcatttattgcatattaaattttgcagcatttcaaaattttgaattctcttctatatattttattatatgtataaactagagaactaagttgcgtctcgcggtgttgttcaatatttgttatttttatattattttattttaatattaattaaatggtataataaataaaatatgacattgaaatgttagaattataaaagataaaaaaaaaaaagtaacatgatagaatgatagaattttagaaataaaatttggtattttacaaaaatatgtagaaagatgtaattatttttggcaaataataaagaaaattattgaaataacataaaattaaattgtatgtgtattgaaatatataatataagatgccacttttttttcttttatataaatatattgatagacaaatagataaatatagattaatgtataaaagacgataactacatatacatatcaatatcaaattttcaatccatctaaatgaaatttctagtagatttgttttggataaattaaaattttttccaacatcatgatattgataataaattttcttttattactgtggtatggctatcacattttgctccactaactataacttaatctaatttattttattataatttacagaagaaaaattgatgactcctatgagtaatagtagaacctaaaattatctctatatcttgttaattttttttttttttttgataacataggttatatatatgtattataaaccttttattagatatagttgcttaattattaccttacatattacattatattataattattgattatattaatgatataaactgtacaaattttattaaatagttattacaatacacatatatatacaatagaaggaaaaaattatagcccattaatttttgtaattgtaacttttttaaaaataatttagaaagaacccacaaaatataagaaacaactcaagtcattttgaactttcaataataaaatacaattatattgattaatattaaatattaataataattagttactaaatataaaactcaagtctttttattgttaaaaaataaagtgtgttattaatatagttactatttttttttattgttattaattacttgaatacttgatcataattagatagctagataatataacataaattttgagagataagaactaaagaaataagtttatagaagtttctacctagatgcttttgtgttaattttatttataaaaaatactaaaattttatggtaatgttaagtaaaaaaattcaaaggaacaaacacaataattatatgaaaatcagcatatattatgtgctttaatatcaaaactcctgcaaaaaagtaaattgtaataaaaaaaaagtccttaatttttagtcagtgaaaaaaagaaaattactctcagtaataaattattattttgtttagatcttcgtaggaaggttatcgagcaaactattttactctttatgtaaggcctacaatgacaacaaaagaagaagaaaataagtatgtacgtattattaacatgcatataaaatgtaatctatatatattgtataaaacaaacatgaaatcaactaacacttagaaaaaaaaaaagtacaccaaaaattacagaactatcaatatggtagaaattgaatttattataactattttttctctaaaaatctacaaatttatacatgttatcccaattttcgtactctaacgtgacatcacatcaatggtgacacgtggaatccacttggaacatctgcttgggaagcatagtccgagcaggatgcctccctgacctgcccagagcaaagtattcagcaatccgcgcagagcgaccaacacttagcgaattcagctttcgcatcgtgagtcatcagcataatccctataactcagggatcaatttacgtggatatgacatacacacgatcccactatcagtgtattcaacctcaatcacacgatccttgcattcagcattgat

SEQ ID NO: 296816 - DNA, 5211 bp, Cannabis indica
aactataaataacagtaggacaacaaaccatcttcttcctctttctctacctatccattgattgtactctcttctctgttttattaacaataaataaattttgtagtgtagagctctttgccatatccgtttatcgagcagcagcagtagcaagagctaccctttctctccctcgcaacctcgagagggtagaactccatcgctaaacacccttaaatgaaagcaacataagttgcagaaaagtaatggggataccatacccctcactcatgaagaacccattttcccatagttttcatcaatagcgatgtcagctggatctccaatccacggtcggccttctctccatcggaatcttatccttaacttcccgttcgcatccactccaaccacctctcccttgcttgcatgtgtctccattccccaaccccaacgaggggtcgccagcccatctctaatctttactttgtccccaactttgaatggtctaatccattccacttcccatgccttgcaaagccacagcctttccgtgaagcaaaatgccaaccataggtccccatcttccatgcggtgaacgactccgatgcttgaatgatttacctctccccattgatgcgttggggttgacacagacggtttgaccctaacccaatctccaatttgaagctcttgttcctcctctacttcaacttcagaaggatctagcatccaagattttgagcctgcaggagtatatattctcagctttccatcagcatcgattccagatatagttccaatacttgagtggctgtagccggaccagccaaatctcgggtgctttacagacactttaactttaaccttcttaccaactgatagcctctccactctttcaagatgagaagttggccctatccatttttcttgctctccacaaaacccaacaaaagtggttccatcccatacatccccttcataccctagtccttgaaccacaccaacacttccaggtccaatggacttccagttatttgcatcatgtcttaatcgaacccactctccaacttcaaacatctgctcaagctcgaggtctgcaggatcacctctccataacccaggcaaaccgaaaaaagcaacccttaattccccatcagcatgaacactggttatgatgcctctagaatcaggctgagcccctctccagccccatctaggctcagcaattccagtccgaaacctaacatgctgcccgactttaaagcacataaccttttcaacatcagtgtaatgagtaattgacctacctttacgaaaacagcaggctaactccagataacccgtgtcttgtatgctatgtacaacagcataactttcttttccgatgctattccagtcataacttggtctggtcccaaggcttggttttgaacggacccaatctcccacttcaaaacctgaaagcctttccgcatctcctggtgaaactttccacaagctttgccgaccagcaactttcacctatatgaagtacaaaatgctcatcaacaataaaaataaatagataaataaacacgtgattgaaagcattaatacgccgatgctgcaatggccatttagtgagaagttaaagtagtttctgtctagtcctttgattttagcttttaacaccgacaatggactaagaccgacataattaaacacacaaaatgagactgagacatagttgatgttccgaaggaaacttaaactctctatcttgtatcctccctccatttgacatttgttgcaaaactacctcaaactctcttctgttacttacaaactctcattgtttttatctacgacaattagtcataacattcaatgccaaagaccaaaaattacagacaattttcatttaattatttataaatatttttatataatctacctatttatttaacactaatgtttagccttatggaaaataaaatgatcactaaggaaatcgctttcctgagaataaaaacacaaatctttgaaactttcttatttgaaagcaacattggccacaaccaaacagcccctcaagatgcaatatatttttcacatattcttaccattcctttttacttattttggtttaacctatccaacaacataattgatttttctaaaatattataagacggaaaaacatagaggaactactctctactactcatgcatgatatcatttataataatagtagacaataatacttacattcaatgttccatccatatcaatcctaacaatttttccaacagtggctggagattcgtttgaccatccaagtcgtggctgagttacagaagacataatgtgaatttcttggcccacttcaaatgcagacaccttctctacatctgtaacagaacaacgaaagggcttgttcctgaagcagaaggcaacacccatgtcagcatcctcctctaagctgtgaattattccaatactgctccttgttatgtcatcccatccatattttggggagggtactgaagctttcactcggacccaatcaccaacctactcataattgatagaacagttgtatattaaaattatgttattaaaaaaattattcttaattaattaatctacattgtaagaataacaagtgaaataaatcaccttaaagtcttccaccttttccatgtctgagggatcagcttgccatggtattggtcgatttggtatttcaatgattagaagaccatcactctctatttcacttattcttccgacactatgatgagtctcaccaccccaagcatacctgggttctgcaacagatcgcttcacacatacacgatccccaatctaaacacaatgtgtcagagcaagaaatacacaactaatcttacagaacgctaaatatacaaaaataaggacaataaatgcaacaataccctgaaaggagttacaagctcaacttcctctggttcacagtgccatggacttggaaggtagctcaactccagcaacagactgctatctggtctgatacagtagacaataccaatactcccaggtgttacagagcctagtccatgctttgctgttgttagagtaggccgaatgcgaacccagtcgccaactgtgaattcttcaactctttccatttctgcaggatcagctttccatcctctggatgccccaggaaacccaactcgtaagataccatcatcatccacgcatagaacagttccaatgctgtctcgtgactgaccacgccaaccaaacctaacaaatgaacgacgaagtcacaatctaattagaatacacaagtaacgtgggtagcaaagaagcagagagaagatccacaatgtttgaaatcattcactgtatattctacttctaaagtcattcaaactgcataatcaaaactgcttcacaacaaaaattagccatagttccatttatttaacacatcagagttaatgatggagatagataattcactactccatacaaacaagcattcaactcctttttaataaaaataaataattttattggaaacaaggggaatcgaagaaaacattagggataatacaaaaaagaatactgggatctgcaacaatttgtagcacacgaaaaaaaaaagggactggaatcagaaatagccaaccaaccaaaggtaaccacagaactacttctatttttacaaaatcacacagttggaacaaacctaggctcctctacttctggtttaagttgcacatgttgtcccctgtccagtggaatgacttttacaacttcctttgctaaaacacgagcctctccagagcaaaatgacacaatgagattgtccttgtctgggacaaattggacaaagccaacacttttatgttcagcatcttgccaaccatatgttggagcggtgatgcttcttttaaatttaacccaatctcccacttcaaatctaaatcaccagagtgcacacagtactgattaaaaatccaaaagccgtgtaaaaattcaacatcaacacaatgacaaaaaaaccctttacttttctactcacattgttggcgaaagatggactcccctgtttacaagtgcctccatcaaatcctcagaaatccattcccgaggaagagcctccaaaaagtcacgtaatgtgctgccactgtcaccatgcaaaatgattgtaatcagttcaattcaaaatgattattgacgaaaagagagaatacaaaagatgacaagctgtcatcaacagttacagccaaatactcagacctctaataaaatctgaaaaaaagactaaatatgactgccttgccacattgttgcatttttagcatggaagtaataccttttctaaatacacaaacaatacttgaattctttttaagcaaaaagtaccacaggggaagaagtgggtcgggtggggtgaggagagcagaaactacttgtagaaaacccattaaactacaacaaagtacaaactattcatccccaaaaaggaagaagataatatagacttgaaaaatgataattccttttatttccaattttatctttagttttcttttttctttctgtttcttgttttgaaaagagacaaaggtcacatgtccatgagtgacctaaatgtccgttaaaaaattatctttctactgataatgtatccatataaaataatcaaacgaaatcaataagcaatatgaacaatcgccacttacctgttatttctgacttctacagcagcatctgcattccgaagcataataataagccattctagattctcacgtatcattttcgctgcatctgctgctatgtggaaagcattctcaccttcatcatccttgaaaaacgtgtacagaaattgttagccagcaataaaactaatcacattaaataaaaagacagctgaaattccaaataaatgtgaagatatatgagaaaagactagaacaagaagtgagcagacaagtcacatggcaatgcacaatttatctgaagacatatagtgaagctaatgcaatataatttattttatttatagaaacaaaacctcaaacttgtacaaacatagaagatgatataggattaggatcacctaatatatcttttattaaagaaaacaattgagatttacaaaaaaaaaaaaaagtgattgaagacaaccaattttaaacactagtttgaaaagaaaaaaacaaaaagcagcgagagagagagagagagag

SEQ ID NO: 296817 - DNA, 2496 bp, Cannabis indica
tttttttaaaaaaaaagataaaccaagtttttcacattaatttaagtagattagatcaatcttgtcatcaatacgtgcgacatatacatgaaggaagtaataaaaaaaaaatgtcacaaagcatgaataaggctatgtttggtaaaaatggttgaagataagaatgaattagaaatatatttttgagataaagatgaattcgaataaaactttattaaaattattataattttttttccttattatttcctttgaaaattattcctaccatatagtaatcatcgtagctacacaccaccaaatccatccaaaaatagttctcacatctctctctttcctcccatttttttcttcctagctaccaaacacaccctaaaggtcaccatatgatttaataaattgtatgcatatcttcaaacccaggtttcccccaaggccaaaactactcagaagaacatagtttttaagccaaattgtataattcatcgacttttccaacacacacgaaagatgagttacaataatactatatatatatatatgtgtgtgtatacgtactcgcgtaattatcaagcgaagatagagaggtaataatgcaactatttgggttatatgaatggagtggtcagatccattgaacaattttctttttcacatttggtatacagagatctcgatcatatatgaatgatgtataatatatatacgtaattatagatggatgatgataattataaaagactcatatagtacaattaccctttggaggcatttgaaaaacattacttaaaagggaatgaagtccattattatacagcctagaaatgacttcatttacaacaatcattagcacatgacaagggtgttaggaaaaacaaaactctttaatgatacaaggaaaatctcataggtgggctttcattgatttcttttgcacatgaaagtgttaatagaagttgtcatgtaattacatcatcaatattcacactacgagatttgagctaacctagcccaacaacttgttcaattaataatattttagtagagaattaagttaaaccttttttttttttcttttttctttttttcatttactaatgttacttcataattttaaaactgtggattttaatcttttagagtgacatatgtgtaagtttctctattatgtacaatttcactttaaaatatacccattgtccagctctatatctctaattataggggtttgtgataagtacaagaaatatgtgatcaagttgcctattattgagttgcattgacaagcatatgagatcagctggctgccctagcatacatatataaatataaataatagggatttttatatgatataaaaaattttattttttttatgtaaaggtaactaattggttttgttgattatggttacaagtttcgtcatccgggaagctagttggtactccgaaaagaagttacatgaagcttagtgtgcaactagaaagcttttttcttaaagttgtggccagtgcggatggttcttctagatagcttgtctttcgtaaagaaagtcttccagatagcttgtcataagttcgaagatgtatttccggatagcttgttatcaatcttaaacgtccatctagagggagtgcttgtattcatccggatagtctcgtccggattgactcttctaaattgtccattcaaaaagtgcatttcttaagctgacgtaaaaatatatgttgttgacactgacttggaaaatttaaggcagcattaattagtcacgatagaattggatctaattttaacaactatggaaatctatatatatatatgtctatcacttttgtaatccatagtaaatcaaaccattgtaagcttgagagaaaattgtgattgtgcaaagttagagtgagagagtctaaactagtgagagaaagttcatcttgtaatctttgtaatagtttgaaaggattattgtaaccttgaaaacacagatatcaataaaaatatagttgttgatgttccaactgagatgtagagcattgtacaaggctcaaactcgttaaacatggtattgtcttctctctattttactagtttaatccattatttggttcttgtgattctttaagagtattgttcttaacttcatgtttgttggtccagtataattacatcgtaggtcattgattgatttagaaaaaacctatatcagagcttggttcgtaatcatggttgccacgaatttatgaatgattttggattatggagaatgaagatgaaggctctgttggtttactaatgatttatgtcttagctaattttaatttagtcattacagaaaatggtcgaattatttattttagaaactggtctttgatttaattaattcaaggaattggtttttaatttagttatttcaggaactggtttttgctttatgttagagtttgactcaaattattatttctttttttatttatttatatttataaagttgtaatt

SEQ ID NO: 296818 - DNA, 3595 bp, Cannabis indica
tagactttgccaaatgccaatccagagtttgagcccatgcttcatattttaaaagagcttccttaaattcattataaagaggaaaagcatactcacagttattcctttggagcgagccgcagcaactgactcacgaaggttgttaacatcgagaccccaatttgcactctcctctagataatatggaacaagagaaccaccgaatagagagattgctgctgagtagagtgggtattgcgggactggaaccaaaatctggtagaaaatacaaacagtgaacatgtaaaagaaaagttaagccaaggaacaaagaaaaggagaattatatcatgtgcatgatttattttttcttctacaaagatgaattaccccatccccgtcaccacgtatgatagtatttaatatctgcatcacacctttgctggcaccatcggtgagaaatatgagttcaggatcactgtttacacagaacaaacaacaaaaactagttagtttataactagagagcccaactaaaagttcaataagttttattcagaaatggaaaataatagaagatgagattatgaccttggaaacccatcacgccttccaatgaactctgcaacttccttcctgatcccaggaagacctcgggaatcactgtaggcacctagaaaagtaaagaacaacaattttttatactatcagtttatgaaatggagctcttcacttttaacaagtgacaactgaatacaaactccaaatctatgaaaagccagttacaatcaaaggtttacactgaggtaaataactaggagataaatatgtcggaaatactgagagtgaatcctaaagttactaggaacatagagaaataaaagtacctagaccaccggaagtcaatgaaagataatgcttagctcttgcaattgcatcagcaggaaagaggagccccacattaggatcatccaacagaaatggagcttggcataatgcaaccacctacaacaaccattatttagtcaatttgagaataaacaaaacaaaaagataatgattaaagtagaaatattgacgaacctggcgagggaatgtcagtggcttctgtcctagagcgtgaggattcccaacattggtgaagataatctacattatgtgaaatgtaaacagtaaaaattgatcgatttcattttgaactctaaactacaaagacaatgctttattgaaaagcaatccattccaatttttatatcaagagcgaaaatccatttaagggagcgaaactataccttctttccttccttctggagctcagatgctcgaagatacagctcgcctctaacagcatactgaaccttcttcacgttttcattcagtgattcatagtctaacgccttgagcggcatggtgatgatagtttaaattcttaaagtgttcaccccaatacaaacaaggaactaaagtagcaaaactacaagttccttagctgaaacaatgctgaaagtaattacagtaacaaacaagacaggtcccccaccaacagtgttacagtcacatatttaaatataccaaataaatcaaacaaatcgttattatcgatgtttcaaatactcacgattattatgacaaatttcacaaaggatttgatcatcgattaggtgaagatgacagaggatattaagcaaataaaagcaggttatggggtaatctactccaaagcctatgatttgaaccaatcaaaaggagattcaattaagagctacaaattttatgctaattatgatttttttttctttaaatttttgacatgtacgttcccaaactttttagcagttaaaaatttcctgaaaaaccataattgttggattcaagaacttttgtctaattccgtttaattttactcctaaattttattcagtacttctaattccttttcccatagatcagtcaaacacaaaataaccatcaccacccagtattaacagaattacaaaccccatataatcagagaaacatgcaattttatctaagagcacacaaagcccagaaaagttccaaaaagaaatgctttttcgttatataaaacaaaaataagacaacccaaatgctcgaaaacaccccatatgagtaatcgagaaacgataacaagaattaactcaatctgacaaaaacccatttaagcttaaaagccaaaacaaacaataaaagggaaaaataactcatacccaactgccagtccacaaccacaaacaacagaaatcaatctaaaatttaaagcagatacctttgaacctgaatatgggttcacaagactaggggtggtgcttgcttgctcctaccgtaggcagagttggggaatagttaagagtttatagtctgagtctgagtctgaccgcgcataaatataagtatgcaagtgttgtcacattaaaatgtggcgtacatgaatgcattggcagcaccagagccactgaattatagtaaatggattattggtaattttgcccatatatatttgagccgaaagggataaagctctgaaaagaaaatgtggtgtagcttcaaacttgtgagttctggtagataacgagactttgaggggaatctcctctttctttctatgtgacacaataaaatgtttttattattaaaacattggagtagcaattagcattggtcccttcttcctttgatatttgattgcttgacttattttatttttgaccatatgcaaagtagtagaagtaacttcttctacatatttattgttgcatatttttctttgttatttatgtatatatttgtttgttttgtagtgggttcttaaggtctaactctaactttggttaggttacaccaaccctttaaattgagtatactaatttggcttatatggctcattatcatattgataatgtttatagttcattgaaaaagtagtttttacagatgataataataataataataataatgaattagagaaaaagtgtgtggtgttttagatggaaatgtggaactctttggtcatatatggggaaaaaatgctacattgtgttataatttatatatactatataatgttgatatccagaagattttttttttctgtttttcttgaaaagtatttggtaggctaagctaacgaggaaaggtctctcaagcttcaggaataagagcaagcaagtctagttttgttgtgtaagtcactgtctttattcgatctaagttgatagatttgatacatatatagtaaagaaaagctcttctgcagggaaatttcctaattttgaacgaaagaatagtaagtttctttccttgctacttgaaagaatgtcttaccacactcatactagaagtcaaagaaagtgagcctgcacaagttgaattggtttcaaactacttgtttgtgtttaatttttctagctttcattattaatttttttgtaatggattaagatatagattagtaggataattagtattaattattattatttgatgattatatattaatattcatgatgtgggtcttatttttaaaaaaataggcatgagatttataatcttttaattttagagatttttattaaactctaagtgtgttatttat

SEQ ID NO: 296819 - DNA, 5588 bp, Cannabis indica
ttaagtacaaactcttacaaacaaattttgtgccaagggctgtgaagaaggtgaaaaaggcaaagcccgaccaagaggaggtactcgaacaggagaatctaagaaaaaaaaagaggaatgcccatctaagtagccaggcaccagttgaacgttctatcagaattagggagaagcctgatagacctgcttgaccatccgccacagtggagagaaagggaaaagtcgttctgacggagcaagaacaagaagactcttcagacgataaacctccatccctgcttgcttgggaaattgctcctgcctgtgcgcagtgtatttttactcacctaactatcatccgacttggcctatattacacttgtttctaaccttcatgttttgttcatgtgcagctatgtctcaaaagttgttccaagctttgaaaaataggtcaggtgatagctctggatagaccccttcgcccaaacaaccaaagggtgatgaggtaccacctatggagatgccgcccaaagataagagttcggtcgagaaaattatcgatctttctgaagaggtagcacccgaggtggagccaccagccaagaaggcctccaaatctaaaggttccaagggagatagtttggatggatctggtccgatcaaatcctccaacactgccgtagtgctaagctctgaagccaagaaaggcaaggagatgctttagtaccaccacgaggttacttcccgaggtgagtgatcagctggccagggttgataatgagatgtctgtggagcttctgatgggtgggctcctgaaggaggcaactcgtgtaagtattttcttcttggtttttatcctgtctatttaccagtgtaggttttgacaatttcctgtgcagctcaatctgaagttggcctacacttactcccgagccaaatttgttgccatgaagaatatcaccaccaccaccaatctacagaaggagatggatacggctaagaaggaggttgatactgtaagggttgagctgggtgaagtgaacaagaagattttaggcgccaacaatagattgagaagttgaccaaggaaattcaagagatgccatctaccacccaactcgaggcagacaacaaggccttatccaagcaggtcaatgagcttaaggacgagagggaaggtctccgcactctctttcaaagttaaccaaggataagacggacttggaagaggacatcaaatctaggcaaatagggaagatcaactcttgaaggaggtcaaaatcttggaaactaccaccttggaagttttctatgaattctggaaggcaaacccagaaggaaactttgattacctcggagataccaaagaggcatatcttagttaccgtgtgggtcaggcagccaaagaaatccttaaggcagccaattccacagccctaaccgactagaacacttagaccttggcccctaccgaccaaaatactaagacctcagcccctactaaccaagttgatccatacaaggagcctaggactcctgcagtgtgaatctcccttttttcatctgtatggcacatgggcctttattaaagataatatgaccgaccaagctgtttttaaacttggtaatacttcatttcattttgagacaactaggttactgggcagcctttaatccttggtttataccgtgcttttgtcatcttttaaatgaatattttcccttgtttaagtaattgtacgtgcaaaccgttatattatttttttgagcttgctatttacctttatatttaccaatgctttgtacgggtatagatgcctcccaagtgacagagaagacttatgactcttggtcacttgcatttcacaaattcaatttttgtttgttcggcctttggggtcgatcaaaccttttgtacgcattactggtaaattcataatttgctaacataattgacacaattagaatgataattaatatctttattcatttattggtcagaacaattttgttgccgtggtaacttacatttatgaaagctattaaatgatctaactgatctttagctaatttaaacataaacaattgcactttttatactttaaagatggtcatccgacctgagtactagtcattttatctaaaccattgagtgtgatccgcctagaagttcatctacttaaaagtaaatgttatagcattgtgtacttcaagtcgtcgtccgaccttgtacacttactgttagtatttcctcaaatgttccccattctaataccttggtagtagaatgatctctatattttcgtcataccgcccaagcttatacgccctcgagtctgtaactttgactacctgatatggtccttcccagttaggttcgagcacgccagccaagctatcttttgtgtttaggaatactcttctgaggaccatatctcccacaaagaatttcctcgccctcacttgcttgttgaagtatcgagccaccttttgttggtgcacagctaactttaggtttgttgaggcttgttttctttaattccgtcaagtgattctgctacgagatcatgattagcttcttgatcataggtcaatcttctgtgggacggaggttctaattttgcagacaacatagcttcataaccatgtgccatagcaaactgtgtttgtccagttgctatttttttttgttaggtatgaccacaatacttctggtagttccttcggccagttccctttagcttcttcaagtcattttttcatggtgtctttgagtgtcttattgactgcttcaacctgaccatttgattaagggtgtgccactacggagaaactctttatgattccatgtatcttacagaaatctgtaaacatctggttgtcaaactatttgccattatctaaaatgattttgtgcgagagtctgaactaacatattatattcttcaccacaaagtccaatactttttagatgtgattattgccaaaggctcggcttcgatccattttgtgaaataatcaactgcgaccactcatactgtaccccgcccttcccttttagatgtccgatcaggtctattccccagatagcaaaggccaagaattttgcatctgaattagctcgttgggaggtgcacgggggatcttcaaaaacctctggcatttgtcacatttctttacatatgcctttgaatcttccatcatggttggctagaaatatccctgccttagtattttctttgataggcttttccttactctgtggctgccaccaatccatcatgtacctaagacaagagacgcacagcttcttctttcgttacacacctaagtaatggcatggagaaacctcttctattcattacaccttctattatgatgtatcgtgcaacttttctcatcattttctgagcttcgatctgtcatttggaagttctccagtaatgaggtaggctgctatagctgtcatccagttcagtgttgtgtctatcatctcaatttcttcagtacaattgatgctgggctcttctaagaattgaataaggactagattggccttatctcttactgtgtttcttgtaagccgggctaaagtgccaacagttgtattttcttctcttagaattttcttgagggtgtaacccttgaattgtgggagcaggtcttgtatcttgcttagataagccatcattttctctctccgagcctcgtactctccttaaacatgattcactaccaattgtgaatcactacagacctcaatgtattcagcatgcaaatcttgagcaagttttaagccaacaatgaaggcttcatactctgcttcgttattggaggccttaaacccaaatttgactgctccgtgcagatgttgtccctaggtgtgacaagggaaatccttgcaccagaaagtggatctctagcagacctatatacgttcaatttccaagtagctctatcttcgttattgtctgggaagggttcttatactggcttcgggttgtcccttatgctgctttcttctttgcccgtgcactcaaccattaagtctgctaaggcatgtcctttaactgctgtttagggttggaagattatttcgtactgacccaactctattgaccatttaagtaaccgtctagagacgtcaggttcttacaatattttgcgcaatggttggtcggtgtctacccgaacagggtgagcttggaaataaggccttaacttccttgttgctaagattaggcagtaagtgagcttctctatcaaaggatatcgtccctcagcttcaacgatcattttgctgatatagtaaactggatgttggacgttgttctcttctcttatcaacacggtacttatagcatactctgtaacgactaagtatattcctaactcttctatgtcagggggttttgagagtatgggaggctttgcaagttgtctttttaattcttagaaaattttctcgcattcctccgtccattcaaattttttattacctcgaaggatgttgaagaaaggaacgcacttgtctgttgacttcgaaacgaatctactgagtgcggctatcagaccagttaagctttggccttccttagtttttgttggtaatttcatatccaggagggcttgtactttctcttgattggcttatataccctgagcattaacaataaaaccaagaaacttacccgagctaactccaaaggagcactttaagggagtgagttccatgttgcattttttgaggattttgaagcattaatccagatcctctatatgcccccaactttcttggatttgacaagcatatcatccacatattcctccatattttgaccaatctggtctttatacattttatttactagactttggtaggtagctccagtattcttcaaaccgaatgccataaacttgtaatcatacagacccatatctgttcgaaaacttgtatgttcttcatctggtggatgcattctgatttgattataccctgaataggcatccatgaagctcatgatttcgcgcccagctgtagcatcaatgagctgatcaattcctggaagtgggaaacaatccttagggcacaccttgttgaggtcagtgaaatcaacatgtactcgccattttttattaggcttgggtaccagtatgtggttagctaaccgagctaagaagaaagcttcgatgatgaactcatttttgcacagtctttctatcttctctttcaatgcttgcgtccgttctttgtccagtagtcttcttttttgttgaacggggcaaaatttagggtcaatgtttagggtgtgagacattatagaagggtcaatacggatcatatcctcatgtgactaggtaaaaacatccaggttttctcttagaaattttattaaggctaattttacttcgagcaacaaacccttaccaattttgagtttcttggttgggatatttgggttgatttccacctcttccaattcctcaaccgaccctacatttgtgtttgattccccaagtcggggatccatgtcctcatccttaccttgggtgacttcctattgggcaatactttttcctttgcctgaactctggccggaggtactttc

SEQ ID NO: 296820 - DNA, 2637 bp, Cannabis indica
tgtaaacaataataaatacttatatgttttatttttttttgtaaaaagatattctaacatgtaattttgagtagtgagcataaaaattaattaacttatataataagaggttgcaattttaaaaagaatactaaattacgttacaattatatatgtaatataataatccaattagatattgtttaattgggacgagacaaagaacacgaaacacatctttgttcctttcctcaaaattccaaatccagactgcctctttataggctcgccaacttttctacaatcttttgtcatcactaatctagaaccctccattgcatcgcatcgcatgatctttctgatcagccatggcaactatctcaccccaaccaactctagacctctgggccgttctctctgaatcgaagcgaatcctcaacgctcattctcgccatttccttgctctttccgttctattccttctccctctttctttctccttcatcgtcttccccactgttcaaaacctcctcgctgctccaatccctgataactctaaaatcttcctcagtttaacacttctgggttctcaaaatgatcaacccttctattccacgaacacccttttgctctctcttggtttcgccatattcgccttcgtcttctcgctctgcgctgttgggtcaatcacctactccgtcttccatggcttctttggtcgacccgtcaagctcttatctgccattaaatccgtcttagcttccttcttccctcttctgggaaccgctcttttcgtccaaatagtcgtctcagtcatcgttctcatcttcgggctcttcctgtatatggtgataacttcagctcggctattggggtatgagatcgaggtctcatctccatatttcatcggattaattgggtccgtcggaatcgttctaatggcggttttgttgtatctgcaagtaaattggaccttggtttgcgtggtcgtggtggtggaatcgaattggggttttgacgcttttaggagaagtgcatgtttaattaagggaatgaaaagaattgggttatctttgtcgctgttttttgggtttttcgttgggattttggcttggtgtagttcgttttcggcaatgggtttcgatgatgatagtgctgatgggtggaggagttggcaatttgtgcttcaaattgtactgacttccacttttcttatgctggttctgctatacgacgtcgctgccactactgttctgtacatgtactgcaaagctgttcatggggaactagctttggaaattgctgaagagtttgctagagagtatgtttccttgccctttgatgatggaaaagttccccatttagtttcggttgcctatgcttgagcgttgtaatcaaggttagtcgactctctaagttctctacctgaaattttcttgtatttccattcctagttttgttgactcttttacttgtcagtgtcgttttgtatttgtaaaatgtgatgtaaattatgacagtgaaaaacaaagaaaggttaagtaatatagtgcgaatgatatgaaatcattgagctttttgtatgaccatttggattggatgtgaatggataatatgcgttcatggtagaccatattgttttgcctattttattattttacgggaatgttttgttctggttacacttacatttgttcagacaagctcaggctcttgtcttttttgcgtacctggatttctggtcaggattctcaggaacataccaaggcttagcttccaaagcttgcagatgcactcttcaatagttgctacagctgagaacaatcacaaaaacagagtgaaagaaaaagaatgaatattgctgagtttgttgaataattatccaattaagtcttctacaaccctttaagttctaacaatttaacaacaacactgaaacagaacaacttattattacagaagtaaccaaatgaaacggttgagatgtttttattaatcttaccgagcgtagtagtctttgcttgactgctccacgcgggtatcatgtaacctattcagaggagaagcaagaataaactaagtgacccttctaatagaatcacattcaagcaatatgactggactacacaatcggccatttaagttcagcatttgacaatgagacttctctgacaaatcttttttattctattagtttgaatttcaaatattttgaagagttggagccaaagagaattcttgagctcataaccaagtataatttggattttgtggatgctccgagatacaagttataaccgttgctctctttttttgaggtcttgaagatgattttgtaggagttctcagctatcaattttagaatacctataatctatatgatctcaaagtacaggtacaactacaacttataatatagtactaagctcttagaatttgatgattacttttcaatttattaatatctatatattttcttttatcagtagctttactacagtcaaacgattggtggttttttttttaaaaaaaagtaagggataaattgtaaggttctgtttggttttgtagtaaatttcattgaagcttcctgacttatattttttttcctttttatatttggatgaagttgtgctggattgtcgctctctctctctc

SEQ ID NO: 296821 - DNA, 9941 bp, Cannabis indica
tttttttagcagttgaagaggatattttgacctttctaaggatgactgctaaaaaaatgacagtgatatgctcccagtttgataaggttggaatgataaaaggtatgaaagtatactcagtcactcattttttattaagtcagcaaatatagcctgtgtttgttttctgatgacagattgtttggatattcagatcccaatagtgaacaagtatatgccttctggagacctcatgcaccgtctggtttcggaattctgggagactttctgactccattgtcagtttacttcaactctgttttctcttgattatcagtcatgattcaatgctgtaaaatatttatatattagtcttcatgtaacagggacaagccacctacaaaaggagtgattgtagtgaattccaattatacaagagtcaagagacctgtatctttcaaattgatatggcctccttcagaatctggaaactcatcttatggagattgttgttccatttggtttcctgaagctcccaaaggttatgttgcattaggctgtgtggtttcccctggaagagcccaaccaccactatcgtctgccttttgtatttcagcttcattagtttgtccatgctctttaagcgactacattgcaatcaatactgtcaatttgtaagtggtgatttgttttttcagaccaaattggttgtactaaagctgtcaattccttgagctcaagatccgaacttgacttcattatgaccagattcttgactaatatagaaattattaatattgggtttaatttccatggaggattcttatcatagtaatgaaggcagcaatgtgattaacggttactaagcttgatatgtctttttgatcaggctagttgggaatagatttaggttgtaggtactttcatttatatagttcctatcatttggaactattttggacattttggcatccttcttctattaactagtgttttaattgctccatcattaaattctaattttagacactaattaagatgtgtcagcactccaaaattttactcatcaactcaaaagtgtaattggcattagtaaattcaaaatctgtgaaatttgcatacttcagattaacttttggccttggttatttatttatttatttttttttttgattgttatagtgctcatatccattttacccttgcagaggcttgccaagtgtggcattctggcgtgtggaaaattctattggtacttttttgcccgttgatcccacttctcataacttgataggtagagcatgtgatttacgtcacattatgtttgggtctctggaagcctcttcaaaaacttctaatagtatgaatgctcaatcttctccatctcacactcttcaatcggaaagacaagcattgaactctgctcagcgttttgaaacggttgctaattttcagtggatatggtggaatcagggttcaaactcaaggaaagaattatcattatggcgaccaatagtccctcagggaatggtgtatttcggcgacgttgctgtcaaagggtacacaatacctatggatttgtaattgttctaagttacatctattacattgcattgtccacctttctacataaaaataagttacatttactcttttgaacttaggtatgagcgtccacgtagctgtattgttctccgtgatactgaagatgaagtgcttttcaaaactcctctaggtttccagcttgttgggcaaatcaagaaacagaaaggaatggaaagtatatctttctggttacctcaagctcctcctggatttgtttccttgggttgtgttgcatgtaagggaaccccaaagctaaatgagttcagcacattgagatgcatgcgcagtgacttggtaactggggatcaattttcagaagagagtctctgggaatcatctgattccaaggttggaacagggacatttagtctatgggaaattggtaatgagttgaggacctttatcgtgcgcagtggcttcaaaaaacctcctaaaagatatgctttaaagcttgcagatacagatatgcctagtgcttcagatgacactgtaattgatgctgaaattagaaccttttctgctgcactttttgatgactatggtggcttggtaagaattcatattccaaaacatttatgtgaagtttgtagataattatataaaaacacctttctttggacatttattgactgttagggtttttggcacaattatcattttgttagtgattggacgagcaccaatttctattttgtgcttgaaacaaatatcttaatagagaggaataaaggggcatgacagtgtcctaagagagagcaaaattctgctgcttagaaccttcttcctgttttattgtaattttaaccatatggtttaagtttttgtttagttttcttgttactaggtggagtattcctagtgctcagcctatttctttatttttttccctttaaataaagtctcttggtttttgaagaaaatgatagcagcgcatttcttaatgattttatcctgtaatttgtcagatggtcccattgttcaatgcgtctttaagtggaatagggttcagtttacatggaagaaaggactatttgaattctactgtcaacttctctttggctgctaggtcctacaatgacaaatatgaatcctgggagcctcttgttgagccagtggatggatttttaaggtagtttcttttctttatacatagcttgtataacacattttagcaagatttcatattgtatgtgaaccagtaaacgtctcattaacttcatcctccactacttgcagagattgttgttgctctatttatatttattatatttatctgtttcccattatatttttttctggtgcataattaggaacttgctttatctttcttaaattatatatgctttgctttgtaattttctttgtggtagtttcattgttctagatgttagtgttgagattgtttgatatgtaaagcaacaaatgttcatcacctcttgtctttttggagctctgtactttccaaagaaaatgtattggagtaaagaggaacagagttgtaaatttaaactgtcaaatttagttttctagtacttgattatacttttgtttctgcattcttttttacttcttttgctgatctttttcattttcaggtaccaatacgatctcagtgctccaggtgcagcttctcagttgcgtgtaacatctacaagggatctgaatttgaacatttctgtatccaatgctaatatgataattcaagcttattctagctggaacaatcttagtaatgtccaagcacatcatgcaacaacagtaagtcttttctttttgtttgttgaccttatgcactttcttaattttgtattttcatgttgcttatattattataaatcttttaacatttctttacttcttggaaaatttgatgataaacaggagaccttttctccatcatctggtggaagatctattattgacattcatcacaagaaaaactaccacattatccctaaaaacaaacttggacaggacatttttattaaagctactgaattaaggggtctcacaaacataattagaatgccttctggggatatgaaacctattaaagttcctgtttccaagaacatgttggactcacacttgaaaggcaaactttacaagaaacttaggacaatgattatagttactatagctgatgctgaggtatttcaatgtgactgaattgtttttatttcttccatgtccgtttacattttaccttgtaacaatgttttttcttactttatctaaaccaatacagcttccaagaagtagagggttgacatccccacaatatactgtagcaatccatctcacaccagacagaagtcttcctagcgaattaatgcttcagcaacagagtgcgcgcacttgtggaagcagctcggattatatgtcatctgagattgaagtggtcaagtggaatgaagtattctttttcaaagttgatactgcagtacgtgactttaaatatttgattcatcttgattttttttatacacttcattatcacgtcttttaccaccctatttttttaccctaatcatttcatctctttggattccatttcatttctcttttttgtgaattacagctgccgtaaatttctgcttgtcaattatgttctgtgaaatggatttttgaccttgcagctgttttaatatactaatgccaaaatgaatgaataagatacaaaactaacagcgataatattagataagatttgtaatgtgttttatatgttacatgcaaaataatgttcatgtgaattttttagttctttgcctgccaatatcgagtttatgacgtacgtacttgttttgtatcttatataaaaataaaaacaaaaatattgactttgtgattgttggattcttcaatttgaaaataatagttattcaatcagtgcttaatcttaatttaagaatctgattttagtgtttcttctaactctcacactttaagtggttggtggattttttcccccttcatagtgctttcttagttttctgatatgccttccatccattttcatttaggagattcataatgagttggtacatttgttgttttagctttcgcattggatgaagcagactcctttaaataattatatatcccttggccactttctctaccctcttttcctttttccagtgacctaaagttgttattgtaacttgtgcaggagcactacacggtggagttaattgtgacagatataggaaaaggtattttactttgttgctttcactcagttcctttatttaattctttgtgttatgtaaatggggtttgtgaagcacgtgtttttagttgttgcaattgtagattcaagtttcaagattttaaaattggattaagctcaatagaattatgaattcacatatttctttttctatcatagagtgattggctgattgctgtttaaatttttgtttagtgtttggattggaaagttgttgctttgtatttggtcaatgtccagttatttattttattttttttcatctttgtttcctccaacctctgtcctcctgatgtatttggtttctctctccaataaatttgtctatcttatacaagagaatccagaatcttccactgtgacaacaatgtagtttataggttgatgcttgagtaatttttttttaaatctttcgtgcctattcaaaagcatagctctacttactgggagactcagggaataaattatggctgttaattatttgaaagacctggatagtgttacacttaagtatgaataaaggtacaaagaagagtcaactggcaatacaaacaggagtttatttggtacacacactaatatatttatattgtaagagatgggttttcttatctcttgatttttttattcacaaaggtctttctcctcaaggtattgaatttgtcatttggttttgcatttgttgattttgggtgttataacttatgcattatgtacaggtgtccctgttggattcttttcagcccctttaaagcagatggcagttgatgagaactcagattcatatgatcattcaaatagatggaagtgggttgaactaacctcagaggaaacaacggtaaagttctatcatcatactttatacgtgctttcatattatagcttaaatgctaaaccttgcgcggatggtatttctgcagaatgagattcaaggggaagacagtaaagagtcacgtggtagggtgtgctgtagtgttcttttttcaccaagatctgaaattgagaacgatgaccaatctgccgttagcaatcaaaaatctgggtttgttcagataagcccaaccagggaagggccttggactactgttaggctgaactatgctgctcctgctgcttgctggcgattaggtagtgatgttgttgccagtgaagtaagcgtcaaggatggcaatagatatgttcatattagatctctggtttcagtatgtaatgctacagaatttgaacttgagttatgccttgtttcccaagcttctagggaaaacatgaaatcaccaaatgatgcaagtgaccaagaaggtgttcaaattgacttcaatgaaatttgtattgggagtttgagacctggagatactgtgcccattcctctctctgctttgaaacaaacaggagtatatgcattacgattaaggccgtgtaaacttagtaatccagttgaatattcttggagctctctggtagagagggttaatcaaatagaagatccaagtactccttatctaccacaaggaataagtgtgtcgtctcttgttgagtcggaggaacttttatactgtactgagataagtggaacatcttcaagtagctcccaaaagatgtggttttctgtaatcataaaagccactgagatcgcgaaagacattcgatctgatcctatccaggattggaatcttgttgtcaagtccccactatctatcagcaattttcttcccctcatggcagaatattctgttctagagatgcaaaaaaatggaaattttgttgactgctcgaggggtgtttttggttctggaaagactgtgaatgttcataatgctgacataagaaatcctttgttcttttcactacttcctaacagaacatggcttcctgtgcatgtgagatttttatgctaatctacttgtttgccttgtgttgatataagtttcttgaatttgacttgaacattttgattacacaggaagctgttctttgtctcatacgaaaacaattagtttgagaagctcagtaactggaaggtttcatacatcaacttcattaattttgaatctttcatgctctttgttttcttatgtgtagtaattaataattattattatttcttcttgttgatgttcttgtattttttttcccctccaggattgttcacattattcttgaacaaaattttgatagcgagcaactgctgcatgctaagattgtcaaagtgtatgctccatattggcttgatattgctcgatgcccctcactcacatgtagactcatagatataacaggaaaaaaacacactcggaaattcagtgttccattccgatctaaaaagaacaatgaggttgtccaggaggaaataacagaagaggagatgcatgaaggccatacaatgacatcaactttgaattttaaattgttgggtattgcagtttccatagctgaatctggcaatgagcagtttggacctattaaagatctttctcctcttggtgacatggtatttgttaaatatattattatggagaaactcgttacgctaaaaataaaatctttgatttaagatattttttttttctgtctctaggatggagcagtggatctgtatgctcttaatgaagaaggaaactgcatgcagctttccattaccacaaaatcatccccctttccatctatacctacaaaggtagctctacaagtataaaaagaatttaaaaatatttacataaggtgtttaatttgttgcttgtttttaggtagtatccatccggccattcattactttcaccaacagagttggtcaagacatattggttaagctaagcagtcaagatgaaccgaaaattcttcgtgcatcagattcaagagtctcctttttgtatcggcaatcaggtggacctgataaactccaggttagtgaaatgcttcttgatacaatagactggtgtcatcgtttttatttatatatttaaatatgcagctcatctcctagtgcatcttcttctgagataattatttgttgctttcctctatatagtcaaattactagtttttttcctttttcttttgaacaatcaaaatacatagttgaaaataagataatgccaaaatcaatttatcagttattagtcaacgtagatagttgttaatcccgaccaaaaagaaacatagaaagttgaaaataggatagttcattgtttattttaattgatttactagatttttagtgtggcttttagctaagtttttttttcttacgttaatatataattaattcgtacagctgaatgctgaagaatctctttattcaatctgtaggtgcaattggatggtaccaattggtcatttcctgttgaaattgtaaaggaggacacaatttttcttactttaaggagacgtgatggttctagaatatttttgaggacagaaatccggggctatgaagaaggttcacgcttcattattgtatttcgtctggggtcaactgatggtcctatcaggtactcttaaattagagtagttatttgtattgtagttgtgattttatgtggatgctggttgtgactaacattgagaacttgagcagaattgagaatagatcaagaaatcaagcaatcagtattcgccagtctggttttgatgaagatacttgggtacacttacaacctctttcaacaacaaatttttcttgggaggatccatatggccaacagtttgttgatgctaaggtcaacagtgggtctattgttgatgtttggaaacttgatctggagagcgttggattacatgctgcagagaatgacgaattaggattgcgattccatgttgtagaaatagctgatacaaaggtgatttggttcactgataagagggattcagggtcaatttcatgtgaagaaataagattattggcacttgctagaaaatgggaacattcgtatacacagaccaatgtacaaaacaatacttctcctattgaaatcattattgagctgggggttatagggatttcgataatagaccataaaccaaaagagctctcttacatctacttggagagagttttcatatcttatttgactggctatgatggtgggacaacaagcaggtaaggcatcaccttgcagtcaacaaatttacttgttttcatttttatgatatgattgttttttttttttttgtggttgacaaaagttttgttatggaagagggtagcctttttcactttttataattggctgctgctaatgagtcaagtattattatccatttgtttcttggtcgccttaggtgggaggacttattgtgccggttttccttttctacaataaagaatatcctctgttaatttttaaccttttcatttcattgttaaaagttttttcttcttattaaaaagtaatattattcacatataaagccaatattacttcttattaaaaagtaaccttttcacttcaaatcaacattatttccattttgtattactgttatttgaatgacgcattaactgtacaagttttgcatgtgtttcatgtcttccagattcaagctcatactaggccacttgcagctcgacaaccagcttcctctgactttgatgcctgtcttattggcaccagaagccctctctggtactcacaatccagttttcaagatgactgttacaatgcgcaatgagaatactgatggcatccaggtctatccatatgtgtacatacgggtaatgttttgttcaaattttagtttgcagtttagggaaattaaaggtaattattaaatcatgcagttgaagtatttataatagttctgttgatgtcataggttaacgacaggacttggaggtttaatattcatgaaccaataatttgggctttggtggatttttataacaatctccatttagaccgccttcccaagagctccagtgtcatagaagttgatccagaaatacatattgggtatgttcctctttttttttttttttttgtaaagagggttatgttcctcttttgtaaagagctgaagttttgttaaaagaatttgtggttacctaaaaaaaaaaaaacttaaaccaaacgaaaaataaatagaagttcgtaatcactctatgctatgcagtgaactactatgc

SEQ ID NO: 296822 - DNA, 1931 bp, Cannabis indica
taaatatacatgactatttaatttttatatataacacatgtgactattaatttatatcctagtacatactaaattaagagatctactaattagatacaataaacaaaaaaattaaaattattacaaacctaactttattttgttcactatttatatattagtttatattagtttatagtaagaaattaagtgatctcgactaaaacttccagtcattagtgtacaatttattagttttttttttggaaaaataatatattttgctaatttaatttttatgacaaaccaaggtgtcgtgtatattgagtgtgcatatataattattagttatatttgttatgtatagaagacacaagtactcaaattaattatagtttttttgttaaaaaaaacattatataattaattaaactgcatgcagatcagttctgttgcagtactacagatcatcagatccgatatgaaagcgcccaataaattaaattggaattccatgttagtctgatcaatgatttaattgactaattatgaacaaatataattataacagaacatatatatatttaaataaatatatatatatatatgtggtgcagtgggtgttaattcgagtgattattatcggcccttattatctctagctgagtagctcatcattattatgctaacctaattaaaatattaattattagttataaccatattttattttgtgtgtattaagaaattgtagcactaattaaaacttgattgtagaatatatatgagctgccgagggagcttttgttggtactttgagttgcttaattagtatgcatggttggcccaatcatggttttcaagctgtcatttctacttagcatgtgattcagttgagtacattttattataataagtactacactagaatttaacctgaacattatatatcaagtaatacttgtatagaaaaaaaatattatataaagtttgttttaacttttttggataatttttttttatttcttttgatagattttttttttttggaagaacactgagttcattaattaataagatatccattgaaatgtgcctgctgattggttagcaactctaatatttttagttaggtcattcccaaacaagttacaactatgcttaatgaaaaagaaactataaatatcaaactgcttaataagatctaatatagataatgaagtactaagagacttccaatctgcagagcattagtatttgatgaccaaggcttggattacttgccaacaattcaaaagaatatgaacttttttccattcattttcagtggcccataaaagagtcatttgatagatttaatcgtgtaaatatataatttctttcttttttctttagtttttgtttttctttataaattaatgatactagacataatatctattcaattatcaaaattctagtgtggataggcttagtaaacataatatataaattagtacatatattgtacaagttatcctataaatataaatatacgaaaaagatttcaattattacatcaaatattgtaatcatgatatggttatattaattttaactaaaaaatcacattgaacaatagaaactgaaacttattaaacatggttagatcaatgatgagttagtcacactactacaaaaacactctttagaggcggtttttaagccctttcagcgtcggttttcgcgaaattcgctaccgacgctgatcagggcgacgctaaagggtttatatgaaccgacgccatatatacccctatggcgtcggttattagctaggaaccgacgccataggggtatatatggcgtcggttcctagccaataaccgacgccatatgtggcgtagcaaccgacgccaaaagtgagcagatttcagtttttttcattttttttaaatttaattatataattt

SEQ ID NO: 296823 - DNA, 5000 bp, Cannabis indica
aaaaaaaaaaaaaagaaacccaacaacgaaaacgtataaacgtaaaattaaaacaaaagtgacgtttagacgtaaccaagtcaaaatgaattaatcaaatgaaaaagaaagagttacacggcaattatttattggaggaacatggatattctactatgtaatctttttcaatagaaaattgttaaaaaacactagtgcctaacattctcatcgttgtaatcctgttattagtgtaataaaatattgagttccatataacttaagaaaataatttttaagaaataattaatcgtaaagtattatctatagaaagtgttagacactactgatacccaataacaatactcttttcaataatattcactttaagtaatgtgccacctaagcattaaaaaagacaaatttaacttcattcgtactaaaatttaacattataaaagaacataatagaagaagttgatcaagatattttaatttttttcaagatggccttacacataataattagcatgtcattaagacaattgaagttgaaaaccaaagctcagacacaccaagttgtctcgctctcgctgttcaaataagatctttatcatcatgaaaactataccaaatgttttagcaacacatggatttacaaaaatttgagcacaccttggaaaggcatagggtgttcatagattttcttcttgcagtgttcctacagccattttgtaggatgtcatgcaaatatggctcacctaaacaccagttaccgtcttagagcaccataatttcttgttacctatgaaatgagtacaagaaaaaggtgagaatggaatatgatcatgaagaataagagaataaatcaaataagcatgatggattgagagatgatgtagaagtactctaaaaaataaaaagggttaatggtatagtcatgtattataatagagggcatgaaaagggagagaggaaatgaaaaacaatccaacccgaggttgagatttgttaaatctcttcgcaacgttatcctcatcatcatcgtcatcatccttgctcataagcattcgatgcaatgcagagttttctgatttctttccccgcttagaggattgtgaagaacctctacctcttcctcttggagcagcccttttgcgtccttttccttggacaccttcattttccttcagaagaaaaaccacacacaaatcaagcatgcaatgaagagaacaaggtattactagattacatgattatcttcttccttttttgtaattgcttcagtgagcaataatcatataaataagtgtcgatgaccaatcagaatggtatgacatagaacaactcttccagtgttcccaaaaaatcagcaatttggcatttctcaaaggttctcattcgaaacagtaaaaggaagcctattacattcaaaacagattaagatggtagttcataccgaactgtcatcaatctcatcaacatcgaatttcccagcatcctcacttgaagaagaatctacattagtctcgtcaacagcaatattttgaactgcagcggttgcagcagctgaggcagatctgtagcagcagcagcaatattagagcaacatatataatgtgtacaagccttgtatttgttactattagtgacctcatcattttcatggtataacttcttcaaaagtaacagcagtgttaacagttaaattaccttttagaacttttaaaatataagaaactgttagcccttagttccagctagaatttgaaacccaaatcctattttttcattaaaaaaaaacactagactccctgcctaatcccaagttgttaaagagcaaagtaatccataacaatttctacacttggggtcacatacttacccaatctagcaagctagcctcaaattgccaacatagcagtacaattaatgcttaaaataattatgctctttcaattttctctgtgttaaagactccaagctagacaaacaaataaaatggacaatattaaaatataaaagctgtagcactaaatctcgaatgatctagtaatctctagttcatatggtaataagatcaaaagtaacctcagagattggcgaaatccaagagttgaatcaagagttgtctgcttcatgttacttgatgccctaccccttcccctacccctaccccgtcctcttgtggaggttttccctttatcaagctcagaagcaacaccagataggctagaagaccccctccggcctcttgctgtactctttataccagataactgtgttgcatcttcatcatcactaaaggaaacagtgcttccagctcctgctccacttttacttctcaaatcctacaaaagtattaacaaaatataaatttagaggcaaaaagttgaatgcaaaagtccaacagacataatgtggcacaagacagagcaccagctgcaataaaagtacctcagaggattgtaaatctgaggtgaacagtgcactatccttaggccgtgtagacctctccttcacacgctcctgcaagagatgcaagtctataaatataagtgaaataaaactttcactgtgatcacaatattcaacagccataaatgccttcgatatttctagtccactacaaagatgagtaatcaatggttcttttgtttgatgtatcccccaattgcttaggcttccatattaacaagtcttccatatatatacaatataaagtcttaacctaaaacaatgggtgcgttaatgtctttcatatgcaacacgtaaaacctggcaatcaggctgtaaaagataaccaaccccattaatttccttcatatgcacaaaggcaaaagagaactgcctcattagcaatgcaaacgaaatttctatctattttgactatgggcattgcccattggtaaaaattatactgtaaacatcacaagttatagaaaatccttgcctccatgcattcgccaactttaagaattaaatcttcctcttcaaatttcaggatatcagaatccctggcaattttattctgttgaaaatagaggaatgattgactgttagaatccattgaacaaacacttagataacacaaattatttcatacaagcatatgcatgtgaaaagcaattggttgggaagaaataatataatcaaaaaaaagaagtacagaacttgcaaaagtgtaacacagtggacacatttaggaggcgtttggtacgaggagttcaaaacaatctgattaattggaatattaaatcggagaatataattgtttgtaaacttaaaattatgtttacttatggatgagaatatttagttagattacggttaattgatacatcatttggttgaacataagaatttgataaattgctgtgaaaagttatatgaagtatcaatatattaaattcattgtattaagagtgaaggtaatatttggaacccacctttttgaaaggatttaagattaccctcatatagggtaatcttattaccacagtaataactttcctagaatcaaaaaattaaaaactctataccaaacatgggaatatgaaagattaccgtttccatgaaaatgtcacatcataccaaacaaccccttaacataaagacccaaaaggatacttactcgtgtttcctcaagattgtacagcagacaagagtagaaagccattttgtcatccttattaacaaaattgtgtaatgcaacatccaagtcgttaacaggaagaatctccattttctgcattaatcaaatattgtcatgataagcagagtcttaatgtagtctgttatgctaacaaaagtccctgcaattaatttactaattatacaagttggaattcacctagcgacacccagctcaccagatacagataaagatgcaaatctaaaatatatattactcggatatttcatatgctattttgtttgtattaattatgctttcttttggtttctgacaaaaaccaaataaagcttgaactgaccagccccgagaagaatatttttaccaccttagcttccttgaaacctctatgttcaatactataagaaatacaagtaaaaatgtaaaagaaaaatacaacagaaagtgcagagatggtagttgataccagattattttcagcaactaaagcctctatgttttgttgattaagctcttctgggcgaagtcgttcagaatcaccaattttagctgcaaataaagagtaaaagtgagcgtcattactttataataacaaatcccaagaatttgattgcaaaagtaagaaatcagtcaccaattttagctgcaataagcaaattagaggtaaaagtaaacgagattagcagatcccaagaatctgaattgataatgaagaaataatcatagattacaaagtcggttattttaggagaactgaaatcacaataccacaacaatcctcgtaatgaaaataacaaataaaatagaacaaaatttatcttaaaagataatacaaataaaaaagaattttaaagtgtgagattactggtataaaattatcactaaatagatatttgcattaagtctgattcttacactcacctatccatgtaactaaagggccaataaaagtgtatagatcaatgaatgaactcaccaccagcttgacccttttttgaagcctttgaaaatataaggatgtcttgaggatttgcaacctacaacatgttgaacgcattgcacgtcccaaatgcaatttgtcagaaacatttaagcagtcagctttatgatccaggaagaacggcagaatgatgatacctttcctacgtacttctgaccaaatctttgaggatttattgtcataaatccagagtagtctacctgccaatcagcacagaggttaacctctcatgtcaaaaagatactacaaaaccatttagtatcaatccaaccatgataattaacaccagaacatcttaaaattagtaaaaaaaaataataaataaaataaatagttgtaataaatgatccagattcaaaaaaaaaa

SEQ ID NO: 296824 - DNA, 7791 bp, Cannabis indica
gagagagagagaaagaaagaattttaaataaaaaattaatgagatagatctgatttgggggtttttatgaaaaaatcggtgggttttgttactgagtatccccgacggtttaaaaccatcggggatactcattataaaatctcacccaatttttaagttattgtattaaaccgtcaggaattctttaagactatttaaaatcgttggaaatacccaattatagtcgataattttaaacaataacaaatttttaatagcgacagttttttaaaattacgaattttaaaccatcaggaattatgctttttgtggttgtaagaattatcttgtcaatcaagtaagaagaaattagtgaagtaaaggttatagaaaaaaaaaattgtactgtgagtctaacctatgagtacattgatacaatcattgaagaaaataaaaattttgaatccttaactaataagcaactcatgagttctttacagcctagggggagaaataaaaaaaaaagaaacaaacgaagaaaatggagcaattactataactcaacttaaaagaagaaaattcagacaacaataaagtcaaaaaggaagagggcatgaccgaggaagcaaattggagtcaactactcttccacaaggatgcaagccaatcggagtaaagtgggtgtagaagaaaaataaaaatgctaaaggtgatgtgaagagatataaaacaagattggcggcaaattaaacattatagtcaaatagaaggcataggctatgatgaggtgtttgttatggttgcttgtcttgaaactattagattaataagttcttagctgttcaaaatagatggaggatccaccaaatggatgtaaagtatgtttttttatgggcgttgaaaatattaaactagatttaatatagttaattcttagaattttgttgttgttactagaatttttaaagtattcctacattaattaaaggttctagagtttaattgtatttggaagtttgtttgagtgctcttgaattttttaaaattctcctttacttatgttaattagtagtgagacttatgtagaaaaatataaaagttggtcatgtagtaatatttttagaatagttcatagagtcctataaataaagatgcaattctactattttgtcaaaaatcacaaaagttgtctcttccatattaaagtatagtgtccaaatactctttattttccaacaataacaacaaatctataaaccttagaaaattaacaacaaatgtagagtgtttcattaattattgataggaaagacgattcaattggtatttttgttttgtttttttttttttgttattattgttagtttgctaaaatagtaaacttattctggtttaatgatctgcatttcgtccatttaaaaatctattcattaagatggtatgagcattttggttaggatttctaacctttcttcatttatgcatgattcttcatcatcttacttttatctcatttcattcccatcaccttcttttgatccttctggttcatccattccttcgtaattttcccaattataagttttgattaagggtcacaagctcaacgattacattgatcatgatatttatcttcttgtgcgcattcttaaccgagtttctaaacgccatgcaccttatacctaaatatctaattagttgacatggttaggttttattgagaacattaactatttatatatatatatgccaaccttagctaacataaaagtcaagttctttgattttattgatttatttataaattcataattcgttgattcatcttgatacatacagcgattgaaacttgaaactgcagacatggcaaagaagattgaactccttgaagtctcaaaacggttgatgtggcccatcctatttctcttcccctataatttggcttttgtcaagattttactaatgtcttaaatattttctaatcagctttgattttatattataaatatttataggaagtttctgggtcaagacataagctcttgttctcatgaggaactccttaacattgagcaccgactagaacaaagcctacgcagcatcagagcaagaaaggtacataacttatatgataattttgctagtttatttattgatttttttttaatgctaaaatttcttgcctaattatcaggagcaattgttccaagagcagatagaaaaactaaaagccaaggtgacaatataatatacttaaagtaattattatatatgttgagatgactcagtgtcattaatattggttttcttttcggctaattcaggaaaggcttcttttacaagagaatatgcagttacgtgaaaaggtgaaccctctacctctttcaatcactattacttgtctatccaaattctgtggaggcatgtcactattataatagtaaagaatttcagaagaataccagctagctctcattcaatattacgagtaatttaacaagttgaaaactaggatcatacatagagtattaattttataaaaattgaagataatatatgctatatatatattatatatgttgatgcaaagaatccaccgtaacagcgatcaaccgtaaacaaataaaaaataagatatatacagtacattagtttttttttttaaaaaaaaaattatattctagggaatttacggaaacagtatacataaggatcaaatactcgaaaattataatggttttatgatcctatatgtatattcttcaaccttttacagtgtccaaaacctatatatttatattaagaaacagttgtggttacacatgtagaacttaaccacaatttgttgaatggtaatgtttattatagttaagaattctctacacgttttaagataatttggaatatctggagtagtctgaacttccatttctatctaagtgcaatattttatttggattatcttaccttgtttgtagcaccctaaactatttcaaatttattgaaaacatgaagagtatctgctctctaagtacaataaactattatgtaaaaacttgagaaatataactttggcacatgtgtaaactggagcgagcaacacctcaataccacataaaaaaattgtggtactactccacacacacatagatatatatatacatgtttaggttgttttaatattctacactcataacagttcataagagataaaatgtcacgtgtaatctatgttaaatgtcacacaatttgaagtgtggatcattcatcattcatcattttttaatgtttggatttgtatttgtagttaataatagcattgtatgtatgacagaatactagtggagaaaacctattgcgagagtcaatgtttcgagagaaagaagtggttaggtactggagtcaaagtagcaatagtactaatacagaggtggagacaggactcttcattgggctccctgaaattcggtgttgatcattaattaatgaatcatcaaaggcattgccactcgtataacatttgtatatctatagatcaatattttagtaaatttgtagaagaagacatatttgttctgtaaaactactattttgattttaaatgtatcttttacaataatagaaaatgatcgatgtatgataattatgagatcattaattactccaaatttggtcatgatttgcttgtattatataataaatttctcaagtcgtgatccctcttctgtttttcttttttgattttgacttcaatgtgttgtgtgcttcttcacatgtgtttttttgtgctatttttttcgattctttaagagaattatcctacattattcaaatttcaaagttactttaattgtctttatgtattcgacattattcaaagttattttaatttagtgttcttcatgttcttcttccgggggaagcagagcgatacaaagcaaccataactagaacaagatcttgttcagatctaacaaaacaaaatttaacaaccataaatagaacaagattttgttcatgatattacagagaaataatttaatacatatataaaattatctcttatgcgtgtatttagcttctatcaacacttgttttttctagattatatctcttgcacgcattaaagaggatgtgtagtttcctttttcaatggtacaaatacaattacacttctgtatctcaagccgtgagagtgtaattatttatgtgaattgaagaacacaatgaatgtgtttttcacaataggggtgacacaaaggaaaagagagagaagggttagggttgggcctctatttatagaagaacattgataaggaccaagtaacaccaatacttagggttgggcttcacagtccatggactgtgctagggcgctgcctaacattgattgtggtggtctttttcttttatgcagtccaatactacattattttctcctttttatttataccatctattatttctcttaaaatataaattgtataaataattaattttctcaaaattaattctttataaaatatcactaatttttttttatatatatttcattattttagaaaccatttttctcaaaaaaattatttttttataatttatttaaaataaaataaatttaccattttattcttttttcgtaaataacagtcattattttttttatttttttattttatcaaatactttatctttgttgctactcttgggacaggtggacatgtagttctgtgctccaataaattaattatctcgctaactattgatttaatgaattaatttattaacaatgacattatcacactaataaatctacaactaccaaaagcactttagcttaatgttaaaaactcacaatatagagtaccccaagtttgatgtctcggtttagaaccgacctttaaaaatagtcaatggtgttgttagtaaccaaagtttcatctgacatttatatacaaataataataatatcctttatagtgtcggttacgaattaatgccatagaggtttacttcaaataaaccccaaagtcgcatgagcccttttattgttcgtcactttttatttttgttgaaacgttagctctaatcctaaccactcttagtcgcagtaggtcctacttcgatcccagattactgactgttctgtcctaccccccgtcctctctctgtctcactagaaacacttaaagcaagaccccttcttctccccctctctctcatctcacttgaagttgtcacccttgtccccttgtctcatcggcctatgctcctcccatagtcccctcgtctcatgggcctgaaggctaagctatccccctctcacctcacttcatctagtatatatattgttaaccccaaaattctccaagtaagaatcttgaattcatactgaacataagggaatttgaagggagagaaggaaactatatcaggaaaagaaattttcaataatctcggccaccttagtatagagaccatctagtcactttggtgaagaaaccatatcgaccaccttggtgaagttaccatctcagacaccttcgtgaagagaccatctcgacaaccttggtgagtgaccatctcagccagcttcagttaagtgaccatctcggtgatgtgatgtaaccaacacttagtgaaagttctctaagaggggaaggaaaggattgtatgaagaatgaaaaggacaaggcaaggatgcgatcgagtacacatcatggttcagctatgccacttgtaagaccttgaacaagaaaacaattgtgagagagggtacgagtagtgaagaggcctcacctacatgccctaacgcattataaggggtatactgcaagcactacttttacatgatgggaccacataacacccaaaaacctccacttgaaagaagaccacctcctgcatcctaccacctgtaagagtacaacgtcctacttgtgcctttggggaccacttgtgtatattaggccattagagcatataaaaactccattcgcagtttgagaagggggttagaaaatcattgtaatcacaagcatatgtgagcaatacaaaactcattttttttctccattattgctctgaaaatatttcctcaagctttcttactttcattattattctagatttgctatcttgactttaatttttggccttaaattcgtagatgagcagatccaaccattaatatcttactgccatctatgggaagaacaagcttacaaaacattcttctctaactcaactaggactctaagcatgccaaagcaagctgaaaggataaagacaatgtccaataataatctagcaaagtacctagagaaaagcttcagcctcctcgtgacaagaaggtttgccatggtaaactatggtaaaccatggtccccaccacagcaaaggcgacttcaagggaacaccagaagggtgaccccatgggacatataacaaagggaaaccttggaccattttggagaaagtccacctaaattctactaaaccaaatattggggcaatctcctacatcgaaaaaaaagatcttatgttcttgttcaataaacagtaaaatgcctgaaagaagaggtacaaaatgcaagggtggtcaaattggctcagtacctcccaggaaggacacttgaatatggtatcaaatgataacaaagttaccttccagctcaagaaacaaacgtccacatgtcctacgagagacatacgacgactcttactcagaaaattcccctcgtaattgggatctcactatgtccaagggagaacccctagtaatactcaccccatggtggcaaaggcaaggatagtgcacccatgatttttaaaagggcatgtgggcaaaaaaaatatccctttcctaagaaattcgacctcaaatgaccaaaatggtttccagcaaaaagaagcccctgaccttgtttgtaagaaaagctatctacgcgccaaggttccactcattggagctacctccagtgaagatgaataaacaaccgtgcaagctcattttgccacatgcaaaaagcctaaagatggaatgtaatacacgaatatagttgggtctacacagatcaccgcgatgggcatgcccaaagtatgagatccatgattaataaaataactttctggcttggtagacaagtgttcacgtgactagccaacgacatacaaaaacccctactcagaagacgctcaacgcacaaggaactatatagcaaccaagggaagaccctcgataaaactcactccacgagggcagaggtggggatatctttctcagtgtaatgaacacatatttaaattatggattagttaaggcaattagcattaattattgatattttatgaatttatatttattgtcggccccattttcataaatgggcattgttgttgtaatttctcattttcagagattttattaaactctaagtgtactatttagaaatctattaaaaatgggcattggagttactactccgacatccattaaaaatggacttttcgaaatgggattgaaagcaccaatgtgttgtacttgaatgatgatactacattgcttctgggtgttggatttcatgccctaaataaaacctatttcaatataatcagatttattaattaataaaagatcataaattattttatattgcatggttcacatgatttatttcatgattatttttaatgtataaattctattaagtccataacatatataaatatgtatatatttattcatgattatagtgtcgtcagcacaatggaatataatcatgattatatgttcaaaagtttaattcccat

SEQ ID NO: 296825 - DNA, 6737 bp, Cannabis indica
tttatcacatttctgggtaactttgtattttcaaaccactaacttagttgacgagttctcactgtcaatagtttggcgccgtctgtgggaacgacaagctcaagccaagtcattcttcttcacacaatcgatacaagatgaccagacactctcgtcgccgtcagtatacaaaaactcaccttgacaaagaacaattggttgcaccgaaacaagacctgccgccatccatcgtcagcaaaggagatgcgaacatcaacaaggcatgaacagacaaagggaacccacaaagagtgcccaacagagtccccaaagcggtggaagatgtcaaaataatcataggagggccttgtgtaggaggcaaaactcgaagggggagagacagatacaccagagaggtaaggcgagaacctcactcctggaatttagagcggaggcctctgaagaatttgaagagggagaacacctcagtcacctttacagaagaggacgcaagaggaatacatctcccacacaatgacccactggtgcgtacggtgcagatggctaacacctggtgcactggacattacttaacgatggaagctcagtagatatcttatactacaccgccctgagggagatgggattgggccttggggatctcaaaccctgcacatcaccaatatacaggttcactgaagaactaatccaactacgagggacgatagaactgacgctaacggtggggaggacacaccaacattccatggtgatggccaccttctttgtagtggattgtctgtcggctaacaacgttgtcctgggaagaccatcgctcatccggttgaaatcggtcatcttgatgtaccacttaaccatgaaatttccaacccctaggggcatcgctacattcaaaggggatcagaatgaagctaaaaaatgctataatatgtcgctcaaaattatcatgaagcctcgagaaccaacgacgatgatcgcccatggggggcccagccagagcgacaaagtttcatcacagctagacccttaaatttgtgaggaagtgcgagtggagtcagtagaggagttaggagaaatagtaatctcggagagccttcccaagatccttaaaattagaaaagagcttctcaaaacccttaagagggaatcgaaggagtttttggaaaataatctagacgtaccttgggggcatgaagatatggaaggaatagacccaaccgtattgtgctaccatctcaacatagatctgaatgcaaagccagtaaggcaatagtggagggccttaaattttgagaagtacgaagctttaaaggttgaagtcaaccgacttaacatgatcaaattaatcagagaagaatattaccctaaatgggtatcgaaccccgtgttggttcccaaaccaaatgaaaatggagagtatgcattgacttcacaatttttaacaaggcctgcccaaaagatagcttctcgccgctgcagatagaccagctagtggatgcgataggcagggcatgaattgctttgctttatggatgcatacacagggtataatcaaatacccatgaaccctgctgatgaggagcacacctcattcattgtggatcgaggcctatattgttaccgggtcatgcctttcggactcaagaatgctggggcgacgtatcagtgacttgtcagcaagatgtttgctagccaaattggccgcaacatggaggtatatgtcgacgacatgttagtaagaccaagaaagccaaggatttaattcaggatctaagcgagatattcgccaccctctgcaaatatcgaatgaagttgaatccactgaagtgcttatatggtgtgtcctctagaaaattcctgggattcatggtcaacgagagaggcatagaagcaaaccctgaacagataaatgcattaatagatatggagtcatccaagaacaggaaggaggtgcagtgtctaaccgggagagttgctaccttgaataggtttatttcgaggtccaacgataaatctctctcattctttgataccctcaaaggaaataaacaattttattggggcaaaaattgcaagaaggccttcacaagcttaaaggaacacctgggaaatccacctttgttggctaaactagaaaaggtgagaagttgtacatatatctggcagtttccgaacacgctctaagtgccgcccccgtaagaggggaagggaagcaacaacatcctgtgtactacatcaataagcgttttgtggatgccgagactcgttatccaaagatcgagaagttggcttacgctcttattgtggcatcacaaaagttgaagccatacttttcacgtgcatgtgatcgtagtgttgaccaatcaccctttaaggcaagtgctgcacaaacccaaaacctcgagttcttactcaaatggtcgatagagctaagtcaattcgacatatcttacacctcgagagtgtcaatccgtagacaagtgatggcagatttcatagcagaattcacctatcatccagatgagaatgaccaagggaaagatcggtgaagagtcaaaactgatgcagaaggagagtccatttgggaattgcatgtggacagagcctcgaacgatagtggagcaggtgctggggtcgtaatgacagcacctggggaaatcaaaatgcattgcacaataaggttttgtttcaaggcctccaataacgaagctgagtatgaagcaatgctacctggattaaggctcaccaaagaattgaaggccacgcggctacgaatctttaacaacttgcagctagtggttttccaattgaggggagaataccaagcaaaagggccaaagatggtgtcatacttggccaaggttaggagttatctagaatagctacaacatttcacgattgaggaaatcccaagggaaatcaatgccaacgtcgacgccttagctaagcttgcatcaactcgggaagtcgatgttctagaatgcatactagtggaattcttagcccaaccaactattgagtgtgacctggtgttgcgagtgcaagaggaagcacctcttggatgacgccatacattgagtacatccaagaggggaggttgcctacagataagaaggaggctcgaagaatctagtataaaactgctaggtatgtcttaatgaatggagttctatataagagaggatactccacaccgctcctgcgctgcataaaagaaagtgaggcgcaatgagtgttgttcgagatatatgaaggagaatgcggtaaccacgcaggagggtattcaatgtcaaggaaggtattaaaacaaggatactattggcctagcctagagagagatgcaatggcattcgtaataaaatgtgataaaagcatgctagctactgcaagcatccctaggccaaactcacaagcatgaccagccagtggcctttcgccatgtggagaattgacttgattggagcctttccaacaggaagggctggggcaaaatacgcagtcgtggcaatagactactacaccaactgggtagaggctgaggtactagttagcatcaccgctaagcaagtagtgtccttcataaataaattcctaatatgtagatttggagtgccttataagatcgtcactgataataagacacagtttgaaagagatttgttgagttcttactgcacaaagaggggcattgagaggggattcttggtagtagtgcactctcaagctaacgggcaagttgaggcaacaaacaaaataatcaagaaaaacctcaaaacgaagttggagaagcttaaaggcagatgggtagatgaactgccgaatgtgctctgggcatataagaccacgccccactccaccacgaacgcccttctccttggcatacggatgcaaggttttgcttcccatcgagatgaagctcaactcatttcgtgtgaagaacttcaatgaggagtccaacgaaatagtcatggctgaaactttggacctcttggaagaaaggagggacgcaacccaaatgaggttggcggtgtatcaataaagggcaacgcggtactataattcgagagtctgcatgcatgccttcaaaatcgaagacttagtactaagaaaagtccttctaaatactagagatccaggagtaagagttttgggagccaattgggaaggcccctatcggatcgctaaagtcaacccacccgggatctataagttggcatgtatggatgacatggtgataccaagggcgtggaatgcagcacacttgaaggaatatcattgttgagaaggtaagtctggtttattattgtttagcccttcaggccaaaaatccaaggtgataacctgtaaggccaccagagtgagattcctctcattttttcttatccatcttgatattctaatgtaatgaaacaaaaggctaaccggatggcatcaaaatttctctatgaaatataagaatattaccttagagttagtcaaccacactttgctgctgaatgacaaggcaatgttcgctccctttaaaaaaatgacaaaaatagcgaatgaggaagtattgtacaagaatttcttagttggcaaggattagctacccttgctcgacaaaaaaagtatgcctctcctcacaaaaattgccgagcctaaagggctctggaaagatgctcatggcataatgctgaaacgagagggacacctctcaaacgtaagcagatattcataaattaaggggagacgcagtcaagtacaataattccccttccatctgaataaaaggatgaagaaacaaaaagaggctgagagtgctcaaaaatacataatcccttaagtagatgcccgctaactatggtaaaaaaatagcttggccaaagggtgacctcaagaatcacttgaccaatgtcagttacgaaaacgcgtggccaaagagtgatccctagagtcactcggccaacaccagtcacgaaaatgacttggccaaagaatggtcatcggtcggccaatgcaggtcactaagatggactgagctaaagagcaacccatagagtcgttcgaccagtgccaagtaaaatcattgctcgaccacatgggagatgagatcgctcaaaattgttggggcaaggcccaagaggccctgccctacaacaagaccgattcaaccagcacaatcattcgacaagaacacttaaaataattcttgtagaatgggggccaagtgtcaactccaaaaattagcgctgctaatttctaaagttagttgactagtcttggagcaattaatgcaagcgtgttcgataagtttacccacttggtatataagtcgcaatgccactatgattctcacaattcccagggtacacctgtgtcattcgctgtctagtcccttagtgatccaatggggcgagagcatgaacaaaagaaggagaggttgtgcatgtgaggatagattccatgggcatgtttgtgcaagggagtgttgggacaaaggcatgggggctcgcatgcgagccgagggtgcatggtgtagagccttgcgagtggatgttgtgtgtggtgagtgtgaatcttggtacgggggtatgggggctcgcatgtgagcccatggggggctcgcattcgaactgtgagagtgtgtttggtgtggtgagcttaagtcttggggtgatgagagttggcatggtgcgagaagatgagaattgatatggtacggaggatggaggatcgcacgcgagccgtgaaggggaagagatgggagccctggtgtgtgtggagtgtgtatgttttgaggaggggtgcgaatatgagaaagagtgaatgcatgatgacaagaatgatattagaaaggaatcaaaggacaaggcgtgcaagggaagagcatacaaccatgccctctgaagactaaaagcaaggaggttcaagtagtagcgacaatggacttgcaagatctgacaacccgaccaaggatacgctataacctctatcctacaacctgtacccggtgaccaccccgcgtgcaaccagggaccacgcgcatgtatacggagaccatccatctacaacctgcaactgaagaccctccgacactagacaaggatacggggtgccaaactacctccagtatctgcaacatgcggtgggaaagcgacattttgtccccacgggaccactttgtacaccaggccattagagcctataaatgcccccatctcaaatatgaaaagggttggaaaaatatttagtgtaactcaaatcttgaattcaatacaaagagaaagcaatattcaaacattttttttttcacctttatctttgtcttcatctttatcacatttctgggtaactttgtattttccgaccactaacttagttgacgaattctcaccctcaacaccaatttttattttcaatatgcaattataaattatattaattagttttaataaattataaaacataaaattatataatagcaaatcaagattctttaggcgacatcacctcttgttccatattaaaaaaaaaaatgcatttcaccacacccaaaaagagaagtgaatatttttttatgttcaattttatttatttttttcttaaaaaagggatcacatagtgcaaatctcttcatcaccccttctgtcattctgacaatcttgggaaccacatgtcaactataggagccttataccttaacctactttaattaggttatcgatagtcacctcaagggttcccatcacacagat

SEQ ID NO: 296826 - DNA, 5343 bp, Cannabis indica
acacgagtacgtcactctggctgcttcatggaatgatgactgaccctgcagaccaacacgagtgtttccagcatgctttgtcctcactcgcatgcttcttgggaaaacttccaaggaggttacccatcctaaaattacctcacaccaagcacgcttaaccgtggagttctttcatgatgggctaccgaaaaacaagatacaccttgttgatataggtagtaccaatcaatccatttaagtcctcttcaactgtgtagtctcatacctatacagtctcataatcatcacacttgaccttccccaagcgatgtgggattgcacagcttactcggtatttctccttacagatcacaggactactgactgtcatagttctagtgaagttgttcattagttcttggagatgtcactattctgcaaaattgggtagactcaaaacttcccgattagtggctaatttgtcgatattgcactttgccaaaaaggtgaaatatcaaagtgtgaatttgaatggtcacaagtaagtcgtagctctgtttactaccaaaaaaaaaatgttagatgcttaagacagaactagaattgaataagtaaaacccagcgcaccaggctatatgccaacctaggcgctaggtgttctttagagagcttcatgtggctcgttttgatacttttatgaaatgtgcgattgtgaaagtggtctcttaccctaattttgaccaaaataagaagaatgtccatagtaaaatttgtgtttgaggagcagaaacatgcaaactaggttgtatgtcaacctgggtgctggggccctattttgaccaccaaataactctgtttgtttctcgaaagcacatgtatcttaattattgatgaaaatggagaatatacccgaaagacttcgtgagaattgttgttggaaatggcacagttaaccttggcactgggacctagcacaaggtcaactagggcattgggtcccagttttggcctgcaggtcaatctatttctttcccgaacgcgattgtttcctcattttggatgaaaatgaaggaaattcttaagaaatatcttcaataatgtagttgaaagcgtcctaggttgacaatatatcaacttgggtgatgggtgcatcaacaagttgacctggacgtcgagtgcccaggtacctcaaacgggaagtgctccaattttgattctggtgcctattacatgcttgtgacatgtcttattcatatctaagtatgagatttgaacaatatgcactaagacggacctaaaaactaaaaccctagcccatgatgttaacttgggcgctatgtgaaaccctaagcacccaggttggctttcgtgatgtcgatttgacatttttcaattctctagctttggacttgcagtcttctagacttgttggttcagaatactaaaagatggtgacttgaaaacaacttagtgggatccaaatatccattctgaagcccctgaagtcaacctgggcgcaggtctagggatcctcctagagttgactgctatgactcaagacacttaactccatgaatatttttctttttttcacgtgtcaaactttgatgtccacattatctgggctagttttagtgtaaacatattaatgccaaaaattgtgttcatggtctattttataccatcttgaaaaatacatggtctaaattgacatttaacaaaatagagagtcgaatcagtaaattttgaaaaatacagtgtccaaaatagtattttctagtgcattgaagcataattgtacatagtgagccaaatataaatttttttttcagatcttatcctggagatagtcctaatttttttataattttgttattaaattaaaatatgtaacctcggtatcaattcatacaagaccaataatatttctattttgatattttttttttgactcataagtaaattattttatctaattttgaatgtatgctatgccctgttgttacatgccagttcattttatggaaatataaagaaaaatacaataatttcatgtgatgttaacacagtgtttgttcgcataatacaatatttactcttttgacaaaacataatacaatatttttaacaatacaattgaataaaatcggtaccatgtgacttatcataagtgattaataataatcctcacgcataatatttctccacaatcacaaatagtgtgtatcaattattacatctaattatagattctgcatcaattactacatctaattacacaatctctccaatataacactacatataaattctaattatagattcttaaactttcatatctttctttttactttcttggaaaccaaattatctttccaatatgactaatatctccccaagccatgccatgacataagtgagtggagtcactacagtaacactatgcatcactatgatttttcttgacaaaactaattgcgcatgcgtgtgtttcaataatgtgtacttgttttccttttttatttctaactctttttaattgatagataccaagttgggtaagttacaatgaaccccaaaataactcaaagcatcaaatgggacagcattatggacaagagtcatatcaaataactgtggtgttacaaacactagaccaagggcatgtaatatgtttgtggcaaaaatagatgaattctatctctttgcaagttttatgatgaagcatgtccacctttcttgaggcaaaaaagaaatgtggttctcatcctttactttgaagatatctggaattggcatcatcatcatcatgaagatcaatcatggtctaatcttatctacctattattgctagtagtagtaaatatttaaatggggttttgttgattttgtattttactaggatggatatctgttcaatcctaaaaagtctgtcttaaagagagttttggagtaataagaagtcaaagggagtgatctcgtttacacaatagaaaccaataatcaaatcaactcttgacattagaaacattcactcactacatataaaatattactatacactcgtttgaactattgatacttttacacaaagtcatgaaacagaatgacgccttcgcttctgaaatgggaatctggtttctgaatttgccttgcccccaattggcttaatactattaatcctgaacaagttgttgagtttactcaactttctggcaaatgatttgaatagcttgtttgcagggtgagtctttacaagctcttgtttcattgaaacatgatctttttccaagtcagtcaacctcattctcattctagcaacttctagtttgagctccctattctctcttctcacggacgcatagttatctctaggcgagatggctccactccctgcaccgctgcctgaacgctgaggatattgaccattcattgcaccaaaaaagaactgattgtgacctccattcattgcatttcttagccttatttgctcaaagtataacacttgaactgccatttgaactggcagcctttcgttctgtgctgcatggctgcaggcttcttgagatagcttctggcagtcaatggttttgcataggcggtagcgctctgaatccttaatgtttggatgaacctgtagagagattgaacatacatttaagctcaaagtcttcattgaatcatgcagtgaacagttattaacataaaatgagagatagagagttgctcactttgaggaaaatgtctacagctctatacaatccatcactcacaatacgagcatggtctggaagtagttcagctagagctatgaatttagttggcattaagtttgagtccaatgcaacttctgctagatagttatcaagcaactttgataccttgaggattgaactttgttttggagatccagggctatcgaaatcatatatcatttcactttcatctctcaagtgattgtcttcttcatcatcctcatccaggttcaagaatatggaaaagatcctcacaatagtatctatgtcatagatggtgctatgagtgtttccatgtgaatttgcaggaatgaggatgtcttcaagaatcgcctgatccaattggagaccgatccttctttctaaatctgatctgcaagaagtagatgctgatgctgaaatagctgttttcaacaaacttgagagaaatgccattggaactggacacttccttgactgagttggtagtaagttaactattgcttcaacaatgatcctttgtttcttttgaaattccaaatcaagaagacttcctttgaccatttgtgaatccctggctacaagaccttgaagagagttgtgagcataatttatcaaaatcttgctgatcatgtcctgttttagacccttggatttcacagcagatagaactctttgaaaaaaatcaagactgagtactgcaagtgattttccccaccaatcagcaggagtttcgggttccatactttggacaagttttgtagggaagttatggtcaagtttcaacaaacctgaggtgagctgctctttgcaggcattacttgcgatcgcattgataagcctgcttaccaagttgatctcttctgcaaatggtaagagagtttcacaacgatgaagaacagctatcgagtttgctatgttggggagaacaatttcccttagataagcttcaactcgggcttccaagtttttctcggcgaagtcttctgtcatttccagaaaacgagctgcacaacatagcacggctacattggagattgtaatctcagtatttatcccatagcaaaatcttgcagctagctcaaatgcctctggtcctccaggaacagcaacaagatttatcctcgaaattttagaatctttggcatccaacaacaactttcgaatccttccacttcgagaaacaagagggaactacaagagaaaacaacacacaagccataactcaaccacaattccttttgttcatcatgaagtacaaaaagaaactcatgacatcatttacttatcccataaaccaaaacatattatttaagtcaaactttcagaagactgtcattgctagtagttcgattaatactaaacaatcattttctagacagaacaaaaccatgtttttcctcaccttgtgaagtggaaagcttgaagttcctacttcaacagtaatatcactggaaacatcagagataggcctgcaagtacatccaagattaagaaactgatttaaggggtcatatggcagaaagacaagaaaatccaacaagtcataaaactacaaacacatacatgtttttcatttctaacatatcaaaaactttgcaagtgctcttcctcctacagactttcatat

SEQ ID NO: 296827 - DNA, 3167 bp, Cannabis indica
tccacgtccacgtccacgtccatcaatcccctacccaaaaataaccacctaaaaattctaataaattgagaaattaataaatatatgtatgaaagcactatgcaaactaaagactgagataggagaatagcatagagagagagagagagtgatagctatcacacacctttgaacagacagaaagcaaagccaagctgttatttttttattttaattatttttcgttttgatattaaattttcataaagctatacccagagaatcttggaacaaatctttcacagttcagacacagcaaaagatacacatgggtcactaccttacattattattatttttgtcaattattttttaaaagaaacaacaacaacaacaagattataattattatctttagtataatttaagtgattttataatttgggtcttatcatacaaaacccaaaacgcatttccactgtcaaccatccaaaactcaagaataaactcaagaatatatatcaataaatatatatatatatattttctcccttccctttctttcattcaagttatatattttctcttttgttacatgggaagctctcacgagcgagtgaaagaggccgtagtggtcaccccatccgaggcgaccccaacttgcgttcttccactctcagccattgactcccaaccctttctccgattcaccatcgagtatctcttaatctacaaacccagcaccagactgggcctcgaacacgatgggtccactttggcttgtcttcttaagtccgccctgtctaacgctttggtcccttactaccctcttgccggaagagtacgaaccaggcccgacggttcgggccagctcgaggtcgtttgtcgggaacaaggtgcagtcttcatcgaggccgtatctgaccgtacaatctccgatttcacaaacaaggccccaagacacgtgacccagtggaagaaactcctctctgtccacgtgtcggacgtcctcaagggggccccaccacttgtggtccagctcacattactcaaggacggtggagccgctctcggcgtcggcttcaaccactgcctaatcgacggaatcggtagcgccgagtttctaaacttgttcgctgagttagccaacagacgagtcaaatccagacccgaacctgtttgggaacgcaacttacttgatccgaaacctgggaaaggaattcctagtagtacaagtagcttcgttactctccctgagttcaactctgttcccgacatttccggattcgtaacaagattctccagtgaacgactcactcccaccactgtgacctttgaccgtacatctcttgtggagttgaagaatattgcacagtccacgaggcttacttactcaacgacattcacttcgtttgaggttctctcggcccacgtatggaggagttgggctcgggctttaaacttgccaccaaaccaaaccttgaagctccttttcagtattaacgttaggggccgagtcaggcccaatttgccatctgggtactatgggaacgctttcgtattgggctgcgcccagaccaatgcgaaggaccttgaggagatgggcctgtggtacgcggctgggttggtgaaagcggccaaggatagagtcggagacgagcacgtgagagcggtgattgaatcggtgagcgagtcgagggcgtgtcctgactcggttggggttctgatcgtgtcgcagtggtcaaggttgggtttggaaaaggttgactttgggcttggaaagccggcccacgtggggcccatttgctgcgataggtactgcttgttcctacccgtacctaatcagagggaggcagtgaaggtgatggtagcagtccctgcaagtgctgttgacaagtatgactacctcataaggaaccattacacgtgaggttcacccaacgtgattatagctcaccccgttgactttttatattattgacttcctttttttaaatcttttgagaaaaaaaaaatgagaaagatagtgagagagataataataacaattcttttttattattagtttttttttttatatatatatacacttaatttaataatgctgaaaatgaactaactaaaaatcctaaaaactaataatcttaagtctctatctcatgatgaatttaagtttttgagtatgtttaaattttttatgagtaaaatttggtgttacactaattcccccaaggtaaaaggattcattggaaagattggaataaattttgcttacagaaaagcaaaggggggtttaagttggctatattaggaaaacaaggtaggagacttttgacaaggcctctttctcttgttggacgagtctttaaagccatatatatatttcgctcaatgttcttttctgttagctcagttgggggctaataagttatgtttggcgaacggagggttggtattcatgttttgaatcagccatggttgccttcagatgatgatcatgttcagtattctggtttggtgttgcagaatgcttggttaaaaatttgttcaaagtgggattaaaagaatgggatcataaggagattttggaggatttatttgatcagagtgatagagagcttattcgtagttttcttttaggcactcaaattagtactgattcttggtaccggtctaaggaatcctttgaagtctatacgttaaaagtgcttacaagctcggtaggtggagtttggatgataatgcagggttttggaggagtttgtggaatttcaaattacctccaaaagtgaagaatttttgtgggggactcttaccaacgacttacctacactcactttatttacataaaaaatggttaatgtggatgaggtgtgtttctggctgagcatgaaatttagaaaactgtaaaatccgtttcaatgaaatactgaaaaatcaacagttaaaatcgtcattgaatgtatggtttttatattgatagcgaatcgacccgaaggaccaaaacatgtattataatcgtaaataagtttaaaatttaaggtatatataatatttattacttatatgtactagatagatgttacttcccaagtcacgtatgttaattttattttaatttttaatttttttaatatcataattttaaaattaataatattctggtaattattgaaatttgaaagtat

SEQ ID NO: 296828 - DNA, 2712 bp, Cannabis indica
ttttactttctccccatcacaccactgcatttttgatctcttcttcttcaaaaggtctttcaatgcgtgaggctaggaaatctagtaatgttttccattcaattctcaccattatacgcttaggggactaattaagtttagaatcaaaaggcaatctcctctaccaaaagaaaatttaaaatcttagtattgaattatcaaatcttacttgtcatttgccacacacacacaccaaaaaaaaaggagcaatgccatagataggagaacatgggccatcaatctcttgcgacacacgcaccaaaaaaaaaggagcaatgctatagatacgagaacacgggccatcaatttttggttgctaagctattccgttagccaactcattttatatggaagcaagtttcaatatgaagcaagtttaaggaataattatcagcgactgtttcaaagcaacaacttttatctaacacctactcttagtactttataaatagaagtgagaaaaattcattgaactattgtattagcactctacaatgtggttttaaggtgtagattcagttactaaatgacatgctttttgtgtagtcaaacttcattcccaaaaaagtgttttagttaaatgacttcgtaaagtgtagaattttctcttggagtcatacatttaaagatttcttggttgttcagtttgaaagcaacgcagagggaaagagtgcataccatttctcacatctagtaaaatgtagttagaactagaattctcttttgataaatcatcaaccgggtttacagcttctaatttttttctccattcggatggttctagtggtgttgctcgcatagaaggatcaagcaaaggaagatgagcatcaccaccttcaaactggacaagataaaatttgaagtgttacaattatgtttaataagtcaaatgccccttcacagatacttgaacacattatgtaaaggatcaataaaattcactcattcagagatgtgtctatgatggacagacacagaatgtgtatgtgttttttcatagttattagctcaaatactaacaaacacttgagacacgagttagaaaactgatctaaatgaaatagatacatatgaatgaaaaagaaagatggtgtggtttacctgaactagagaaggcttataccgcaacctcaattttggaaaggcatgcccatttagtgctggagaaacttgaactaaaatgtcagaaaatctgtcatcatcttttaaccattccacatatgccaaagcatcttttgatggaccactgtactgcacaaatatgaaatacatattaatacccaggtgctcaaaaagaaagaaatagagtaagaaaattcactcaaattgtatgtaatcatcttttatttctacattttgaacaatgtatgtgaaaaaaaaaaaacgcataaaaagtgtaaaagaacaagaagttgcttccaaacaacacagatatacatgataaagcataatatatgaatagcaatatagcatggcattgctgaaataattatccattcgataataagaaaagggatagtacctgagcgttaatcccttgttcgtttacatatatccgaccacgaatgtcgaggccctaaaataatcaaaccaattattctaaccaatttggataaggcatttcaaaattgttgaaataagcataaaattcaatactgttgagaaggtttaagagttgaacctccatgaaagaaagatgtttagccacctcagccttggggtcttcgaagaagagaaaatgatagaagttgacgacgacaaaatcgtcgtcgtcgtcgtggacaagctccgactctgtaaatttgcaatggcgttgtaaggaaaccctaggaggagtagttgccaaagcctgtgtagctcgattggtggatttcgtgggtgttgtagaggaggagagaaatggtttggcgaggcagagtgtgaagcggagcgtgttaggatgaattggagcaacagtataggtgagcgtagtagtagcaccgcagagaagtacagaagaaactctcatcatagctttcctgcggctttgccttatctcaggttctaatggtgtccttccttgccttcatgtaatggtgttggataataacggagatatgaaaagatgaagataggaaatgcatacgacacttcctccttttaaacgacactaatattaatttttttgtatgaagtccataaatatccattaaaaatagaaaaaataacattaatctcatttgaactatttatcagacatttcggtccattgtgggtggtgatgtggttcgaactgtctggaactattttatgagtgttatgtcgagtaatttcaatgatacaaatttagttcttattcctaagaataatcttacatggacgggggacttgaggttgattatgctttgtaatgtgctttgtaaggttatcacgaaagttttggcttgttaaatctttgtgccattagaacttgaaaccagaaaccaggaaaagaagaacaaagaagagaaagagagaaagaacaaagaaagaatggagaaggaaagaagatctcattgaatcaagagtgatacaagatatttatacaagcagggaaaacaaaaccgactaacagaaaatacagaaaagagttaactaactaacaacctcaacaaacaaatcataacggactactaactctcaacagtagtctta

SEQ ID NO: 296829 - DNA, 2460 bp, Cannabis indica
agagacaagattaaaatactcaatgtcaaagagataatcgccatagcaaaaatttgaatcgcaatagaaaaatacaatctcaaccaaaccacacttataccctgggaaggccggcacacctagctggagaaaataaaataactttctgtaacaataaatttagaagccagaagttctaaaagaaaagagtttaattggtcataaatatcactaacgttaacaaacaagaagttttcaatttcaataaatgctaatattttttttacgatgaaatgtttttgtaaggaaatgttaataattttatttacaaatcaaattataaatattttttgcttgaatttgttaaatattttttttttaccaaactagctcattgcattattttgatgatcacattaataatggacttgccatgcaaccgaacctaaattaacgttaaagcaatagtgcattaccataattaagtcaaattaacgtttagaattatagtaagtaagtgaaattctgcttaagtcaaaagataaatttagattaaaactaagtcacatcaactctaagtcttaacacaatcaagaaaagaacttgaaatttgttctcacaaatcaaaagaaaaataaattttacaaagcattaatagaatcgttacaaattgtagttccacgaaccatttccgcaacaaaagacttgagatttttatccgaagatccatcttttttagtagcctcccttgtcaaatccttccatttcattgcatttcttctaatttccgccccatcttcattttctcccgtgaccaattccaaacacctcttaatctcatcactttcaacaataccattcttgttagggtttactctagctcctgttttccacgcatcctcaatcaacttagcatttgttccttgatctgaccaaatgggaaacgctactactggaacacctgcagctaagctctctagggtcgagttccaaccacaatgactcacaaaacatccgattgattgattacacaaaacctccacttgagaacaccatgtcactatcatcccaagcttcaacaactcttccctataatttattagctcatcattgtcattgtcatcgacatcatcgtcatggtacttgtgatgacttttttctttaatgacccacaaaaatggatgacaaaaatccaacaaccctttagctatttccttcatttgttccttaggcaaatccaaaagactcccaaacgacacataaaccacattcctttcattcttcgagttcaaccattcgatgtaatcatccttcgatctctcgaaaagatctccacgaaacaccttatcatcaccacaacaatctttttcatcgaaataggctaatggaatcaacggtccgattccaatcaacctcacaccgctaatcgctcccaacgcctcaccctccaactcatcaaaactattgacaagtataattctcttctcctttctagattcaatcatttcaaattgctcctcaaaactctccataaccatgtgataagtaccttcatgatccataaacgaaggaaaatccctcctactaaactccaacgacaatccaattattgtcgttttcaaaaaacgacaacaatcccttctctcaaaaacctctcttatcaaatcaccacaaccgtaaaaataacgatagtacaaagcaaaaaccgtcgccggttgaatccacaacatcgccgacggcagaccaacactgtcggcggcgacaccagcccacggcagaagaagcgtgtagaccaagaaactgtacggacgaccgtcgtttcgacccaaaacgacgagatctcttaaggctcgggtcccacaccgcttcatctccgacaagtagcggcgccggtcatcgccgattacggaatcataaccgtcgattgagaacggggcgaaggttatgaccgacccgtttgaggtttctatagttttgttcgggtcggattctgacccgtttgctgtcatgaggcggtaagcgtggagagggatggcgaaggtgacatcggcgccgccgtggacggcggaggtgagacggttggcgaattgaagagttgggtttatgtggccttgagctgggtaggttactaagatgaatctgaggcgtgccattgttgagttgagttgagtgagtcgggtgagtcgagttggacgagttgaactgttattaagttttgatatttatatgaaagtgaaggaaagagagagagaaagtacgttagcaatgacgtagttacgtttttgcatggttttgtgtcgttttgtatcttttaattgtcgttttgttagaagttgtattatattttgcttaaattgtcgtttgtgtagtattattaattattttatatttttaacaaattaattgttgtatttttaattgaattgtttttttttttttttgaaaggaaaatcaagtcttattaaccttcaaactctgtca

SEQ ID NO: 296830 - DNA, 6024 bp, Cannabis indica
catgccaattcaaatacacccagtttattgtgccacatatttcaattaaaaaaaccatttttattaactaactgcacgcaaaatggtactctattagggctcgtttggtacgttgtattaggtcgtattatattgtattatattatattgaatgtgaatatatatcatatttttatataatattattgttaaatttcaatttatactaaaatattatatagttaggagctcataaaatttaatatttcatataattttacataaaaatattgtataaaatataatttaatataatattatacaatacaatacgatataatatagcttacgaaacccttaattatataatatatattgtttcataatacatacaaaagtatgacctcaattaattaaatatggataactattatgaattagaaaataaactttattaacaattgtgaataaatgtccattactaagaaaaaaaagtgtaaatataaggaaagaaaatataaatatttttctaatattaaatgtgagcatttaattaatggaattattagtttaacggttttttccgttaaaattaaaattgttaaattaatgaattaataattttttaaaaaaaacatagttttaaatttttaaattgaatttaaaaaatattaacaaaattaaatagttatttttttatataaatcttaatttaaatttgaattagacgtttatttaattaattattcatactttataacaaatttagtagttatattatttaaaatatctaaacttatttacttattttttttaataaaattagttagatatattttttttataagtaaatttaaaactagattaaattttatatacttaaaaaatataataagaatctattagatatataactttatttttggaatggaataatttttttggttgatggctaaaaacactttgagtaaagactttaaacatcatccccactgcactggcttaaaattgaatcatttgtattttgcggatgatcttcttctcttttctcaagatgacacccactcaattaagctcattttgagaacttttaagagattctttgaaattttgggtttgtaagctattgtcagtaaaataatagtttattattctggtatgataaatgaggatattcagcacattttagattgttcggggtatgttagaagttctttgccttttagatatccttgtattccaatttgttaaaaaaaaaaatatctaaagtggaatgtgatagcatcattgaaaagttggttgctagaattcgagtttggagtaccaagaaacatctcttatgcaggtagatgtgtgttaattaactcggttttattagctatccacatctatcgggctcaaataatgattcttcctaattattttttagggagaattaatagtatttgtagaaagatcggttgattcttcttccccaggccttgtctcttggtttgatatctgtcattctaaattctgtggaggtttggagtttaggaatatcgagcaatagaatttcggtgtattgaaaagatatgtttgggatattgatcaaaagaaagataatttgtcaataaagtggattagttcgatttatataaagaaccaagattgttggagctacaatgctccacaagggaagagttggtattgaaaaacaattgtagaagtgaaggacatgattaagagtcttattggctgtaaagaatttctggccatggaatttgagatttccaagctttgtgatagaatgtagcctcaaattgagtcccctagagtttggaacactttgatttggaatcagtacattgatcgtaaacacaaatttatgaattggctggcttgcaggcaaagattccaaactcgagatcgtctaataaaatttggctgcattcaagttgatacttgtttgcagtgtgatcttgagcaagaatctcactgtcatttttttctctcttgtgagtatagtaaagtcatttgtaaactgatatttgattgggttggtctcaataattagaagttggagctcgaagcttgtttgaaatggattaaaagatgtagacaatcaacattccgcaggaaagtttatattgctactgttaattttgtactatactgttcatgggaagcaaggaacattgctctttggagtaggaaaatgtatattgtacatgctattgtaaatagaattaagaaagcaattagtgaaaggttttctcttcttaaaaaggagaaacatagtttagaagatagattgtactttggaaagataggaatgcctaactaatatgtacatgtgtaattgatttttgagtaatagtatttcttatttaccaaagcaaaattattattatttaatttaataattacgtaatagcaacttcaagcaaaatgcattgcatgttactaatacctagtgtatatatatttaattatactatatgttaatattacatgcaatgcatgtatatatacttagttatattcttagtttttagtttagatatgtatatttttagttgtataattatttttatgttattcaataaacaacatcatttttttattaagcaaatattttattaaagcgctatatttataaaaaaaaattataataatatttaacatttgttattaattattagtgctatttataatacttttattttttaaaaagaaaaccatattatttttcttattattttttaaggaaaaaaaaagattattttcttagtaattgcaatagataatgcattacaatagtgattttttaagaaacataaatatttttttttctattttattgttttaaaaataattataaatagatattttattagatatgtgctatgtgtttaaatttaaattgtaattttaaaatatatatagccacatttaatataagataaagataaaagagaatgtgtagtgagtttaagtttgaattgtaatatttaaatgataaaagataaaagagatctgaaaagtgaatttaaatttgaattgtaattgttatcctaaatttcgcacaaggtgacgtgccactcaggaaggtaacacgtgttctacatatttggacctggatggaagttaaatccctttggaaccataataagtcaaagccaagttgactagtttatcctccaatgtccattatccaggcaggtctcagacctcacactactccgaatagatcaggatgccgagtaaatgccattcgtcgaagagttgcacgcaacgaataaagatagctagatattttttttaatatctccacaattatagcccatttagaatccctattttagtatgattgatttgttatataaagcaaattgtgggatttgatatttaaacatttctaatttatctcccattagttcgtgataattgtaatgtatttctttataaatagtgaaaacgatatcattgttgggggctccttcttttcacattccaaaagaacatttattttgcagaaatatttgtaagctttttcaaggattattatgaaactcgcctggctggactttgtgatcttaataattcctcataagtaatacaacaaaaaggggagtacattattaccgttatcatggattgaacctctacaaagactatgtgtctttttattcctatattatcattaattgatcaaaaattattattgctttaaagactttgtgtcattgactaaaagcaaggtcaatattttggtgctttcattgagagctggagtacaatcttgcttttatcaatctacttcttcgatttgacttacactcatttttacaaggagatcctcatcaactgagccacgcaatccaatgtcaacaaatcccaatgtccatgatctcactgacttaggggttgataacccaatgccctacttccacctcggggaagttacccacctacagtttctgccaactttaatgctagaggcactgggattgcaacaaccctcattggtgtcgcgcccagtgtctaggaggctgggacgaccaacactcagtatactgaagaaactggacctggcattggtcaaccctctgtaggagagccctgaatttatttgggggatagctctgatctagagaagggatcctctaggaaaagtccaaacgcataccaatcgctgcactataacaaagagaaaacgcatactattgtgaaccatgcattcgaacagcattgacgtgaattccaggagtggatggatcgtcaagctcaatctatacaagcccaataagaagaaacaaattgatgttccagggaggctactaacatgatcaaacaattcactcaggagactaggggcaggggcaataggatcaacctctaggacaagattcccagaaaggaaaaagtccctacatctcgggcaaaggacaagagtacagatcggaggaacgtccaactaattatatgcagacgcctgggtgggatagatcgtcaagatctaggccccaaaactaaactatttgtcgacctaaggacggccagactaacttctgaccaaaacatgaagggaggaaggattgtatgcctcctcggcaagctggaggatcttaggcgtaaattagtgtatacaatcaggatggaagagttaaggaatcaatatggcaactaaaaacctcgataaggttgttcaagattccaaagtgggcagtcagtctctagcaaaactgatgacagagccaatagtatgccccgataagataattgaaggtgtcagtacctccaattaaaactaccaaacaaaggaaatccggataacgtctacaacaacaagaacattcctaaacaagctaggtccaccaaccaaaacacagaaaggaggaccaagggtgactcagtcttccaaagaatgggacctagggctaggaacgaccttaaagaatatttaaactgaaggagaggcaattgggatggacatttttcccccacctaataatcagttgatcaatttggaaaactttatagccttcgatgttccaagggataaataggtgacacatgtcggtcagcaggcaggtcaacttgattaaggggtgcaagcttaattggatcaacttaaaagcctcattcaaggccttaccagtccaaaactcaccgacctggaactcgataggataagaggttcgccattattgttctggatcaattcctttgatttgctgaccatgtttaagatgccccctagaagatgtacgtggggaaggaggatccattatcacatatcaaataattcaagatacaaatggacctgcaaggagggaacggtgatgtacaaagtagaatttttctagctaccttggcgaaggctgcccagtagtggtacttcaagttagcgtcgagaaaattcatttcgtagaatgacttcccagcgaaattctatgcacaattctcttctttgatgcaactccctacccacttggaaggcctttagaagtaaaacaaataccgtggaaatctctaaaagattgcatctatcagttcatgaccgaggtgaccaaagtgaagggatttatcaaagaatagaggttagcagctgcactttgaggaatcaaactaaaaggtgaactttggaaagacatcaaaaagatcaatgttggtttagtgggagagtttttggatcaagaagacaaatttataaagcacatagaagtagtcaggaaggtggacacgggctgggaggggaaggccgacccaagtcgcacatcgccctttgttattgccaattcatccgtccaacctaaccaaaccttaaaaccataaaataccaataataatgatcatgggtgtaagaagtcttataatgggaacaaccaacacaacaataagaaggagaagttaaaaaataatatcaaacaacaaaactctcgtgaaaaagcgtcgaagtttactaccttctctgtactcatcgatgctcgggagacaattttatggaaataccgtcggttgtgcagtacaagagtgttggaatttattttaccaggatct

SEQ ID NO: 296831 - DNA, 4367 bp, Cannabis indica
gaaattcatattaggatattaaaaacatacatggtagtaaatcaagatcctggtaaaacatattccaacaaattcaacatacttgttagtaaatctagatcttggtaaaatattcccaacagttaatataatgatcaacaactaaaggataactttcaatcaaattaccttgattatctacaaagcttgcaattcgattctcctcctttcttttcttaagacaagcataaaaataagagttttcatcatcaccttttctaagccaattgaccttgctcctttgaaccagaaaactctggagcatcttatcatgagtaaaataccagtcagctatcaccttttcagctttaagaaaattagaatttctaggattttcttgagctttggttttagccaattgaaaatcagcctttgctttctgataagccatctccacactgcccatctgttgagaattaaacactttcaacaaatgtttaaccctgcatagcttaagataaaggcccagtaaaccagtatagtgaactggtttcacccaattttccatcactacccttttaaaatccctatgttctgtccagtagttgtagactttgaaagatttaatccctatatccaccattacatcagaagaaacagtcaccacacaatggtcagaaaccgtctcccattgaaaactagcttgagaattaggaaataaatccagccaatcctcattcttgaaaacatgatcaattttagaatagattatgtctcccccttcttgattgttagtccaagttaaaaagaacccattctcttcaacacatccacttttcttgtcgaaatccagggattagaatactaaatctcaactttagaaattggtctccgcccgattctatcctcataatgaaataagccattgaagtcacctaggatgatccagggtttgacaggaaaccttagatttccaaggcctctccaaagctccttacgatcttccaccttattcaacccatacacaaaagtagcacaaaaagcttctgtatgattagcaagcttaatgtaacaatgaacatattgattagtttcagcaatcacaatgaccctagcaaagacttttttccaaatgattaagattctaccctctatagtagggctggtataggaatcccaacccctaaatttatttgctaccatctcttgcactttattacctctcattttgtctccaaaagagctccaactcccacttcccttattctacaaacatccatcactgtctcttgtttattgatactattaaggcccctaacattccaacttatgatagtactgcaattaattcaagtaattagattgatcacctgcttttagaccccatccttgccttgtagcacttcaaataggttatgttcctgtgttctagccttcttcccctggtctagttgcttaggcttaagcaaaagagacttcttaggtgtttgccattcattagggcccttcatatcagcagctgtaatcctccattttcccctgctctgtcttttcctctactgtgtttttatttgaagtagcagccactcctccttcttttccttcttttgccgattctcctactgagaaacaacaggtttctacttgacatctccctcatttagatcccttcctttctctcccttattctcaacatccttcttatccttatttttactatccttcccagcatcccctttctctttcttaatccactggcctttttgttttcctacattcacccatattgtgcccaaaaaccaccacaatttctacatttaacaggtaaccattcataatccaccccttgttcaactagtctcccatactcattaaagtaatggataatttgaggaggagaatccgtaatatccatttcaactagaacccttgcaaacttcaccatagacctctccttagtcaccttatcaaccattaaaggcttccctatagtgctaactagagcacttagattatttatattgtcttttgtcacataaaaaacattaagatttcatttttcatattatttttagaattagaagcaaattacttaaagataatggtatatctatattagttttgttaaaatcttttatactttaaaattatgttttttaattttttatgggttgtttgttatacagtatatttctattttattgtatggtctattattgttatctcaaattttgtccacctgacgtggtatgtccatgtaagccaagactgaggacacgtggaatacaacattgtacatagcaggacaaagtctccttgcaaggcatgacaaaaccatcaagcaacaagcaaaagagcaagctatcaagaagctacagtaccatgtctggtcagccaaggggagtacataggtcggccaggaggagcttgtatgaccgaccagggtttgagcacaagctggccggccaaaggtgactgtcagaccaaaaagggcctactcaactaaggaagcctgagctttgcaaggaaagttgtacaaaggctggccaacacgtactaaggctggccaacacatgcaaaggttggacaacacttgccaaagctagcaggcaattgatgtgcagccttgacattggaaggcacttggtcggccagaccctagcaggcactaggccagccagtctccagcaattgaagggttggccagcttgtaccctagcaggcacttgtccggccaacttgcaacctggtaggcgcttggtgtgcagccttcaaccaagacaacaatccaagttgcgatttgggcttcaacaacccactaaaatagggggaaaatatcaactattcacctattctttggggataattaacctatttattatttattgttttattatggaacaaatagttgtatctcctatttgttagagatattaggttattattctcttgtaagctcttcttgttatctaagtttttatttatcagacacgtggcataatcaaaaggaaggatacggtcattacaaaaatcacccaaggaaaccaagaaggatggttcccagacctggaaaggaatggcaagcgatgctccctggaaataacttccctcatttaagaacctagaggccgataagggttttgaacggattagacacgtcagcatatcaatccacagacggtcataccttcttttgacacaagatcagatcttgtctcctacactagagcacggtagtggtcatacgtaccctctagtgtacttttacccgaacgacttggttagagactattttacaaaggagagacctttgcgcgacacgtgtccaggctcggataagactctctgcaagcaactgtacaccacacgatgaagaaagttccaaccagccaatggtcaaatcgtcctctcacagtactattcttgatagcatatggggtactaaaccttaggtaggtaaagggtatgccctttaccccatgtgtgcctataaatagtgcaacctggtaggcacttgaccgaccagcttgcttctactctaggaatgtcgggtcgtcccccaacacttcttggtgtcagggacttgctagtcctgccatatggtttgtttggcaagatttgactaactacaagtaggggaaggttttccttgtgcttgagggacctggttggacagtttccccattgtcaacctgtccatacgccctgtctgaattgttgatgagccttccttgcaaaggatctcttattagatcctggctcttctggaagttcttttattgaactgtcttatcaggtcactgacctcatttttatagtgattagctcctcctgatgggcctggaggatgtcctcatggtcatccatcaaccttaggaatttgcgtgtctgttgggaaaaaccatcgcaaccagcagtgcgtgtttcttcttgtcttatttgggtgacttggcctataacttctctaagcctagccaactcaatatcatcttaaggtccaagtgaggctcaccaatagctagttcaccaattcctggccatgtttctcctgcgcggtaacgtagagcggttttagcaatggtttgttgatgttgttccatgttaactaggccttcagttcaaggcactgctagatctgttctgggtggcaagggctgattgttaggattcaacaagtttgtagggtcaacaggattagtagtattggcagaatttacaaggtttgcaagatttgccagattggtggcatcggcaggatttgcaagtgttgtgaccaaaagtggtacgttttacatttatcaactcgcaagtgcacgaatctttattgtattatggagattgtgaagaacgaggtcgaacccatgggaattgcgtgagatcaaaaaaaa

SEQ ID NO: 296832 - DNA, 4354 bp, Cannabis indica
tccaaaattttaagaaatttggaaaaacttaacacgccgaaaaaatacgttcaaacagtgtattgcacgcgtgactattttattttatacgcgtttaaaatagactgtttgaacattattttctatattataaattattctgaatttctcaaaattttgtaggttattttaaatagctataacgtacatgaatatgaaaaaaaattagactaaaaaattcttctggatgccgaaacaagttaatggtgcatcagtacatcccttttaaggggtgcattgtagaatcacccttaatttattatgtattatattaaaaaagttgttatatattgtataggattggtggcttttcagaatggaagatactatatttgttagcaaaagataagaagggttttcttcacaaggataaagttagaggagtttatgacggaaccttatttgagcagatggagaaggaacactcacatcaatattccaacaaaaaactataatatgtacgtacacacatcactcactccttaattaattattaatattccttttacttaattaattctatatcattagttcacaaactgaaattagttgagtgtgcttaattataagttcccatataattaattcattagctaccccactaattaattagagcattgttattggtttcagtggtgtctagtacctctagacatatcacattgcgattggctagcaatactctaaaaattattatattaaactatatgggaccgatatttaatttgaccaataacgataataacacataggaatgtgttagacactattggtaccttttaatatttttcaattaattaacttatagcgttaattatataatcacaaaaataaatatattatggtaaaaatttgtatgtagtttattatgtcacacttaataaattcttctataaatttcggaggttttttcatttttatactttataatagttattttttgtatttttacggaatttcacataaaaatcctctagcaattaatgaaacaaccgaaattcatataacaattcacatagaaactacctaagacatcaccaaagcaacttaaattgtaaatgtaaaaaaaaaaaattgtaaatgtaaaaaaaaaaaaattaaaaaatagtatataaaataatttaattccctaattttttttgtggcaaaaatccttatctcaacatttacacatttgctgcaacatttagttcatgtaaattaatgctaacgaaaaatggactaacattgcaacaaaattactacattagaatttttttcgctcaaaaatttgtatataggaaacaaaattactatataaaaattttccctactaacaaatttacataagaatttaaaaaaaaaaaacaaatatcttatatatgtaatatatacatatgttcaaagtatagatttgtgtgttctaactaatctcatgatcttttcttttttccagttattgatgatatatagagatgaagcttgtggtttggtggtgcatgcatatgatattgtgtaataaagtaaacagtcttcgtttgcgtgtgatgatgagctttattattaataataattatataaactcataatatatagttttttctctctttcatattaatgatcattatctattttaatatatatatatgtataaatataatcaatgcccttattatataactatatatgtatatatatgaagaaaaattggaaattggaacacaaaatgaaaattccttagaagaaagaagaagaactataatagaaaactatatagatatttttataattttaaaagaaattgtaacagccaacaaaatagcccatcagtcaagaataactcgattattaatagtaagagtaaattgtagtatatatatatatacccaaagttttaattgaatttgtacgtggataaatttaatgatttttaacagtagcataactatttaatatatttttaaaattatattttttcttcaattttgtccgtatatattatattttaaatttattaaaaaaaattttataagtaactaaaactatatgtatttagcaaaaacatacatggcctgactcctctggctgacggcttatttgataaaatcatctctgatcaagataatgctctccttaatgcaataccgatggaggatgaggtcattgtagccataaagagtatgaggaaggacaaggctccaggtcctgatggactcccgccaagcttttatctccaccattgggacactgtcaaagacgaccttattgagatggtcatgcatttcttcacacacctagaacttcctaagttcataaatgatacttctttagtcctacttccgaaaaaggagtctccatcaatagtcaatgattatcgcccaattgccttatgcaatgtagcctacaagataatatctaagatcatcgcatcaaggatgagataccttctcccaaaaattgtatcccctaattaagctgcctttgtgaagggaagacatatcgattaaaatactatgatcgcaagagaaatagttcattcaatgggtaagaagagaggcaagcgtgggtatatgcttatcaaattggacttggagaaggcttacgataaattggattgggagtttgttatttcagttttacaccaaattggctttatccacccttttactaaatggattgagacatgtatctcggttgccgaaatcaagctgcttctcaatggttctgtggtgggaaagttttcgccggagagggggcttagacaaggtgacccgttgtctccctccctatacattgtcgttgctgaaactctatcacgcctcctcctcagtaaagagaaccaaggcctgctcaaaggtttcaaattgggtcgtaatggcaccccgataacgcacctaatgttcgcagatgatattattctttttggtgaggcttcagtccgggaagcaaggacgctacttgattgccaaaactcctattgtcaatgttccggccaatcaattagcttcccaaaatcatccgtcttcttctcaagaggagtgtcgggtagaaaggctcaagctattgcgcaaacactgggtatgaagagaatgaatagaaaggcttcttatccaggcctccctctgtttagatcaaccaagagatcagaagacactcaacaccttgtggatagggttatccagcagattcagggatggaaagttaaactcttgtcaagcgccgggaagatgtgtctcgatcaagtctgttggctcgagcttatcgaactatgttgcttcttcggatgttattcctacatcaacagccaataaaattgacaaacttctgagggatttttggtggggagatactgaggagaaacggaagctccataccatcgcctgggaacgcctctgtaaaccgaagactgtggggggactggggttttgtagtactgagactatgaacaaggcttttctcatgaagtgggcgtggaaatttctttctgaagatgaatgcctatggaggcaacttatgaatgataagtatggtaaaaatcaaaacttcctggaaatagaggcaaagacctccgacactatcttgtggaaagcgattatgcgcactcgggaagctttgcagcagggcatctgcagaaaaataggtaatgggaattctacgtccatttggtttgacccgtgggtgcctgggaatcctcgacaaccgacaccttgcgttgactcttcggagggcataagcttggtcggtaacttcatttcggatggacagtgggatgaggatttgatccggaactggtttcgggttgaagacgcccaaagaattctcaacattaatcttcctacttgtatgacaaatgactcctggctctggttgcctgatccaagtggtaatttgtcagttaattctgcttataaattattaaagaacattggccgaaacctggaaggggatagacattggagatatatttggggagcgaagatacacagcaggctgaagatgttttggtggaggatactctccaattgcctccccactagggaaagaattggttattccattcccatgatggacatgctatgcccactctgttcatcttcaattgagagtagtctgcacctcttttgggactgcacttatgcaaaggctgtgtggtttgggtgtatttggagctttaggaccaatattcatttgagtagtaattgggtcgaatggctagattggtttagggattcaaataacaggtcggccacccttgactttaaccagctcttgggaggctgtaacgccccaatattttgccttattttacaaaaatatattttcatgcataatttga

SEQ ID NO: 296833 - DNA, 920 bp, Cannabis indica
tttcgccgcaaattgctcattattaaattataaggaaactctaatactaaattatactattatagtataacaccttgtggtggcgtgccctttagcattagaccatctcatacagtgttaataacagatctaacaaaacataagttgagtaactcagtttagtcaaagtattttcaagtaaaaaaaaagttgcttcaggtcacaaacctataatgaaaatacgcaaatttacatgtaataacctgagccatgcaatgcaatccacgtacgtccaaacaaacttgcctagaacagatcttgtcacattgcacactctcactccgaccatgaacacatttagttgttgagaatggcaaactggaaggcttccaaaagcactagaactgtgggcatggttggaaaaatatgatacaccatcctacaagtgttctttcgctctcatttacatctgggacacggtccagtgtcggaacagtgtcttgaatgcaacactcaataacttatactccacatgatgcagtctgtcttctaaaagagtgtgtgggccaatatagcacctgtctacagcctcatcttgaaagaagggaactggagcatgtgaagctgaaagtgagaacaatggtgcagcagccttctgaggtcgaacttccaatttgggggttccccacttttctccacaaaagtggatggaataccagggaagcctctgcggttggaaatacatggagctattccattacctgactgttctgttcaaatattcttcaagaccactgcttattctgaatgttcaccgaaattacaaagttcatatccatggcgtccaaccttcatacatgttgcagaggttgtctatgctagtggcttgcttaagtagataatccacctgctctgagatactaatgtctctgaaattttaa

SEQ ID NO: 296834 - DNA, 2858 bp, Cannabis indica
ctatatatatatatatatatatatataaatatatttcattcaatccaaaaaccctagaaaccaagcccaaaacaaaacccctctctaataataattacatatatatataaaaaaaaatattattttgtaataataataagaaaacgacaaaatgtcccgcccttcctctccattcccttcttgtttccgcccttcaggtgaaccacacgcgccacctcctccaccgcctccaaactccggcaacccaaacctaacaacctgtctgtaccacaccgatgttgctctcttctctcttacttggtcccgctccttcatgggtcgctcccttcacctccacctcctccaccacgccttcaactctccgccgccgccgccgcagcactcctcctccttccatctccaaatcaagccatttctcttctggaagaagcacggatccaaaaccctcgcccctaatattcgcgtctactgggacttaacccgtgctcgattcgggtccggacccgaaccgcaatccggattcttcctgggcgtggtggtcgacggtgagttgactcttctcgttggagatatggcgaaggagtgcttcgctaagaccaaagcagagaccccaacgactccgcagtctctggttctgaagagggaacacgtcgtggcgaagaagatatacacgacgagagcgaggtttggcgggaaaatgagggatatacagatcgattgcggtgcgtatgaagatttctcaaagctcaatttcagtatagataacaagagggttttgcagattaagcgtttgaaatggaaatttagaggtaacgaacgaatcgaggtggatggaattggggttcaaatctcttgggatgtttacaattggttattcgatagcgataaacattacaacaacgaagattgtggccgccatgccgtgttcatgttcaagttcgaagacgaagacgacaatcaatttgggtcaaaccaaagtcaaaaaaatcagaatgggatggctttgtgggctcaaaattcagctctggaatttgggcatgagcggaatcgagtggagaaagatgggcaaaagcttgtctttttcgtcggtttctatgtcgtcggcggcttcttccggcgggagttcgtcggttatggagtgggctagcttggaggagaccgagctcagttatggtccacctgggttttctttaatggtttatgcttggagaagaaggtgaaattatcattattaataattaattcaatttcgtaattaattatcatagtttttttaattaatttttttactcccctaaaatagctaactcaaatttgtttatgaacataaaaagataatcaaatcatatcaattcaattcattagaggcattattaggagaaaatatgagattctttactatttttatttatatgtatattaatttgggcagattctattctatttctacctactaagaaaaagaaaaataaaaattaattagtttagtttagtttcatgtgtacaaagtaaatgaatcataataaagttaatttagtgtgttaggtgtaagattttgaatgggttaaaatttagtagcgtagcaaatttccaagtagttccttcccgacattgaacaagaagcatgtgaagtgcatctttagttagttcttattggttgtctaaacgtgtatacatacatgacttttatacaaggtattttctcaaaataaaaaccaatgtctagttgatgttgaccatgacccttggatcatccaccaattataatcatatcataataattttacttggagcattgttattagatactagtagtgtctatttactagtaatactttttaaaagttattatattaaattatataagactcgatatttagttgaactaatagcgatattgacatatataaaagtactacgtaccactaataccttttagtatttctcttttatatttattatcatctgcaatagtaacattctttgaagggtataaaaaatttctattatcacttaaagatatgatattttcttttatttttattttacattatttttgactatttttctgccaaaaaaaaaaagtaactatctattaaaaaatgtcaaactaaactatatttatgtcatcaaatattctttaaaatattctcattacagatgttctaatacccttaatgaagtgtatcatacatacccttaattctatgtggtgtggtgactaatacccttaattttattgggatgtatatttaatgggatccaaataattagatatatattataaccgtatcctaataattttatatttgtggggatgttgacaaagtttttttttgggggggcctcttccctactttttcggtagcttagataattttggagatcgcattagttataagggtcttaggaaccacgataattataagggttttatacttcatcttctattaatttggtcatcagtatattttttgaggattccatcttattaaggatgataacgtcacaaaaagctaatagcctcctaaagggtcaaacataaaccttctcataagaagctatggtgggattacaaccttcaatcgaaacaagaaaaaatgctcacaaaggcatccctaacactacattacacagcagtgttgacatcaagtgtcatgttcatattttttatactaatggaaggttataattatagtaatcaatttacaagttttggaaatggttttaataatctatggtatcgaaaacaaaattaaaaatgtttagttacactctcgtataactaattatttggatcttatttttgacactataatatccatttaataagaagaaattatattgtatatttattt

SEQ ID NO: 296835 - DNA, 1172 bp, Cannabis indica
atgccaaacatgcactaagtttccatcaatatgccagttgtcttgatagaataaggctgacatcccatcaattcctggactaccatctccattcattattttctgagcttcaaaaacatcctcagcagtaaaatctttcaagagaaaagcattatgctcagctgtaacagttgttggaatgacattaagaacatgttgcaaggcccaatggtcttcattttgagcttggaagaggttttcaaaatatgatgcaaccaaaccggacaagtcatctttcgaagtgtagacagtaccattgtcatctgttaaagatctgatcttgttgttggtgtatcttgctgaagctttcgcatgaaaaaacttggtattcctatcaccatggattgcagccaatcaattcgtgcacgttgctgccagtattgttcttcgttagcaagcaattcatctagaatggcctctgctttctgaacttgctgagcatgtgaattggatggtgctgaagtgttcgaaaaagggcagtaacatcagcttgagcagaagaaattttttgtttaaggcttccaaatttatcacgatgccaagatctaagatcagtagcacaatcagagaggttttgattcaacacatcaatgagattgccctgagaaagattccagcagtgtgaaataatgtcagagcattcaatttcctaaatctacattttttcaaatctaaagcgtgattgatacttgacagcattactgatggattgcaaatttatgacactgaggattgctctatggtctaatccatagtagtccagatgggaaacttgtggcaagttcaaactatcattccaaactttattgataaaaacccagccaagacgctctttcaaagcttgtcgattccttctatttttagtccaagtgaatgctgaacccgtgtatggaagctcaagaagagagcaaagatcaatagttgttcgaaacgccatcatgtgattatcaaatcgtaaggggcctgagtttttgtgtgaatgagaaaaaatctcatttaagtcacccacaagtaaccaagggtccaaaggagaaacatcagcaagtctctgttgggttttatgccctaaataaaactcaattcatataatcagatttacttattaataaagatcagaaataacattttatgtt

SEQ ID NO: 296836 - DNA, 1349 bp, Cannabis indica
acatcatcgctgattatcacatcagtgtaaatccaaaacactgatgaaacatggacttagtcttttgaatcatataatcacaatcacattccactatgttgacaatactgtaattgtgaataaatatatgttctggacttaacagattttttgcatatattaaacatatattaaaccataagcatgaaaaattcatgcaaacataaatcacttcaaatttcttagattgataactaatcagattgtaatgggttttatttagggcacaaaacccaacaatagcccctctcctcatcacaagagaaaaccgtctgtgattggagagtcgaaagacgtctacaaagccgttttaattttttgtcacagaagccaaagtgattccagttccacaccttcaaagctttcgttgttctgctgattttttgtggcaccctgtatttttgatgagccaagcaagattcattccaaataccctcaatgagttcaccgcacgtcgggtcagtggtccaaacctcaagaaacctaaaaggaggcttcaatttttgttgtctcaagcatgtgtccaatatgaccggggcaagatcaaagctcaagattggatgatgagtgtggcctgtcggtgggaattgggtacaccaattcgcacttctgattgctctgtcgagcctttaacatactcgatcccttaggctacgacaatttgaccaagtgaatgctgatccaatatagccaacgtcaataccctctgtttctaacatgaactcctgaagaaaacacccttcatttcttccaactttcttgcctccccgtttctcattttcttcaagaattgcattcaaatcccctatcacggcccaggttgtgcaactattttgaacaaatcccgttaaatctttccaaaactttcctttgtgtcttgagtagggagtcccatagatgcagaaaatataccaagattctaacccgtatcccagatttcccaaaagtttgaaccatgtatcatagatatcttaaatattaacatttatcccccatctccaagcatcacaaaatccacccaccaaaccaactgctgggatacaaaacgagtgaacataacccagcctatttaaaattgaaaccatacttccctcatcaaccttttctccgccaaaaaaccaaatccactctatctctttcagagagacctcgtaaggtcctctcagtcgtcgaccgtcgaaggccacgacaattccacgagaggcacctcatgatgacggtggtgttgggttttatgccctaaataaaactcatttcatataatcagatttacttattaataaagctcagaaataacattttatgttgca

SEQ ID NO: 296837 - DNA, 5942 bp, Cannabis indica
tttttaattttatttatgtattttctaatatatttatattttaatttgacataatttatccttttatacatttaaatttttaacatagataggtttatgtaaaaaataacttttagattaaaattccatcaaaatccacaaaatgggctagacatgcatgaaattttatttacttacgtttgtttatatcttaagcatataggaggaatttgactttgataccatgataagcattatggagtttcatcttattaactattgataatgagtgtaatagttcatgttcttatatatgaactaatatttttaaatttaatctattgtgagataatactatctaatatgcatttgcttgtaatatctaagtctcgacacaataggaatacaacccaccataaacacgaattgtctcgtacctaaattactataaaacgcaaaccttgtttaaggcaagttataatggagataaagggcttatcaaatctaaaaatgctaaaagatgattgaatttttaacatatgaatgagcttaggtataaacattagctagtaaacttctagtacaaactattttgaggtgttaaagattcttagggagaagatattgaaaacactgacacttgataaagatatgaactttaatgattctctttggtgtgagagtttcaataaatgttgtaagtatgttcagttcaaccatgccttaaagtcttttcttcctttcattaaatccacacacttatttttcagtgagataccaggaagtggactctgaaaccaaacaaatttcattgactttactttattatataaatatatagcttctaggcattaggaccactataatataccaaattcattgaatggtaatactatgaatatgaaccaaccatagtctaaaactcaccacttttcactatgttgtgttctctcttttgttgttgacacgttgatccatgatcatttttcttcatgcaaatgggttttgtataattgtatgagttgactcagtatgaaaagaaaacaagcaataataagatgtggggttttattgatctaattaattaatctcattacaatgtagtttacattttgagtactctcttctcttctcttcctctttacaatactctacttgacatctactacatcaaaactatgtagatatcgaaaagagactcgaatctcagacctttgtataaacaaaccacatgcctaaccatttgaactgctacaataagctataagctattctaatacttttaagtacaattctaattctgtttttagtttgatgtcaagaagcgcatgcatattggcggccgaaccttggccaaagcgagtattgatgaggggagaatccataaaccatctccacagatcaaacccgaagcaacagcaggaatcatcagagcggcgttcttatcattcatcttgtgccacacgaaaacaaccaaacttccaacacacatgtcaatcgcaaagtaagcaccaaccaagaaaggaacagccatggccattggaaggggaacccatttactgatatgcttcggtgaaagatctctcacaaggttagctcctatagcgaatgcaaagaagccataacagagttgcaaacaatgctgtggcaatgcagaaaagccttgaacaccgagaattgccatgtttctgtagattatagcgtatggtgctttgtattcaccgtcggggttcccaacatcaaaggccttgtagaagaggaaaaatgtgacgggtgcagccacacagcctattgctgttccaatagcctggctcacaagcattgaccgaggagatgtgagagtgagatggcccgtcttgaaatcgtgcatcaaatcagaagaaatggacacaatggacttgatcaaaccacaaccaacaagccctgcaaccacaccattctcttttccagccagactagcaagaacaaatagagcaactttaccataattatatgccatgttcatgtctgttaaaccggctccataagcattgcagaagctcagagaaggagcaagcacataggctacaaccacatagtaccatttgagctcaggaaacattattgggataattatgatggaaatgagggcaaagaaaccataaccaacgaatgctatccaaagaggaatgctatctcttacaaacaactcatttcttttaagatcatcaagggtctcatcttgtttatttgaagctgcaatgaaagaaagatactcatatcagttaagttactaaactaagtaaagtttttatatggacaataagaaagaacaaaaccctttttactattatttatcatattattccctttagtggatgtgtgtcactagtcactattatgattttggacactgtaactagttagtggtttagagtattatttacatgttttgagggtcttgttcttcattttggtatggatgcttgtggctgtgaaaaacagtatcttgagaaagttatagagcccatctccaagtatcaaagctatggagatgaaaacctgaatttaagtaaagaaaatagtatttcagaaattaaaaaaaaatcaatgaaaagatgaatatatagttgagaaaagagctcaaatctttagaccttgtaaccatttagacttttcatactgctttctgataaagtttgagggaaccactctcctttaagaccccttatcaagggccacattacaccccatgagagcacagcaccaagaagcaaagacaagttcactagatgggaacagatcatacctgccccaacgtatgtggcactaaaatcaaagtaaaatctgcaaagtaataatcatatatttattcttttcagtcaatcatgatgatgatggttatgatgacataagcaaatcatagtggaatggagtcttttaaagtgtaatacatagcacttacgagtttttccaagctttcaatccaaatgttgggaactgattaaatccacattgatctccacctgaataaaaccactgaaagaaaccccacaagaaactaatggagaagaatctcatgaatccatgaacctgttttctgccaaaaagaaaaggagagccttaactagttagacttttttcatactcaattctgtttgattgagagaaaaagctcattgcttacttagcctttttgtctcctttaggtgtatgaaaaccattgataagaacagcagtagcagttccacttggatatgatagtttgtagtctataatcataatctgcacaaaaagtcatcacataactttcttcagtgaatgaatttaaagaaagaaacaaagaaaagacaaagaaagttaaaaaaaaacctttctaagaggcaccaaagccaatagcccaacaaaacaagtaacaaagagaaaaccagtcatccaaccaataccaggctctttagtactcccaggagtattgcctacagtatcaattcctgcttgttcataagttttctggttcaaacccaacagataagacccaaatccacctgcaattcaccccaaaaaacaacaataaaaaaaccaagacttaaaacaaagttaaacataataacaaacacttggtgttgttttctctaacctccaacagctatactataacatgcaacagcacatgtttggattatagtattctcttgtctagtgaaaggagatgacataattccagctttgctgagcaacttagtccatgttcttatgaacacaaaagcaagaagagcagctgagacattgagatttgggaccaaaccagtggtgagattgagcttcattactataacactgtaaatgattccaatcactatactagccaccagtccacgaagagtaatctgttctgtccatggtgcaattctgttcaaatcctctggctcatgtccaacctcttccatatcctctctttcaaatttctcaatctctgaagatgaagaagaagacccttccatatgtttagtcccattctccattataaaatctataacaacaacaaacatagtgatataacaaaaaaggaatcaaaatcactaaaggtttgaactttagacaagtgtaaacaaaacccagataagaatttacctcaatcttgttattttcttcgaaacttgactgaaaatgatcaaaactcgaaatgggtatctataaatttatagacttttcttctgttcatccaacaacacacacacacagacacagagacagaccaaatccccaaaagggtcagtctgagtgattttaaacttggaaatcaacgacaccacacgactagattttgagagaaaaataaataaaaataaagagatttatgaatgtattaataataataataataatgcgttaattattaacatatgatattgcattgcatgtactacaatacaaattttttgtagtacaaaataggcgttgtagtacacacttaaacaactttccaactaaaactaataaacctttctttgaacaaatgttaggcgaagaaagaaagcgcgaaaattcttatggttgactctctctctctctctcttgctaattactctagagagagaaagtgatggtgggtagagatggaatggaaagattaagatattatttatttttatttctctgaaattagtttaatttgtgtaaaattatttagctcaactaaaagtgtgtgatttatttttatttttttactttttatactagttctaatactaataggttctacataattacgtacacacattctaatataaatatgttatattttataagaatatttgcggtgaaaattctaataaaaaataacaataaaaatattttattttgcaattttgttacaatcatatttttaaatgttaattaagttagttaggtactaactcaaaaatatgtgaagtcatattatttgaccacatactaaataaatattatttattctatatattaattaaaatatacaactttaaataaaaaatcttaaagataaaatattttatcactttttgttattgggatcatatatataacaactgcaaatatttagaagttttacctaaaatatctttattttatattttctaaaaattaaaataatgaaaaataaaatttaaattctaatatttaaaattttaaaacttaaaaattaataaaatattttatctaatctagtattacaccaaacaatacataatattaagttcctgatccttatctaatataattgaatccggtagaataaaaataattttttaattaacttcatttttttaattattatttgctttgatatgatgttatgataatcaccaaattaacatcaaacataatagaataataatgtgtctacatgctccccataaaaaaaaatgaataaataagaccatgtttatatggtaatatgtggtttttcttttaacattgaagaggtgtgggattccatccttctttttctaaaaaaaagtgtggaactattaaattatgtctataaccactaataatatataattttaataggtatatattggtttcgaatatgtttaaatttactttagataaaaataatagagtaactatatcacatcaagttcggtcctgtagtgacacgaaggaggcggttggtacggctggcttaggcttccatttgaaaaaaaaagttaaaatattattagtaataaaaaactaataatacccataatactaaatacgtattgaaggtatgtgataatttaattattttaataattaataaattcatagtttaaatctcaaaacttcacttttttattaggccttaatttttatttttgtctaaagtttaaattaacatagggttcatgctttcctaaaaaaaagaaaattatatatgttgaccgaggttttcgacaaccaataaaatatgagtataataatgagttgtacgaaagcgagatgaagactttttacgtggt

SEQ ID NO: 296838 - DNA, 5777 bp, Cannabis indica
aaaatattcccaatagaggctacccaagtcgtggtgaacgaaggcttcgatgaccatcgtagagagttcaatgcttggatggaactaaatactcgagagacgagggcccgaaaggtggaggtggatcgtttgacgaggaaagctgcagaactcataaaaaatttcatgcaatatacccaaccacatactggtacccgagctcgagttccaactatcaataaaggcgaccctcgtcgccatgaactgtatgttacaaatgaaggggtagtgcatgggccagagaatttccccattaccaggaggactaaaatccaaagggataatcatccaaggtgggagtcccagagggacggagaaagaagatctgttgaggaccagaacgagcctgggcaggaccatgaacagagtaattaatacaatgttcaccatctgagtcataagagtagctatatgggcttgaacgtcgacctatccttcttccaaagttgccatggtagtgggtatgcgtcccttgctcctgattcagtttgttaggtccccacggtggacgctaaattatagaggataaaatttacaatgattggaatggaaggatcgcgggcacctacaacttgtagaacaaaagaagaaagactgtgaaagctttgggacatcagggtggtgccagccgaagagaatctgacgatcaacttagtaaacgatttgaataaagaataagcaaatgtaaataaagaagatggaaaataaatatctccaccgtagaatgatggcaaaggattgataatagtaaagtattgagtaagtgcttgagtgagagttcaatgagcgaagatctgatgatctttcgggactcctcgatccttcctttatagagcttctagtgatcagactcctccattctgaagggtgaacgtgggaagtggtgtttcccttttctaagagtaacgatcgattcttttagatcagttataaactcttcaacgttctttatacttaacttagtcttgtagctacatggttcgtttgggctttgagctttgcacaaagcccactgtattagtggactgtatgtaatgacttgtattgtaatttctatttgggttgtaagagcactccaacaatttttctactttattctttaaaatatatgttgatcaaaattgtacatttattttattttattttatctcaaacatttatattaaatcatacatcatcttttctatatttctatttaccttattagaatgttgggacacgattttatcccgtgatgtactttcacggaatgtattctgtgatacattagatgggtctcagggtacattagatgaatctcagagtgcgttgccattttttaaccttaattaccctagatcaaccccagccctcaaatcaaataactctcccatcttatggttgtcgtacatcacggtatacattccgtgaaagtacattttaagttaaatagtaatataaaataaataaataaaacacaagaataaaataataatattttttgaggagagagcaaaaaagtaactcaaaatgaatataaagcattaaaaattatttgaagaagctctattcctttctctacatctagagaagagaagatgtatcatagattagagatccttcattttatagaaccaatatacattgattgaaaagatgtatctattggagtcttatttttgcaattttctttaaattttcaaagctttctctgttataaagaagctgttgagattgagagtgctcgtagaccatttggacctagtacaatttttggcaacacttataattataaaatactaatgaaaagttgaatactttgaactaaattgtttcatttaaattgagtaaatataaattaagatgtttaatttaaatttttatattattcttctttatattttaagaaaggaaagggaaaggaaaatacttggtttgcttgcggaatgcccatccctttcagcctcgtgaatgcaaatggtattgcgtttcaacaatcggataagatcatatcattttcaattcaaggtcagacagtgaaatcagcccatttcatgctttaccattccattccattccattccattatatatcaactctcctatcttccttcccctgtttcacattcacatccagacacctaacctttcttttattttcaattccatttcttttcaaataccgaccaataataaaactaaatttcctttctttcattttttctttttttgttaaaggagagaaaagtttatttggggggtcatggtagtatattattttctgaccacaaattctgggctaagtggggatctgaatatccctgaccttgagccttcgaaagcgataaaccaagtcacactacctctaaacattggatttgtcatttgattaagaggttgagattgtggatggaagaattccttggtaagtgtttgttttatttatttaattaattaattaatttgttttagtggttcaatttcgttcgttctagactgagaaagatagaatttttggcggtttgtgtgacgtgtcgtttatttgtcattcgtaggagaggctgttttgttttgttaacaacgtgtgtgtttttccttattttattttctctctcccttgctttcttataataattcttttctctctccctttagatatttcaattaaaaaatttaattttctgagtattcattagattttcctgtcaatctcgattcaacggagataggacggatacgatacgtgagattcgtacgttggattaagctttataccgcgttttggctggtgggtgtctttggtttttttttttatgttttcctctttccatttttgcttcttcctgggttattttgatcttcgttatcaccatagattcttcattatttctttattttctctcaacaatttgtcttatattccccacataaaatagctattcaagttgtgcaagtgtttcgttcttcaaaatctagtttttttttgttctttctttgggccgtgcaggtgtagcttagattgctgacctgttcatctgttttatttttgtcctaattcaaagggattctggtgctaaaaattagggttttcttgttttatttacaatagttaattgcctgtcatatcttgtcgagtttgaccatcagggtttcttcggggtggatgcatcatatgttgtttcgttgttattggtttgctgtgaataccaaattatcgtcttgatcccatatcaggttttgtatgccaatttgagtttgattcgagaagttgctttgatgacaccttcgttttaatcaacattgaggggtttcagtgaacattgagctccttcaacgatgaatggtcattgtgatttacaaaataatggcgaagtggatgaccatggcctccaggttactagatactctgcttatcagccctgtaataatttatcacctccttggtttgaattgagagtgttctatgtgagggttagtaattttaaggttgacgattcgtgcccggagtttctaactcttaaccatattcctctgagtcctgattcccttttggaagttaatggcactaaaactagcatttactctaatggattgtcatcccttcttagaagggatcgggcggataggaaatcagaagaagccacatttgtgagcacagacaatataaggttaacagggagtttgaaattcgaggtgtttgacgaagaagatctcattctctctggtgttcttgagatgtctaatagtaatggtttcactggggaatcaaaacacagtgccaagcgttggagcatgaattgtgattcggatattactgctgctggtggtttcttgaagggaaaacatcttggtggctctgatttgcctgcgcccacaatcgaggtctatgttgcaggctgcttctccggaaccccaattatcttaaccaagactttgcagctttgttttcgtaagaaacaaactaggaaaggcatgttggatgcaattccggagaatgaagcgactgaatcccagaaagatgaagctcccggccttgatctgcaggtattatactggaacgtttttgaacattgaatgttgaattctgtgatgctcttttaggtttctctaataaccattctacatttactgattcatgttgtaaattaatgattcctgattatttatttttgcattcattgtcttttgtacacattacagtttctattttgtttggcggagatagaatgcattgcagatttattatttagagtcttaatctatcacaaataaattaaaagaccttaaaggcgttttggttttggatttgaatattcatgcattatctttttgttatgacttcttttatgcttctggtttatgaacatgcttcctggtgcacaaaaatccaattttgtcttgaaggggagactgccaaaagaatcttatcttaaatgcgttatggggtatgggcaatgcaatgcacaggtttcaagtcttgggagagtactcatttacccttcttggtttgagttgcgttgttttcaaagtcattgctttgccagatacagatatggtgtgccctcatcagttttattatggggcccacattgaacctgactgcttaggcttttccattatagagatgttcttcgcattagcatttcttaatcttgtgtttgtcatttctgctcattctgttctttactttcttccaaagcactgctcttctcttcttctactcaagatatctgcagattggtgttactgtttatcaattatgttaaatggtgttgctctctagtgtcattgcaatctgtttgattttctgtttagtgtattttttcaaattgttttgtaagggaggacaaaaaatagaaaagtagttcgcaccttggtaacttgaaatggtaaccatgcctaaacccactagtaagggagcatggtctcataaagttggccttaagacttttcattctcactgttatcttggatttgcagttagcagcgtatcgaaactacaaaccagaaaatgaggaggaatacaatgataggtattggagaagaacagaatatatggatggtgaagatggtgagctctcgttttttaacgcgggagttagagtcggggttggaattggactcggcatatgtcttggcgttggtataggagttggtttgttggtccgtacttaccaatcaacaactcgtaactttaaaaggaggcttctgtgattccttttgtttagaaaagtgcaggaaactgtagtctcccaaaatccaaagtgcagctaacttggtctttttactttgacatcaaaaggtgcagattttgactgtgtgtagctgactgttgaaattttgtttgtcaattgtcatgtcttttgttacctttgtaatgagaaatgcttgtttagagaagggtgtgacagatttgattcctatacagtggaaataattaccagtcatgtggttctccaggttataactaatctaaagcttgtataagttgtactgtcatgtaaataaaactcttttttggtgagcttttagtgtctggaatttgatttttttttttttttggtgaatagaatttgcaggcgttgtcatgtagaaatgtttttcttttatactcccccgttctttcgaaagtagtctaaaccataaaaaagggtcagaaagagcggttgctacagtcggcttttcaatggaaaaattaaatcgatggtggtgatctgatacatccaattcataaaatacattcatctcaaaaaaaaaaaa

SEQ ID NO: 296839 - DNA, 5487 bp, Cannabis indica
atattttaaatagttataactaaacaaaaaaaaaaaaaaattttaaacaattgaagtttcattggtgattaattttacatgttgaaacttgaaaggtcgatataaccaacaaaaatgacgccacaatctagtacgctgcagtacaccataaactccctgtttctctattcttcgattttatttattttttcttatttagcaatgtaaattgtaaagactgagtggagactctggtagagttatcacctattcatagtataccccaaagccccagaaatctcttctctctcctcctcaggtcacacctctactcgcccttcaatggcctcccttctcaatacgcttccctctctacgtttatcaaacatcaccactcaacgacttcggactccgccagtttcggtctcgttcaccagtgagtgttcactcacttaatctccattttgttttgctcactattgttatgagagaatggaagtgtttcaattcgtgagcattgtaacggttatttgcaaatttattgtcgtttctgtaatgaaatctgtgttcaccagttttgacttttaagcttttgattttgtgtgtttcttaaattatgtagtttggtggaactgagattttgctagtttttcagggaggaatttttcgattagggcagctgatactgatgcggagaaaggtattttcagcttctaaagaactaaaattaaaaaaaaaaaactgtttttatttttgaggatgaagatttagatgagtgttgagttttaatgaagcgattagttttctttaatggttgattaatgtgtgaatttgtaggagttaaatctactgttccagataaggcaccagctagtaataatggttcaagcataaaccagcttcttggtatcaaaggtgcctctcaagaatctgtaagtcaaattctggacttgactgattacttttgcaaagtatttagtctgaaaggtattcggttttttagtagattcaagctcgattggatttagcttttaaatatgttgttactttagtttgatataattggatgtgtaatatgttgaaacgtttttagtttttcaaattgtgtggagtgagtagagtattggtagattgtttacttgtaaatttttctgatagggaaaagttatttaaactttatgatgtgaaaaagatgaagacttgtagagtttaattgtgtgtatttgacttttcagaacaaatggaagattcgacttcagctgacaaagcctgtaacttggcctcctttaatttggggagtagtttgtggagctgctgcttctggtacttactttgctgcacttgattgttaggaaaaggctgactttctaatctcaattttcccacatcgaatttaaaaaatcatgcttaaatttctatcttgcataaacaacaaacttcttaggttgtattcaaaagagctaagaatatttttccagtatgtgattgttcattccaattgttgattaccatatttctcatattagaacctatgtgatacctttatggagaaatgacagcttttagagcatgtccgatgtacaccatactagtatagatcagcacaacacttacaataggccttagagactggtaaaattcaatcgtcattgttttaaaattttattaaagtacttatttagtacggaaaaaaaccaagcacctgacttccttcacaatttacatctgataaaaaaaaatcacattgcaggaaactttcactggactttagaggatgttgccaaatcaattgtttgtatgatgatgtctggcccatttctcacaggatatacacaggtcctcaccttacaaatttatattgtgtactgcttttcactgatgggcatcatttatctcaaacaactttatggattttttttctttgctgtagacaattaatgactggtatgaccgagatattgatgcaattaacgaaccttatcgtccaattccttcaggagctatagctgagaatgaggtaggagtgtgacatgtagattttgtgaattagcatagcttggagctctacttcattgtagttttaatactttttctttaaaatcattttcatcaggttattactcaaatttgggttctgcttttaggaggtcttggcctggctggtttgttagatgtttgggtgagtggattaaacaatggtgctttttttttttttcctttttccgacaaatatgtttaggaaaaatcattgcttaacgtaatcttcttatcttattcacgtataggctgggcatgacttccctacagttttttatctagctttgggtggatccttgctgtcatatatatactctgctccacctttaaaggtagtttcctttttctcatgttttcgagtcaaatttatttcactgtttttctagaaaaggatttacttagtccctgaatattgactttgctacatcgttcgttgcagctgaaacaaaatggatggattggaaattttgccctgggagctagttatattagtttgccatggtacattcctgtcttaccaaccattgataagattttttttttcttctaaaacaacaccctttgataagattgaagccattaaacttagataagacctttgagttgaaatcttgttgtcttatgaaaaatttgagaggcttaaatccatttttttattcttctcatcactttcagaagttttctttatgtctgtggggttgttttgtagaaaaagaagttatcatcatagtaaggaggcatcgtatgttttcaccgttacatgcttttattttataaatcatctataatgctactatgttatcgttacttttaaaagctagctaaatctttctttagctttagtgttgggctcattacatgaaactttatgctcatcaatgagctttgggcgattctaagaaacatcttgacatgcttggttaaatcaattccatgagttaaaatatgatagtattatgctaagtctcaaactgatagcttaataatatgaaccatgtttgtctttgtcctatagtctactctaatactaggaggcaactaacaagtaatgttttgttcttattgataggtgggcaggtcaggctttatttggaacccttacacctgatataatagttctcacacttctgtacagtatagctggggtacgtttttcctagaagtattttgatgcatgtgttgcactgtacgtagtctgatcaaatcaccatttactttttcagttgggtattgccattgtcaatgacttcaaaagtgtggaaggagatagagcactgggacttcaggtcatctacgtttctccctttaaatttttctgatatacctcttaaaggtgggacttttatctaattatgttaaaacatgtttccagtcactccctgttgcttttggttctgaaactgcaaagtggatttgcgttggcgcgattgacataactcagttatctgtggctggtaagctgtttgagatttttatagttgtaaacttcttactcgggattaaatgtctgttttactttgggattaaattataacttccacagtattttcttttcgtctgtgaacttcaattaatcatttttaggcgtgaatgaagtttacctcctttgttttgaccattagatctttcgaagtgagttcactgatggtttgctagttctgatcagcaccctttctccactcagtaaaacccatattgtaaaatagcctagctgggcttctaatatgagacctcttacacacaacacaaccagttgagtcagatttgagcggtagtgattgcacgttatttaagtttaaaagcaataagcacacttaaactacacaagactgaaaaatatttgtattacaatttattagttactttttgctcactgaataatttattagtttcaaatatttggattgcaatgtgtttttctctttcataattgtacgctaagcgtgtttttcttagttttagtcagagtccaccaggctgacaattttctttcgtgggtttggaaatgtggttttgcaggttatctgcttggggctggcaagccatactatgccttagctcttcttgcattgatagtaccacaagtattttttcaggtaatacattattaatatgaacatatgtttactttgtatgagagtatattcttcagagcttttgctaataatgcatagtgtttgtaccctgcagttcaagtactttctcaaagacccagttaagtatgacgtcaaataccaggtatagttattcttatctgccgtttttatcttagtttagtctaccctaattaagatatggcccaagcaaaacctgtaacaaactaataaaaccagttgatgcacccctaaaaatccttgtgcatataagatagtgttgaacttgaggttctgcataaaaatcattggacgattaagcttttcagcattgccttatttaaagtaataaaatttgctgtgtaaatgtttcaggccagtgctcaaccatttctggtgcttggtctattggtgactgctttagcaaccagccattgatattttccaagatcctaattatttgaatccttgtactttagcacaactgtatggtaaatcatttaatagttgaagagttctgacaggtcagtttcaagctatagcatatgttgtttgttttgttctaaaattttgttctcttccttcttttattgtattagaataataataataataatagaatcctaatttatgtacctgttgtaaattgaattaaacatcaatatatttgttgtttcccgctttggcctacgcaatatcaaatcaatttacaggggcctaattataataagtttgctttaaaaattcaccttctcacttctcagacatgtcatttttagttggaaagatcataaagaggatcgcaagaacccaaataaaactaagtacgtacataaaaagtaacatgtagatacattacctagtaacactatgtaaattacagagacctaaaacagacccctactgtaaagggggtgcttatttaaactaagtaggctaaaacatgataagagactacattattaaaccccctagattgagtagtttgttctgaggaaaactatttatcatttttggttctgaacttggactcgtcgatttgaattccttcttcttcggctctttctccaccagacttgtcggtggtgctcagcccacctttgcggcccatctcttggtagccctcgtggcccaactgttcgctccttgtctgccctcctcggctccgtccttatcatccaagcaagaaaaagcccaattagcccaaattaacatatatgtaaagaaggtgatatttatatttagcaaaaaaaataaggggtaagttgaaaaatgcctcttctattaatcaattaatcaaatttgcctctaagtttatatttatttgaaacatacctctttttatatgtgttgtacccaaaataccctgacataagag

SEQ ID NO: 296840 - DNA, 3358 bp, Cannabis indica
ttttatttatgaaatttgggaattttaaaattagggttttgttttttcttcaataatattgtgccacaatattgtgggctttagttttaatgaatatattatatatgtgtttcgaccattatagtatatatattataagaattaatttgtgtatatggtatacatatgatacattgaatgatatatatgtatattcagagaatcgagtaaataattttctcagctcattttcatgataagccagagcttttcttttatagagaaatgaagttgttacaaaataatgataagagcaatggttctattacaggtggcatgaccaatttccaaggatgattacaataagggaatattctaatagaattggaaaaaggctaattattactccctaaagtttggaccacaaatacaggttgacacctgtcctaaacagaagcaggaatcaactgatgataggagctgagttcaccaccatggacctgcaccagataaaagaaaactctatttctcgacaactcccctcaaacgaaagggggaaggcttcacaccgagtttgtccacaaggaatgaaaatcttaaattcgatagtcctttggtgaatagaccagccacctgatcatgcgagggaatgtacctgacttcaagttgtttctacaggaccctgtcacgaacatagtgagcacctatttcaatgtgttttgtcctagcatgaaatactggattggatgctagtgcactggcacttatgttgtcacaccatgtgatagaaggcagcaagagagggaacttaagttctttgagcagagattctatccaagatatttcagctgcaacatgagctaatgccctgtattcagattctatgcttgatatagagacaacaacttgctttttagatgactaggacactaaagtctcacccagatatacacagtagccagcaacatatcgcttgtcatcaggacatgatgcctaatcagcatcaaaaaagccagtcacactgagttttttgctgcagctgatatgcaattccaatgtttcagttccctttaagtatctcaaaactctcttaacgggactccaatgaacagatgttagaatttgcaagaactgacttagcttgtttgcagggtaagctatgttaggccttgtgtgacaaaggtattgaagtgatctaattatactcttgaatatcgaaggatcctacataggttcaccatcacttatggataaaggtttgccaacagcgataggtgtaggacatggcttgaggttattcaagtttactttcttcaaatatcctcaatatactttgtatgtgtcaagtacatgcctgtgatatctctaaacacttcaattcccagaaagaagtgtagagatcccagatcttttaaggcaaacagtttgtttaatttgcaaatgaattctgccaccaacttagaatcacttcctgttacaactatgtcatcaacatagatgaggagaaggataaaaaccttctcatttttgtggaaaaataaagaagtatcaacctttgagttttgaaatttccaatcaatgagagtatttttgagtttgtcaaaccaagctttaggagcttgtttcaagccatagagaaacttgtttagtttgcaaacccaattctctttccctttttcttcaaagccttgtgattgaaccataaaaacttcctcttccaaggtgccattttgaaatgcattgttaatatccaattgccttatgtcccagcctcttaaaacagctatggtgagaacaattctcacagttgaggctttaattactgggctgaaagtttcaccataatcaattcatggtctctgatgaaacccttttgtaactaacctcgcttttaatctttcaatggtgccatctgctttcaatttgattcataatgatccacttgttgtcaattaagttttgataggcagcaggaggaactagaatccaggtacgatttttctttagaggaattacctttatatccattgaacctttccaacctgggtgttggagagcttgttcaacaaattctggttcagtaagaactaatgatgctttggatgaggtgaggtaagtttttggtttaaatatgccaactctcccacgagtgaccataggtatgtgggttgtaaggtagtggctagagttggttgtggctccaaatctggtttagaatctaatgcagcaggatctgtttcaggtacatgctcagtagtagtaggttcgatgacaaaatcatcaaaagggccaaactcaaaatgatcatcaaaatgaccatcatattcctcccctggatgacctgaaataaggctgttgttagctgagtaagagccaatatagggtgagtgtacctgaggagagcttggtgatgcttctgagaaggctgtagcagttggattaataggaccaggtttagatgagtcagtggtatcgaatgttgtaacaggaagattagaccatgatgagttgtgaattatgacaggtggaggtgtttgatagttgttgagagatcccttttagaaaggaaactcgagttcattaagcacaacattccttgagttgtaaatacgacctgtgggagtaaggcatttatagcctttgttggagttgttgtattctaaattaatacatttcagcgaatgaaactgaaatttgtgtgcttggtatgggagtatgcatggaaaacatgcagcaccaaaagtctttaggaaaagatagtctggtttttgattgtagaggacttcataaggtgatttgtggcctagaattggagttggaagtttgttgatcaaatagacagcaatgtcaaatgcatcactccaatatttgagtggcatttgggcttgagcaagcaaagtgaggcccatttcaacaatgtgcctgtgtttgcgcccaacacgaccattttaagctgaatcatgaggacacgagtgttggaattcattcacatgttgatgaaccaaggcagtgaaaggttggtattcaccaccccaatctgttctaagacttttaattttcttttcacatttgttttccaccaaatttttaaattgtatgaaggcatctagagcttcaaatttgactttgagtggataccaccaagcaaatctgctatgatcgtcaaggaagtgtatgtaatatccgtcgtttatgttggatgcaatgggggttggcccccatagattagtgtgaacaagtttgtaacgcccgcattttatatttactaaactcgaaagttaaccttaacatattatatctttataactatatgaatcgggatcccgagtatcaaaatacaacttaaaagtatttttctaatatgtacatataatatttt

SEQ ID NO: 296841 - DNA, 1746 bp, Cannabis indica
gttcaatgatgccatttgaaagttgtcttggatgaaagtcttatttctcgaatatgaaagcaaagtaatatgataaatatttatctaattttatttttatctttttaatttattctatatttttcatactaattatttggatatttaattataggaggatccaaccacaaaataaatacctagttttgtgggcaatttcaaaaatatgcattggcatctaacaaaagagttgataaatgatatttcaagtgataaatttgtaggtttaaaattgtatcatcctacaattgataatattttgagtacattatcttacagcacttaatgcatgttatctaccattgtttcaacatctatagccatatcaaaaccttaattaaaatcttgattaaataggtatacacttttgttatgactattttgaccttgagtagatgacatcttcttttttgacaattaccaacaaaataatttaacaactcaacaactttcacacaaccactatttgccttctataactaatttatcagtcaaataaatttatgtactaattaaaaaaaatggtaccaacccattatgatttctaataatattatcaccatgcataaaaaattaattatttgatattgcttaatgtgttgatactagtccacaacattaatttagactaatcttttgttgataacagctatagtttcatttgataatccatttctaagaaaagaaaattgtatgatgttaaaggctatatacaattgctaaattgaatcacactatggtaatgttaatttgtttaatctgtttcttttaaatattaaagttttcttctaatgttgcagacaaagatggacaacttgcgttctactcaaagaataaatgttagtcaacttgctaatttggatgttactattgatcaaccaggtattttatttgaagagcagatttttgatatggtattgggaacccattcacgctataagaatggaagaggtccaatgcctaggctaaaggaaattaatagaataagagctgctaacaactctatttataatctatgtaaagatcaagctgctaccaccgcttctcttacacaatagctaattgagactcaagataattttgaaggacttttggagcaatggagaaatatttcccaggtttaaactagcagccttcaaatgctagtaatgcctcttcatctattatctaagatgtaatttttgaaattttataataatattgtatgaatattatcacatcatatgaatattgtgtttgaacttttgatatgttgggttatcctctaattttgtctacttgtatttgagaattcaacaagcataatgaaatgttcttaaaattttgtaagatttacaaatttagaaaataatatcatgtattgaatattttaaaagaaatgaatgtaatattagaattacaaatatttttgtgaaaataattaaatttacaaatattaatgtgaatataaaaaagtaatttgaactgattttgaaaaatacatcatattatgtaaatagtttcttattttcttaaaaatacttttacaggtgctttcaatgcgtctgcaaaaatcaattagtcaccttctagtaccctgagggatctattgcagttatagattttttaactagttttttttagatttttaactactttttctaaaccctttatttttcctcctttttattctttttttgtttttcttcttgttctggtgtattgtca

SEQ ID NO: 296842 - DNA, 2088 bp, Cannabis indica
ataaatgctttcaaaaaaaaatacatatataaacaaaatttatgaaaacaaatttaaaattaaattaagaaataatgttaaaagaaaaattgagaaaaagtattatctccaaaattttgaaaaatctatctatctttagattctttacatataaatattaaatgttgggtgccaatatacatggtttatgactcccaaataaaattgggagattttccatttcaaaaaaaaaaaaaatggagattaatgacttttcataatacagacgataaattgttttttttttttttgtagagagtgatttgaattacactacgataattgttgacgtggaggaacgtccagtcaacaagctaattgtctagccaaagatatacaaagtcaaaatatgaatcactataagcaaaacaacttatataagaccaaattatctgagaaattaagacaaaataacttgagatcaccttcaagaggcatccgatataaccaactaattggaccaaaactatctacaaaataaataaatataggaaggtggattagcatactatacaatgatgatattacacatttttaaattaaagataaaacacaattatgattttgacgagagaatttatcttttctttttttcactcaacatgtcataattatacaaaaactaatttgttatgtccaactattagagcaaaatcttccaaggtagaaatgtactagtcaattaaacgtgcaccatacataagatttgagagattaattaaatgtaataaatggatgaaaaaaaaatatttcattgccttttagagaaatcacgataatttaccaaaaaaattagaagaaatccaaaccaacctgaaaaaataaggagagggaggctttgtgatttagattttggagcagagcttctgtttttatttgaaaaatgaatataatgttaataatacccttatataactaagagtattttaagtactaaaacataatagatgtcatttgctatattattttttaaaatagacatttagtttcagtaaaaagggatgaaggccatttaccactatttctctatcttaaataactacaacatacacgattataaaaatttaaataaaagagttacgcgtgttgtttgaaccctattttcaacatgttaaaattttttaaaagtcttaaaattttacaaaatattttaaataactacaagatacataattataaaaaaaatttaaattaaaaaattttctcaaataccatacatcgagaatatttttttagaattttccaaatttatctatttttgctatgataaacattttcattattacaattggaaaaccacctcaccccaccgacctttatctctatgttttttctttaaataaaccaacctttataatcaacatttctttcttacaagaaaaaaagttgcaaatcatagtattagtactatctagtatctagtaacttactaacttttgataagaacattcataacacaacacgtgtcaccaattccaagcttttactagtttacgcggcgactactccaatgggacccactcacagctaatcaaataaccctgccacgtcatcacagttatacattcgtctggtacactctactactgccacctcatcaatttccagaactttctctctctttcctcttctccctttaaatgctttcctttcttcattttcaaaatcacaaattcaaaaattcaaaattacaaaactacccttcattttcccacttcccaaacagaaaattttcccttcaatcacgatgatgtcgatgttcagctacttcgatgttctattgggcgatgcatccaccgctaaagaattctcttcttcgtctgctgtgaagaacaagagagaaaacagtatcaaaaacggtgatcgtcgttctgagaattcggccacatcgccgacggagaatgtttcgacgacggcgacaactcgccgggatcatcagaagagatcgccgaggtttgcgccggagatcgatggtgttcattgtttcgaaactattctcccttattgatctatctctctatatatatatttgtatttttttttttgtat

SEQ ID NO: 296843 - DNA, 2474 bp, Cannabis indica
taaaatgactcatctgatggaagactatttttactcattctttattttattttaaagatataagtgttttgaagcagctgatggggatgctcttatagccttaggattttaatttttccttactcatattaaactattatttattatcgagcatttcattacattaggtgtcctgtttgggtttgttgcagttgtagtttcttaaccacttttttcagactttaactgttttttcaaatgtttttgtttctcccttctcctcccagctttcggtttccttcttcccttcatactttcggtgaataactgttatcttcatctggttttctgtattccttttctccttgattgcgatgaatcctttgcttcatagccatgattccactttaactctcacagaggaagaaagctctgttgctttcttacccactgtagttgataatgcctctaatattaataccagtcacattcttatagcaaggatactaattgagaattatgttcataaacctaccttctatgatcaaatgggtggccattggaaggggaggtttcctatgataatctttgaatatggagatgcattattcaaaatttctttttgatgtgcatgagacaaattctgggttttgaacaaggaaccatggcacttccaaaaccacttagttatttctgctcaccaagtactctgcataatgtcacaatgaacaacctattgagcactcccttttgggttcaggtataccggttaccatttctcaacaaatcgaagactcttgctactacacttggaaacatcataggggaatctatcgatgtacatgaggactctcttgacgagcggtggggtcctttcttaaggatctgagttaaactttctgtggacaaacctcttcttagaggcagaatgataagtttaccaaggattagggatgacttttgggttgattttagatatgagagattgctagaattttgctttgaatgtggtcggcttggacatccctttgaaaaatgtgtggcttttatggaaagaatggacaatggcaatgatgatgatctagagtacggtccttggatgcaaggggctaagttaccaacttctagttatgataagtatcagactgattttgccaagggcaatgcttggccacttttgactcgcctgctcgtaaatccttgtcctccacaataccaactctcaataccagaccacaaccccaaccaaacatactttttcatggtgaatcttctactccatcccaaacttttccttcacatgctcataactcatctacctatgtacaccagtacccacggccttcccattctttgcctctaccttcaactactgcaccttcacatactcccttatcttccatcacatctactgctccaatatcatcaccaaatattcgcaccacaacatctcttactttgccactaccttcatttactacacccccatctaaccatttatctaccatcacttctgctgcaacacatactaacatctctgaacaatctacacaacccaccatgccttctcacactagaagatccctcccattatcttccaattctactacaactgctaacctaagccacatattcacccctaacattggttctactcacactcctcatattccctatgcaacttacccacctactacactgcctaacactcctatgaatcatactttgatgcatgtgatttctaacataacaccatctctcatttccactccacagtcacatacttcaaccaccggtaacaactcacattacagcaaagaaaacttccaccccaactatatgtttaaaaggcaaactgatgctcctaccatgagacaaatgctcaagagatgtcgcaaccaaaataacaatgtcgtctcctcattctcgtcgagaggggactgctcacacctaaatgtttcctcgacttccaaggattctgatggtggttcagacaattcagcggagattgctttgcaatcccgcaagggattacgaaaatcctaagttggaacgcacggggattggggaacccgagagcgttaagacatctctgattgctagtgcgccagcaatctccccgtgttctctttcttatggagactaggctcaacaacaactctttcgatcgttttcgacaacttttaaaattttctcatggattggaagcacctcggatatgacttagtggaggtcttatgctgctttggaaagatgacattgttattcaacttaacacctttggttcttgttatttcgacacatggataactgatgctagtgatcataagtttcatttcacagctttctatggagcacctactgtgcaaaatagattggattcttggattttgctacgccgactttttgatatcgcacccttgcaacatgttaggttttatgccctaaataaaactccatttcaatgtaatctattttattcaacatcaataaag

SEQ ID NO: 296844 - DNA, 2264 bp, Cannabis indica
ctaattatacaaactcttccaaagagtatccacccaatctctatcctgtctatttaacttttgtatattcattatcataattctatgggcaagaaatgaagaatagctttcattaacaaccctttacaattggatgtctaagctccccaaagagtactgtttcgactttgccaaatacaagaaatagtggcagtaataaagatcataaaaatctttcttctaccttgattcagcttattccttagtcacttaagaattgaagccaaagaataatcttgaggaaccagtcctgttctacagacaacttcagctagaattctctaactaaatattagagttagtctcacattaataatgtgtaaaaataaattttttatatataagatgaatgaattacttctcccataatcaatggctagtgactttgttgttgttattaacattctagaataaaatatggtttttcttacaacagctcaactataactcatgtataatattaataatttgtcatatattttttaacaattttttttaaatgaattgtaaaagttgtttctatataatgtctacctttggttatattttcttcattattgattttttcttaaaaaattgcctatgtgcttatgagacatgcatatgtatggttgaatttgtttaactaacctaggctaagtcaaatctaatttattatattataaacatattaaatgtaagaatgccgacaacatattctcatttatgtaatttttgtccacaatattaaactacgtcaaattagtattaattacattagtttgaaaattattttttagaaaattaaatattatctaactaaaggatgacatttacgacaaattttgtaattagagagaaatttttcaaaaataataataataataaaaaaaaagaatgattgtaaggaaaaatcctatatttattcttacatttattaacttgatgaattgaaccaacgtgttgaaattcaactattttcactgtaagtctagaactaggtacttagctagatatatacaattactattacttccttctctaaagacaaaatgtccgcaaaaaaaaaaaaaaaaagaaaaagaaaagaaaatcaagcttctatcttctttccttttcaaccatagaacatgcctggaacatttatatgtataactggcacgttttgctcgctaattactatacataccaacattgggtaccatatatttcttatcatatatacatatatatatatatatagatagatcagtattcagtagtagtgcaacttcaataatattaatccatttcaagctattccttatatataatatagtacattgccgaagaaaaaatggcaagaaagcataataatattagtgaagatgaggagatgagaaagtactactgtaaaagagctccaaagggacactttgtggtttatgttgggaaagaaatgaagagatttgtgatcccaatttcatacttgaagaactctatctttcagacacttttggacaaggctgcagaagagtacggctttgacactaacaacgccattgtcttgccctgtgatgaatccactttctatgaggtcactgccttgtcctcatcaaacaactagctacccacctatcaattttgattagagtactatagtactagtaattattattacagatattgatatttatatatatatacctatagtacttatgtatttgataattattatgtcaaataatctagagcttaattagcttacattaattacgacgtataatataataacagatcgaagaaaaattcctttgatcgctcgatcactaggggcctcattattattattattatgtatatgatcacctactgctaataaataaattttttttgttacatttactttgctttgccaattttcaacaaaattatagtttcacgatcttgggcagtgtcttcaaaaattatagattaggtgatgctgttttctattctattttcaatttattaaaagaagatttagatataaatgtactatatatttatgtttaccttacctaatcatctaattaaaatttgagttttatatgtatcatatttaatacaatatattgttatattatttttaatataataatgtgtaaataaaaatgtggtaatatatattattatgtgaataatttatattaagtgtatggtaaataaatgtgtaatctataattttaacctacacttttgtagcttacatagtaacttggagagga

SEQ ID NO: 296845 - DNA, 1350 bp, Cannabis indica
ttttctgaaatttgtccaatttacacattccaagtgtcgaaacctaaaaccaaagaaaataagcgtaattctatttcaaaaataataataaagaagaaaaacaactataaaatgtgacccgaaacttaggctaaaaatagcctaacaaaggttagaaatctggagacagtgagggctatcatcatatacagggaaactgtgttggtgtccgggagggcatgcaagcattcccttatatggaacttgaaacttcttttcgacctctcagcatttcattataagatttagtttcctaacaatctattgctggctacttaaatctgtatgtgtgcggcagatgaatccattgatgaatttcaatgcagtgaattttatcttgtttaataatttgaatcatgatcataatcaagtaaatctaagaaggagagatttatgaggctctttcttcctgcaggcaatggctgatcttgcacatcctgctattatcttagagacaagaaagactgctccgggcttacgtttggtggataagtgggcggtatatttcgtttttcatttttctatgattatcataccatgaaatgtaatttaataatgacctatgaattctcatattataggtacttattggtgggggaagaaatcacagaatgggtctatttgatatggttttgataaaagataaccatatttcagccgcaggtagcgtcacaagtgctgtaaaatctgtagatgcatatctagagaaaaaaaatattacaatggaggttgaggtaggtctttttattttcccttttggtcaactattgagcttcttataagtaaaagtaattttgctctcattttcttcattattgaatgcattgttctttattgcgttctgttagactgcgagataatagaatatagtataagagagttgaaaaaagggcatatgggtcctttgtattaaggggtagtgttggagagagaatagaatataatatataggagactaagaagaatgagaaggttatgcaagaattgagtgttcaatctcagcatcatcgagagtctaggcctctcaaatgcctagggccattttactgtaattctcttgctgccatatcatctataatacataagtttcatccatttgctgctactgttatattatcaataaattcagatactatttcttgggttctctgtttgttcttgctgttgtttctcttaatttcagacttgtgtaccaacggggcccatcacgttctgttaaataaagctttgatatgtactaagttgtttatttacaagactgtttaagaatacttttagggctcgtttggaacgccgtattaggtcgtattg

SEQ ID NO: 296846 - DNA, 2595 bp, Cannabis indica
tgttaatatgaaatctaaattttagtcatagctggaaaataatagaacttttggttgtaacaacagaccattttattcatgttgttgaggaattttgtaacaacgccagaaaatgcaaatcctcgagttgagtaatgaaaaataattagtactatttccaaagtggacataggctcgaccaaaattgagcttaaccactctaatttttgtgttgtttttatcaattatttacatacattatttatttcattactcccatattttgatgtcgttacattattcctccaacaacagttcttattgattatcatatgcttcttttttttctgtcacttctttttcttcttgacctacgtccaataatagtggagggaaagaaaaagaaaaagagaaaaacaagagcagtagagcactcaacaagagaaagtataattaaaataaaaggaggcagaagagaaaaaagattaactatcaaattgttgaaaactgtttcatttcattagtggggtccgtattaggaatattgactgcagttcaataaaatattcttgaaaaaacatcgaagcatggtgttttttctttcccattgagtctacactgttataattttgccttgtttgggtgaacttctgcttctgattttagcttcagaaagctactaaaagtggcttagctgaaagctgaaattaacatattacccaaacagcagcagaagtgtgtttggactcttaaagcccagccaaccagcgcctttaacctttttgacaagtgactgccttgttatcaataaacaattctacatatcattgatagaattaaactgaactaaccatcccaaatgacagctgaagctgttgcacttgacactagtgatcaattatgaataatagctccttacatgttatagctgtagcttgatattgttgactgaaaaatcattacactgattgaataccattgatggtgcactcaaatttatgagtacattaaattcatctttatgtgtattatgaaaattaatttgtctttataatgagtagttggttgtgttgattacatatattaaaaggtcaatttttgttttgtctattcttttcttaattaaattttcattttacttcagtctttatgacttcttaactctctctatattgtattataacagggttttcaggatcaaggtgagaaagttgaattttctggacccttattatcacagtcacacagaattgatgaactcttagagagacatgaacggcaaatccgacgggcagttcggaaatcatggttccatagaggtattattcatactggttaaactttaattagtgcaatgttagttcatcttcgtttccttaccaaacgccatggtcccatcccatctaataaaacctttgtggtattgacatgtcattggcaaatatgggatattcattgattaacagtttaacctcttacggagattgcatagtgatttggttagttgacttgactgaatctgcatttttaaatgtgcatattactatccagccaaaactaacatagtcttgtttatctgtttcatcctatagtgtataaaattttcaataatcttttctgtctcgttcaccttattcttctaatgtgtacggttacttttacttatcttttcttttgtgtacagttccaggtaagaagctggtgaagtagtttgttcgataggcttggtccgttgaagaaattgattaggagggtaaagcagagagctatgtatacaaaatggatccttttatatggtcataacaatctggaaaatgctttctcaggagtacgcatcctattcccatcctatagtaatagttaacaaaataactagttaaaatctcaagttcaaacccagtgcttagaagaagagaagcaagtcctgggaaggaaagggcaaagatcaagtcagatatttcggtcactgtcaattattcatgttggctttctttatttcactacgtattttagtatcatcatcatcatcatcatcattcggctgtacagatcaatgataaaaatatattttgacagagtgagcaggaaaaggccttgttgtatatgcttcaatttagtacattcggataacaactcctccattaacacctataaattcattaaagataaacatattagatcatttcaaaatgagcattgtcatattgcattagtgtctagtactttttatagatggtgttacaattggttagtggtattctttaaaaattattttcttaagttatataagatttggtatttaattacaataataacgataaactagagagggtgatagacactaatagtgttttttaaaatttctctatcagaataaaataagcatgttagatatatattatgttgtgtggtaggttttttttttttaagaagctagacacttccaatactcttttccttgaaaagcatatcaacgtatgtgtattgggttgatagttataattttaattttatttatttaattattattaggaattaggaagaggtttcaatggttacatttttattttaaccatcatggttacatttttttaagttattggattactattaaat

SEQ ID NO: 296847 - DNA, 3873 bp, Cannabis indica
aaaaaaaaaaaaaagaatcattcaatataacacactattctattgacaaaatcgttttaaaataatttattatctaaaacaaaacataattaaaaaagaaaaatcaattaatttgacatatgccctaggctgctatcatgacaacctataatatagctgaaaatatgtctaggcagctattatgacaacctattaagtttggatttttaactgagaaaagaaaaaatgaaaaaagaatcataagtgttcttgaagagtgcatttcttctacaaaaatcccgccaggtcaggttggttttcaaagctaatcatgtatttctaagttacttaacaatggttgatttcagctctaaaactgataaacctgattgtgatcactgtgtattaattaaatgtatatagaaacattttaggagttaatttagtaactatatatctaattgctgaactacttttatatgtacatattgctgaccagaaattgagagttgtagctaccaagaagttgggatgtttaattttcttctaataatactcaaaaacaaattgtggaataatactagaaaaaaaatatattacaataaaaaataatatctatgaattatattcataatgattaagattttcatatctataaaatgtgatagacaagtaaaaagagtattgtattgataggacataaagagaagaaagaagaaattgtgtttgatgtagaagatgatgacaccctttcttcatatatttgctttgtctgtgtgttgaatttagactttgtttagagagggtggtaactggtaactggtaactagtaaggtaacaaagcttcatttgagttagaatatagttcttcaaccatgacttgtgataaccatattcatattgccaagtttcacacaaatttttctcctactgctccccatttttacaagattatgcttgaacaaactcttgggaacaccaaactagtaagtatacattattacaactctctctcaaaacatagtaaataggtctacaacactatgtaactaattcaataacaaagcataatactaattagaggaatctaattcatttggtttatcagtaccatgaagtttgtgaagctccttaacatgtagttgtgtcttcatcagatcaatttcctgcttatatttgtatggcacggtcattgtcatccttcttctacaccatgtctagattttataactctcttaacttgatttgtaacttgatatctttcatttaatatttgattttggttttctcttgtgcagcaaatcccaaaggcattttgggtgaaatgttgtggctctttatcaagtcaagtatttcttaagcttccatgtggatcaacatgggaggtagggttgacaaaaagtagtgatgggaaggtatggatagaaaagggttggaataaatttgtacaacattgttctataagccgtggaaatatcttagtttttggatatgaaggaaactctgagttccatgttatcatatttgataaaaccactatggagattgattattcttctaatcctaacaattttgacaagcataatgttgttgatattgatgatgatgattctattgaagtcttggacagttttccaaggtatcccaaaaccagggacaagtctccaataccatgttctcggccccaaaagaaaatgagatcaagtgttcctggtaaaccacaaagcaacaacctaattcatcttagttaatcttaaccaaaatagagtagagacttctttcttattattatatggttagaaacagaacaatagttttagtaattttatttctcaattgtcttttcatgcatatgatcaaccacctttgaagttatgcaaaaaggaagcttaccgagtaaagtagacaaatctaccccgaaaagataccagaaaccgtcgtctgagattgagaagcataatgttgatgatactaaagatgatatttcaattgaagtcttggacaagtctccattaccatgttctgccaggccccacaagaaaatgaaaactagtccttgtgttaaatctgaaggtagaggtcatctttaatctaacttatgaggcaatatattaacttaaatatcagattttcatgatgattatgaactttcttttgtatgttttgactaatctgtagactctattttcagctaagtttgatttgtcagatgaagtatgtggagaatctcaagtactaagggaggtggaacctgaaaaatttattagaaagaagtgtttgagtggaaaatcaaaggctaaagctcttatgagagctaaaggttttaaatctaaagacccctttttcatagttcctatgcaaccatctgttgttggagctgggtttcgtatggtaataattaagcttctttcatgttatgattttaaaactacacaatgaaaatatttatcatattgatcttctttattttctgtcaagaatgtaccatttcactttgcaagaacttacctcagtaagtctcaagatgtgatccttaaggttcaggacgggaggaactggtctgttaagtacttttctagacagtacgaaggatcttcaagatattcaagattcgagtgtggttggaaggcatttgttcaagataatgaattggaagtaggtgatgtttgtgcctttgttttgaggaacagcattgatgatataactttattcgaagtggttattttttattatgataaagataaagcgagaatgatttcacaaaactcggttgcaaagaaagaatcaggtatgtcaaaaaagttagcttacttttcgttcttgaaattaaatcaatgcactactaataagtgactttattcattttcaggacttagcagagcttgcgaagcagccaaccgattcttctcgaaaaatccttactttcaagtgattttgcgatcgacacatgtgcatggacatgtactggtatggtagaaaatgttagtccttataattactaaataaactaagatataatgtaccattgagtttattgattcttctttgtgcagtatattccattgagttttgcaagagattatttagagggaaagacacaaactattgttctttgggttggtgaggaatgttgttatgttaagttgcttgttaatggatcagattataagttttgtggtggatggtgtgcctttgtgagagacaactctcttcagttaggtgatgtgtgcatctttgagctacttaagggatatcaagctgagatgaaagttcacatatttagacaaactggtttgattcaacagtagtataactataagttgtaagtatgcaaatcataagaatcattttggtaccaacaaatttgccaagccacttagattagtttgtagctttggactgtaattggtcaacatgaccctgttgaaggttgtttttttggttgcttgttagatccttaattaattacagtgactaaaatatgtacttgctttattatagtctcttaagccacccatgccaagttatcatttctccagatcaaagatcaaattacccttgtttttatatattattattacctgatcaactgtttgtttattgaggaagaaattgtgggatgttaataaggcatgtagttaaggtggactgattttattatgtggttggtggatggcctagatttgtagtaagggatctttttctgcctttgaaagaaatgaagaaccatatcgactagttaattaattcccagtgctgaattgctgacctataggtcttaattatgaattagaaaaaagttaagcaaagtgtctgttataatataaaataatataaggaaattattgtttttcaattcttattctgtaacgccctaatgctaaggcacgctac

SEQ ID NO: 296848 - DNA, 1816 bp, Cannabis indica
ttttaattttcaattatacacgtagccgtatcatcattttgttcaccatttatgacaaaacttgataaaaagactaatttactacactataaataatttaggaaccatttataacggattgaaaattttaagagaataaataagtcataaaatataatcattttaatttgcataaatatagaatgccaatttcccaaaagaaatcttctgtttctctctgaccctctctgaccctccagcattgggagaaaacggtatagttaccctgccttctttcctcacaagaccctcaacagcattatggcaactggtgtgatgctataactcagcgaatccagttgactcgcgccacctcgatctctcaattccccactcaacgcagtcttttgctatcagtctttaagtttgaatatcttatgagaattgaaaaattgaatgttatttgtgtgtgttattattgaaggttgatttgagagttttgttttgtccctaattgtgtttctgatcttactggggagtttttgatttagtgtttattatgatgtcaatggctttatattcataaccctacattttgatctcctcatacaatagataaaacaactttgattcatatggtgtctttattttgttttgatgccaagatttgaaaggagaaaatgtatcatactgtaataaaagcacacaaaacaataactgggtcctcatgtgtgctaatgaagctgagaaatataagtcaaactagtaatatatatttatataaatttatacaaatagacaacttctatatagtgcaatgtagaaggtgtttatatataaaaagtttcgttgaagtttgcatttgatgtatttgttgaggtttgagttgaagtttgaatatggtctgtgaggattttcctttaatttttaaaatttttgttttactgtgtgttaagattatgtatctgagacactttgtttgaattactaaataaagttgttgagaacaaaatctctcagttcattaacttgaggtttgttattagagaggtgttgttgtctatgtccctctagtattttcattatattatagttagttttattaatagagaattaaattaatgttactgctgcttatgctaatgctctaatgtggtagccactttgttgattaatgtagtagtagcctaaaaaaatatatatgtgtaggaaatttaagatagaaatttactatcttgtccctacaccaacaaaacaaacaaatcagaattccaaggtcaatttcgacctttctctgttcactttgacttttcaaagttaaccccaaaacgaccccgttttgtctttgaacaaaacctaggaatggatcgagaaccttctcatttccttcctttctctctgaaatgctagaaaccctagcagagagtttctcaaagagaaactcgaatccaaaccctagaaacccagaaatcccaaacacaaacccagcagaaagatcagatctacaatgatctgatctttatacccatacacacacaaaagctatagagatttaagttagaaaacaccaaatttttcccgaagttcaccaacgagttggctacgtctccgtttgagctgctcctcaaattctgagagctcgattccactatcaagatgtttcagacatacaacaatgaagattccaagtcacaggtaatttttgactggtaatcttatgtttaatacaagtgtttatgtgtttattcagtgtttaatccctctctctctcttgatctaaccctctgttgttttctttgcatgtacgagcttcaatctctggttcttcaagcttcaa

SEQ ID NO: 296849 - DNA, 4338 bp, Cannabis indica
ctggtaaaataattccaacaagcccgtcaagattttctcaaaagatggagaggatgatggcctgcctccaagaaaagtttagagatctagaagagtactctgaagaagatgcctctgtggaactcgtcaatggaaacaataggggaaaccctactaatgctgaaatctcaactcctacaaaggacaagggggagaggaaggtgggtgaccctcaaaacccaatagctcctgtaccttctaaaaaaagtgtgaatccaaccaatatacatttgcaaatgaagaaggccaccgatgcctctgggcttggatgcccttttgctctgaaaggtcttgttgcacaaaatgggattagtgcgaaagtacccaagtctaggggaaggaaaaactaccctattgatttcgttaactaggatggtgggatcgtgggacgatactctcatgacagttggtccactatgaacttccaaaagcgtcttgatgcgaagtatgaaaagctaaaggagaaaaggtgaggccacatagaaatgacctcaggaactatttaaacgataaggctcacaggtgcgaccttctagatagtgacacaaagaggttggatgagcagattgttgccttaaccacacttgtttaaaaaaaaggggtcctatctgattcagaagatgaagatctaaagttgtgcgtcaggcggattgcagaagcctcactcttggagaactttaagatgccctagatcaagttgtaagatggtcgcacaaatccaagaactcacctatcaaagtataataaaatgatgtaggtggcaagagtgagtgatgatgctaagtgtttatgcttctcactaacacttaccaagtccgcaaaagattaagggaaaaggctcgctctcaaatccattcatagctgaaaagatttacaatctactttttcgaagtagtttatagccgtcgggactatgacatggaagttgggtcgatcaccaatgtcaaacgacaagctggaaaaatcctaaagaacttcattcagcgaatgatggaggcatcaacaaagacaaaggtgagcaaagacatgaaactcgtagccttacaatcaggacttacagtaggctctctgttatggggcgagatgcagagaaagtgggatgagaccttgtccgagtttatgtttagagcacaaggtatcatcaacttagaagatgcttatcatcaagccttcaaagtccctctagcttcagatccttttgcatcctcactgagttttgtcctgcaagtcccagtccttggcattcgtacactctggttgtctatggaacttctacatctgggcgggtacctacccaaacccatttttctggatatggagtggcacaaactggatgtattatcgctcccaaaaagactaagcaacaagcagaagctccagaattgtgagccatttttagagcaagagaggctgaacaaactaaggtcgacgtgaagcttcaaagaaaccaagaaagagttcaaaccaaatttcactgagtacactagcttagtagatactcgagaaaatgtgtacaaagtgacatgcaatatggtccactatcgaaagcccccaaggatgcctttagggagaaaacataagagatatcaaaattagaggtgtggatatcatggggatgtaagacacaccaccaatcagtgtgactacttaaaagatgaaattgagactctggtcagagccggacccttgggttagtggatctagatactaattatctacctcagataggggttgttcatagatagttgctcgttccaagatagcagggagtaagccaccctcaagctcctggaacacaacttccagccctaattgctccattgactcaggctgtaatctgtatcatccaggtatggctccaccacccattgatgaacatgcaaccataattttaggaggcccccatattgcaggaagcacaaggaattcccaaaagaggtatttaaaggcattagaccatggggaggaaatgtgcaccttagtgtagtcaccagtgtaacgtccacgaacaatgaacatgcctattacattcataaaggacaatcttaggcaagtccatttaccccacaatgaccctttggtcatagaagcctaaaatgccaacaagagggtttctcgagtttcgatggacaatggaagctcaataaacatactatttaagtttcatttaaggtaattaggctaacaaaggctgatttgtcaccctcccccatttaactctaaggattcaatggagacacactcatgtcgatgggaaaaatccagctcccggtcacattgaaaggggagaacaacatatgctcctttaagcactgtaccttcatggttgtacattgctttacaatatacaacgttatactaggatgtcaagtcttggttgattttggggccgtaacttccatcagaaatttgtgaatgaagtttccttgtgataacagaagcattagagtgatcaagggtgaccaacaaattacaagaagttgctataatgtttatgtacgcttcgtgttcatggttcaggaagaaacaatttttgctcccgaaatagatgttcaagtggaagctaaagctgtttgggaggaatatgaggatgaactagatcttagggttggaatagaaagaatgataaagccttcgtcgacatgccttgtgataccttaaagtttaatagctggattagcaaccctaactaagttaattaagtgttaacgagaaattatattattatatgatttaatatgtggaattatagtgatttgtagcatttaagacctcgttggtgtgtcaggggaatttttgtaattttgacccgagaatggtaaaaattatggtatattgtgtttatgaactatattattatatagtataattattctatctttctgcatgtgatttttgacaagtcagcacagtttactcacaaccggattttttggcccgaactgggttcggggcctaaaatatagttttgggatttagttatggcttacatgtgttaaatgagaaaagatgaattatgtgatatatgtgtgttagtggaaatgacaaatttcccttttatatgtgtgccttgggggaaaaatgctcttttggcctaaatttctatttttccaacaaaataaaattttagccaaaatgaaattcattttttctgggtttgaaacccctaaactgcctctcttctcactctctctttattttctattttcaaacacgattcttgagagaaaaagcttgaatttttgtgtgaactttgtgtattgtcttgcttaaagcttgaagatcataagataactttctttaatccatttcatttgttgtaacttctgatttttttaagcttgtcaatgaagttttatgggtgttcttaagttggtatgtgcatgttggtagaaatgaagtaaatagtggtgattttgatttgattgtgctattaggttaatgctagatcattcatccttgtagttttgaaaacctttggattgagattatgatgtttgaattttgagaaaacacttgaatttttaggttttgtgtttgaattcttaggtttgtgaggcttggtgattatatgctatttggattccttgattgtatgcttaatggtgttttgtggggttggtctttgagctatttgttaagctcattttaatgacaactatggaatggtatgtgtagagtaaattttgagctatgtatgctaatttgatgaaatttggtatgagtttggcttattttcgaagacatgaagatttgtgatttttatgggttctggggctgtcgccgcaccgcggccacgacatggctcactgcagcgagcttcaccaggttgtggccgctgcgacgagggccccgttttcccaatttttatgttttctcgttttgccatagcttttgattttgaactccattttggacattcttagtatcgttggaaagctccttttgagctctatgtgttaatctttaattcgagttctgattattgatatgtatgaaaatgagttagggattaactctatatgtgaaatcccaataatgtgtaactaagattaccagtgcttgctcaggaacaccctgggatttagaatctccacatacttggattactaggtaaaatagtaaactagcacacagagattagcacagtggagctcatgtatgttattatgtatatgctatgtgggaaaccaaaattagtgttattacctaaatttagcggttatgtgatctagggttattactctagaatataagtgaatatgaatgcaataatatattttatatgttgataaaaaa

SEQ ID NO: 296850 - DNA, 2132 bp, Cannabis indica
cctcttggtaaatggtaaggatatttctaattagtttcaacttccaatatgaatttaaacaattgtatttcgttcactggaatttgatcagtttttttttctcctgaaaaaatttgatcagtggaattttgtttcacttcttcaacactcaaattactgtaccatttctactgttttgctctgtgttttttatttgtacatcgcaaatatgaatagttgaacagagtttggtccttttcaaatgactactactcgttctaactaaggtaagttctaaattttataaaccactgtataattagcactaagattcccataatatatatatatatatttaatagcatatgttactgtcaattgaatgtagtcaacttgcaaatcttttttttttaggaaaaagaaaaagacatttgattctatgatccaatgcttaaaatccgtgtttctgttcttcccatgtgtaaagcaaaaaagcatgttttgataatggagtgtctctttttcatggttttcataaaggagaacattgcttagtagtggtgtattaatagtaactgttgtatgttataaaaatgtatgaataattccaattagagttcttttccttcagtggtaagtcatctttggattattttctctcactcatctttcttttgccttatagctctgtacgaagatacctggaagaaaaagggtcaactagttaacagtaatggaaatgagaagcagcttaatcgattatgtcttttcttggtccatccaagatgttctaaacaatgatctctataaaacccaggtaatattatgtaagtttatagttacacaaaaagggttttaatggatttgattaatgatggtggttttaattatgacaattgtttgtttcatataatatgagatgtttttcttttccatcctggaatgaagtagagttttcacttttcttataaatatgtatttatatcaaagtactcttgttttagctgttgttgtcattttctagtgagagcattatagctaataatgatatgtatgtgttatgtgaggataagtttgaatacttttatgattgaaatatctaagcttgttggggagcacaggtgaagcagattcctcaaaccttctcttcaacaagtgaatacttggaatcattcactactccgcttatagaagaaactcgatcggatctgtcttcaaacttagcaactttgtcagagtcactctgttatgaaattgtggatattgaaccaagtaatgattttgaacttcctcatgacttgttttacattcttcaattgaactatggtaaggaaaagaagaaaagtaataaagacaatgaggatgaggatgaggatgaggatgatgatcttgttgtaggagacctcattgccataacaaatgtaagaccaaaatgcatcaatgatctggatcggccaagaagaccttacctcattgcttttgtgcagcatagaaggttaagggatgagtctagttgtcttgtactttcaatttcgtcgtcaaaacctattctgattgaagaaaacatgggtaaaaacagaaagagggaaaccctttttgctgttaagctgatgaacatgactacaaatatccgtatatggaatgcactacattcggatccagaaacaggaaatatgaacctcatcaaacaagttctgcatcccccattttctgtaagatagttaccctttgcttgcttttatgttgcacttacacatcattatgtcattgtggaatatgtgtgtgtgtgtgtgtgttaattaacttaagatcttttatacttctttctattattcccaagcataacttcgatctggtttttgcaggaggcagaaaattgtactctctgttgtgctgacgaaaaatgcagtgatgcatattcagctatgaaggccagtctcagcaattcagatttgaatgagtcccagaaagctgcagtttggagctgttttgagactagagaatgtaatcatcataacactgttaaattggtttgggggccgtccagggacaggaaaaactaagacagttggttttctattgcattctctccttaagataagatgtagaacctgtacatgtgctccaacaaacactgcagtgttagaggtaac

SEQ ID NO: 296851 - DNA, 2301 bp, Cannabis indica
ttttttatgcattttaaaatttatttcattccaattcccattcccattcctaaatttttattcatcacaaccaaacgccacctaaattcttacaaaatacaatgtgtgtaatttatttactaattattattgaagttagttgtatttagtttgatatgaacatatttacacatattcttctatttttttttttggttattttgtgtcttaaatggaacttaagtgattttgaattttttggtttttttttacgtgttttaataatttttagtgatatttagcaacatgactgtgagtgatgaagttcgacgacatgtagcgatgtgtaacaatatcattatcgatgtagagcattggatatttgtgttgttgatattaatgatgtttagcgatagtttgcaataaactaaaacaaatattagtctagtgaaaatttgtgatgcttaaggataatttgtgatgatttatgatatttgtcaacatgtttggaatctgaattaattttttttttctatttttgtttgtagattcaaatgtgtttgtggctgtagtatatgatggtgtttgtactgttgaggatttcaactgtatattcaatagcccaaaaagtaagacgttgatatttgagatttaaactactttacagaagatgcatgaaattttgtatgaagagttgaaagtagaccctttggtgtatgaattaaaattagaggtgtgttacatgttcttgagcgagaaagaagaccccctggtagtgtaaatctccaaacaccaggcactagtagcagtcagcaaggtcctccttgtagtactccagcatttgatttatttggcatgttgggtagatactttagtgatcctagacttagctattggaaagtagctaagaaggtcacacggtatcttcaggggtaccaatgatcatatgttgacttatcagcgagctgacactcttgatatagttcgatttagtggtaccaattatgcaagatgcgtggatgataagaaatctacatcaagctacattttcatgatggctggaggagttgtttcgtggaaacgtgtcaaacatgcactcacagcatcctcaacaatgcaggcaaagtatatgtcttgttatgaggctacatgtcaagcaatatggttgtggaactttattttaacattgggtgttatagactctatctcgaggctgctgaaattgtattgtgacaattctacaacagtagctttctctaaaaatgctagaagtacttcttgttccaaacacattgacataaaacactattttactcaagaaaaagttgtcgagtctcttatttccattgagtacacgccaactacttgcatgttgaaaaacccactaacaaaaggcttgcccatatgtgtgtttttagagcttgttgctcgaatgaaattgtgaggagcctagcttgttgagctcagtgggagttttattattatgtattaaacatgctagtattttgtaaggaatgcttatgacttgtattttgaacatacataatgatattgtagtcatttctcgttgttgttatatttatgtatacatgtgttgtttagtgaagtgacagacagaaaaagagatgaatgcacatagtctcaatttgttgtatctcatgcacgtttggtttaattgttaatgattataatttcattaaatgtcttcaaggtcaattcatacataatgtatgtatcctatcgatatgatgttatgtacgatttatttagttacttatgtgtgatagacaatattatggtggttgattatattgtcgaagtgggagaatgttagaattattattagactaatataatcataagaataattctataagcatgcaatcactagctatgtgcctactatttgtcaataatcataatgggatgttttacactaactaattgtattagagactcataagagcatccttgtgattataattagcccattaagttataatctaccattaattaaaccatataaatcctattagccaataatctcttaaggttagaggagtgtgatatatatttgataaaagatgatctaattaatggtattgagaatgaataagggagattgctccacattggcctctcttccaaattcatcattgaggaagtatttcagatttaattaaacgatcaaccctttctctggaaatatgacccaatcttttgtgccataacaataaggatgtttccttaatatgaggtcttttacccacagtattcacaacattaaaagaggaatttaaaggagccaatgacaacttgtaa

SEQ ID NO: 296852 - DNA, 1587 bp, Cannabis indica
cctatttgtgcctcaaattggatccctaacgtctctcacccaactcttcctcatcccctcgatccttcccataccacagtctcttttttcattaacccgaataacacctagaatatggaagaacttctacattatcttccaaattaccaagctaaggctgtcctccaacttcctcttgatccaaacccccaagacaatctcatttggggacatctggaatctttatggttaactctacctatcaccttgcgtgctcctttaccaatgtcaactctccatcctcatctgatcctaaagcctttaagccttagtggataactttatggaaccttcccatccctccaaagatcaaacattttcccctgtgcagttaacctgtttcgcaagaaagtcctcaatgatccttactgtcacttctgtagaggcaaaatggaaactgtcacccatgcacttctagaatgcaacagaacccatattgtttggaagcactcaaaatttgaagatttctttatagcaaacaaatatcgggacattaaagattattacctccaaggtctcaccaatttgaccagagatgagcttattctgttcattagtatcctttggcatatttggaacacaaggaataatgcactttttaataaaccttatagcaatgaaaatgtgtaagagtgtgttatgaattatttgcaggaatatcaagaagcccaaaaaatcaatggagcagctgcaactcttgcttacccaaatcagcagccctctagttccaggcatagttctcatcgcaatattttgattgaaattttttgtttatatgtagatgcaacactggaccataattattataacacaggtttgggattaattctaaagaaaggctccaaccaagtcttaccttctgcttccatccaaaaaccaggtgctcctgcttctatatttgctgaaggtcaagctctcttggaaggtctatcttggtgccacactctccaaatacagcccaatttcatcttctcagacttccttcatattctatccaaagttaatggccagtggcaggacaattcagctctctcaagtcttgtcttaaagatcagacagtccttttctaacttccctgcaacctccttgcaccatatatcaagacaattcaacatcgacgcccatagttctgcaaaggatgctctcatgcaaaggaaggatgactaatgggaacttcttttgttccatttctctttgctgttgtttgtattgttttttctccttctttgtagcatctccatcaaaagaaaaacctatattcccttggagcgacggacctaactcagcaccctttttcgtacttgatgccacaagacctgagtactttaccaacgtatgctcctatggatctcaccttggattcgatgagttctgcctcaaaagtaactgtgggatcttgaagggtcttggatttttgagcttttgaagtcatgatttcaaagtttaaatcacctggtgaaaaagcaacaatgactggaggtaaaaacaaaggtctcactaaaggaatagtagatgaagtttgtgttggaatttattttaccaggatct

SEQ ID NO: 296853 - DNA, 2148 bp, Cannabis indica
gtagttctaagtagttgcagcggtagttgcaataagagtttctgtacgatttttgtttgcaattaggttgcagcgctagttgcaatagagtttctatgtagaattaccgtaaaatagtaaaaataaaaaaaataaaaaaaataaaaaacttaattttaaagtataaaaatgaaaaagtacaaaaaataaaaaaaaaaaaaaaacgcacatatataatttatttatgcatatatgtactaaaaattctgaataaatggttaccacctataatttataacatatatttacaacataaccaactgcaattgctttgaatagaatttaagagaaaaatacattttctctaaaatatttagactttaccacattaccaaacaaaaatacagctacacactaaaatacagacagtacgtaataaattctcccttaaaacccctaattacaaaaattaattataaccccattttagctaacagacaaaaatattcactcatatatattgattaacaacaatatgttcacaaaaccaattagtcatactcacctagagtatgaagcttccatcgatcttcaagatcaaaaaagcaaagaaatcatcatcatcatcatcatcaagttcatggaaatggcgacctctcatcaaacacataaaaactgcttcattccacttcaaagccaaaatgttcaagactaactacgccaccaacatggttctaacgtccgatcaaaaaggaaataagctcgctcacatgttagactcttcgtggtcgcaatcgcggagctttagaggcgcgattgcggtgaaaagctggggagctgctgctggagaatgcggttgaggcaatgaaaacaaagaggctttcgtttgagccgggatgcgggacgaattcgatactcggtggcggaggaggaggagaaggaaaaggagaaggctatgatcagttcccttttcaggattgtgttgtgcaggctgtggatgctaccaatccctatattgaatttagggtttcaatggaagaaatggtggaatcttattatggagtgaagaaaaagaagaataataataattatggggaaaaggattgttattataattattataattgtgattgggagtatctagaagggcttctttcttggtacttgagaatgaatgataagaaaaactatggagttatagttgaggcttttattgatatgtatgctgggcttgttgcttcttgccctgttgctcctaatactactagttcatgttctttctcttataatgcctctgcttcttcttccaaatccaaagactggtgggagatcaatattaacgaagccagctttattaaacgggcagagaaagaattgtgtccaaattataattaaataattctcataattattattatgcattgtacgaactatattttgtaattgtaatgactttgttttgaactttcttaagttgatcataatttgacttagtgtgccaatgtgtcatgcaagaaattaagttagattttttctagatgaaaagtaaaatgttctagcttgtttaagacaaagatcatcaaattaatagggaagaccaggaaccagaaatgctaaaagacacgtgtttagtatactatctaaatgtattatattgttattggtataattaagtatcaagttctatatatataatttaatttaataactatgtgggaaaattacaactaaaggtggagaatcaaatcaacgaaactttaaacaatcaaacaattagcgcaatgacaaagattaacaagtcacacacaataatcgaataaaaaatagagatgaacaaagtaatagaaaactagaaaacaattaaggcataaaataaagaaatcaacaccaaaatatgtattggttcaagatcgatagatttatgtgatttatggctctacttcagttttagagcaccaccaaatcgtctttattaattgatagcaagaacaagtataatacaatcgacatcaattctctaatgagttatctcaaagtatttcaactcccatattcttaccccagaatcttcttcatctatagaagattcttattacaaaatttaaagccaatctctctcttttctttgtacctctctctctacctctcaatattctctctctctctctc

SEQ ID NO: 296854 - DNA, 3505 bp, Cannabis indica
catccaacggttggggactcgaagagtttgcatttgatgctcctggggagagagaatgtagcattcattacttatcttttcacggtagcatgaaccagtcgtcttttcaagtcctgcagccattcgttttccaagaaaaatgcgcctgagccaggcgcataagccccacgacttcacaaaatggacaccatatttcaacaaaacgacagttgtaccacgagaaatattaatccttcagttgtccaaagtaatgcagaaggttgctccaatatttcaagatataaataccatataataataagaaatcaagcattcaaaaggaagttgtaagctcccatcactcaagagtcccaggagcttaagggtaaatgttatttgtattctcagatgcctgatacatgtagtcatggaagagtgccactcttgaccgtccatgatcagtatatgcttgccgcttggatacgttgaaggttattatatttagaaagccaatcaaaggtccacaatgttagtgagtacggataatgctctaggacctttactattcatcaaaaactgggaatgatcaaagttatctagagcttcaagtattttagaaaggtaataggttagtgtaatttgagaaggctttagcttgatgatcccagagcttattcgacagtgccctatccagaactcggagcgacgattacttatcctctgacacggaatcatatcttgtcccctgagtcagaccatggtagtgcatttacgtacctctgaagttttctttttgtccaatggcttgtctaggcaaaaacttttcatggtgaaacctttgaatgacgcgtatccctgtccatacaaaatccttcactatagtcgtacaccacacgatggggaagtttcctacctactaatggtcagatcgtcatgttgtagtgatagcctctgtaacgtgctaaatacgaaaccctacgtggataaagggaacacccttatacacatataagcctataaatactctcatttttttgtacaaggtgtgaataattttatactagctgaacttttgctgaaattcctactagctttcttcttcttcaagagaaacaaaaatgagtgcaaaactagggtttatactgtaaacatttgtattattaaaacatttacctataaggccaatacaactgactcgtggactagggattattaatgctcgaaccacgtaaaaatcacctgtctattattttcttactttatttgtttcttaagctctatttttattagtttttgaaaattttggtaaacaatattaatacataaattgggcatatttataagacaaaatatcgacttatcaattgtagattatgttcttagccatccacattattatatttccaaaatagaagttgtaagaataatcttctctgataaactttaatgagtgaatcaaagaaactaataacatgaaagggagttcatgattactcagaatttaggctgatctgctattgatcatcattatgatatgaattaggtctttatagtaaatgacacgttagataaagaaatcttcattcatatcggtccttgtcatttataatttctattatatacaataccttcactttgatgtcatacaacgttcgtaatctaaaccgagattacttgcactgaagaatgggtatactgaaccgtactagaaccaattgattaaagattctataaatttaatatgttgctgactgttttactcatggctaagtgatcttagttctctgtacagctacaagtcacaacctcatatatgaattaggaatttttcaatatttaatataaattattcaataatttatactaataatttaaccttgatgcatatatcaaaatgttcaactctttattaacaatcaaaaatgtatttataggcttttcagggcataaaccctaataaacaaaacatcaagattttcaaccaataccaatctccataggtccttaactgctgaccttaaccccaatagttccaagataaactctcacgagtcttggggaatcacaagcaaaacaaactccttcgtagactcgaccaacccacaaaaggacaaagccaggaataaatgcccaacatagggacgacctcaccaaaggagggactcactagagccaagcatgcttctccgagctaggggtgagcaagatccaatccaatccaattgaaccaaattgatctaattaaatccaatgacaaaaaattggatatccaattacaattagattgaattggatgttaaatattggattttaattggattggatcaattattgtatggacatgttaatctcgaaatccaataacaatccaattacatttaatatatattaaaattatttatacataataaaaaatactggaaaaataacaaatatatactttagttacatctttattattttatttatttttttataacacttggttgttttgtgtatttctcttatttactttaacaatatttttattacttttttattctattttattacttggcagtcttgttgttttagttattttaaacttttagttgcattaaacttgtaagtatgatatctctaaacttaaatgaaatatgatatttagtttttacgtatttttcttcatgtttttaagttaatattaaaaattaagcctataatcggatatccaattaaaataactgatccaatctaattagtatttggatagtattggcttcgattttgaggtctaattggatataccagaagatgactttccaaatccacttactaatgggattggatcaaactagtagaaaaatattagattggattagatgccctgtcctaccctgagccaccaaaaatcaaattcaagggaatcaatatacataagcgacatgacaacaattttgaaaacccctgctaacaaaaagagcaatccaaccagcacaaccaacaatataaggaaaccagacctacgaaaatgcaagagaagaagatcgaaggagcataccaaatcaagatgcaaacgagggccaccaaaaggacccctaaagacctaccacggaaaatactcgagatactggaggcagccaaaaatgacctagtccagacctaaaccaagtgctactctaaagttaaacccaaccaggagactgggagaaaccagtgaaccacccgaagccaccaaccccacccaatcaaaaaccctaatctctagaaaacccaaattagtgagactatacgaggctgaaaacagccctgggagggggaaaacacaaccaaagaatagaggcttattaatggaaatttgacatgcggggacaagtacccacgggtactcaccccgtatggggtggggatcacctgccttaatgggtaatggggtgggggtggggtgaacttttatacactcgaagcgggttcaagatgggattaggggtaatactacccacctcaattcgacctagatattttaaaatagaagaaaattaaaaaa

SEQ ID NO: 296855 - DNA, 5145 bp, Cannabis indica
cttcacttttttttttgttacttaatttggatctttctatgtgattattaagattgaaggtaaagaagatggtgttatatagttgtattattgataatcatgattagagattcgtcgaaggtggtttattaatattaatattaatattaatattaagatggattatacaacacataatctaacgtgtcataataatattttatatgacactagatgatgatatatatatacagcgcatgagtttgaagactcatgttaattaaccttataagtcgttttataatattttcatgcctaatttggtttatttttgtttataatatgttgttattaatattcagtcaatgttcaatttgggattatattatatgatttgggcttattatgaggctagctatctgtcatgaggaaggggttgttggattccaggtggctttgatgagaattggagagtggttgtaaaaactagaaagagtaatttgccgagtaactatttaaattttaatttttgattgtagataaatatttaagtttaattttttactgtaataatacgttaagttataattctgtaatttttgaatgtcaagttattatttatgtgtcattttttttattagtatatttaaattaatttttaaataaaaaataaaaatttaatgacctatgattacacgattattgacttgacatttaataattaaatatttggaatttcgaaaataaaatttaaatattattaaaggtattaatgccgtaaattacataaacaaaaattacagaaatgatgtctaatgtttttacaaaaataaaataaattaaactaaacagaatcaaagacaaaagattaaaatttagctcgataaagagtcaaattgaatctttattaatttatagttagcattacacacttaattatgtctaaaagattacactcacaatcaactattacaaagtttctcacgtcgagggaaatcacttcaagaatgatacgcccattataaccctccacacatacactcagtaaatctcggacaatctcttgctaagttatctctgaattctgcagtatgagcattcgagagacttgagagcgttgagacctatatataagtgttggtgaggctcaatccaagttgtgcaataagccattgctttatctgttttaactaagtgttgagatgaaccatttctaccaatggctaggttccaatacaaacaagtaactaccttagaatctaaaatgaaggtacacataaagtttaattagcattgttaattagctaaaataactgtctttttttctttgttatgcatgaaaaacatactgaaatttatatcaataaatacctgaagtagtgaagactcaagatggggtagtggaaaccaattcaatctccaaagtaacaaccatccttttgtacatggatgtcattgaggaggatatttttggtgtgagaaattttgggccactcattcttgtccctaactcgacaatgcttctcaagaatttctgcttctgttatgtaaataaactgtaaaggcacattatgaaggaagccaggtagtacttgaagtcttttgcaatagctaaaatgtaaggattggagacaaggcatgatcgttacatcgcaacaaggtgcatctgttttccactccaaccaattttccgcgcttgtaaatttgagcactttaagcctggggtatagaggagtaacttgttcttctgctatccccagaatttcaggccccatgtttttgatgtgtaagccccagaaatggagtgtctctagagaaggtagttttccaatagctggagttaatgtctctaaggaatagcaacgatagaattcaatctcacgcaataaagttaaggactttaaccattttggagagaatgtttggattctgctacattttcttagtattaaaactttcaactttggatgaggtttgataaactcaaataatccaacatcatgaggatcatcatctgtcatcatgtttgggtatatgacaagttcataaatgcttcccaaagtggttagatccatcttgttatgaccctcatcagaagcagcagcagcagcatcatgcgaacgaagagccatcagattaattttgagattgttggaattcgccattgtcgtcaactctctgagagttaagtactttgtgctgtttttgggattctgaaaccaatctagaattctcagcgaagtaagcttcgaaagaccttttggtaatcctttgaaatcataacggctgcagcctccaagatacaaaaaccttaagttcactaacttcccaatgccttcgggtagctctagcagtgatggacagccatgctccaatctaaatgtttgcaagttgcataagtcacaaattgtgtctggtaatttcaccaaaggattgtttgtaacctcaagatatctcaaatgtatcaagctcccaatattctctggcaaactcttgagcccacaattcgacaagtttaaactgcgaagatgttttaaactcataaacacagagctatcaacacatacagcactgctctttccctgccttaaaataagaaaggtgtgcaaaaactttttattgtcactactcaatttcaaattaagaaattgagcttcagattctaatgttatggtcaaatgtcggattctttgatcaccaagttcgaatctcctgagcctcctcctctgattaccatctaaattaatgataaaagcttctacaatctcatactctctttttgtcaaatattgaataaagtcatgtaatatgtcatgcatcttacaaaccacattaccatcatcgaatacatcttcttctacctcttgaaaatcttgaaaaaaagatcgcatacttaaattctgaaagacattcgaaccttcttcttctgaatttagatacccttctgacatccacaattgaatcagttgtgtcttatcaatgaaatgatcttttggatatatggcacaatgtaacaaacaacgtttttctaaagaagataagtcaatataacttaatagcaatggaccaaagagatattgctcaacttcacgaacatttaactcccacaaatgactacacaaaacatcctcccattcttgtctacttcccttgaaacgcataagaccacccaaagtctttgctgcaagaggtaatcctttacacttgctcacaatttgagcacctatatccctcacttcttcaatttcttcacttcttctatccttaaaggcatgtctttcaaatatcaattgacactctttctggctcaactctttcaacttaataatttgggaaagtttggttcccatcaaacgcgctacactctcctttcgcgtggtaacaagtactcgactcccaactcgttctaacttcttcaaacttatctctaatggctcccatttactatactcttcattccatacatcgtctagcactagaagaaatcgagttctacctagacgactagtgatccaattaagagctgcttgtaaggtttgaaatttcggggccacattactactaatactactactcatttcctcatctttctcctcagttattattggagactgatgatcataatctttaagaaggttttcaataattgctgatgcaatgttgagtagatcaaatggctcagaaacacttacccaaattttcttgggaaagtgattcttaacttcctcattattaaatgctaattgagcaagagtagtcttgccaagtccacccatacccaccacagaaatcacctctagtggtccaaaatccaacattaacatttctaataaggccttctcatccatatctcgaccatgaatttcaatctcatcaacaaaggaagtagtctctaatctcccacgactagtattattgactcttgttatgttctctattagacctaatgaaccaatttgactagcagcaatagttaatttctcttcaatttcctcaatttgacgaacaatctcacggtgtgaaatcagtttttcaactttagggaaataacaaaagcaagaagaagaagaagaagagatgaatcgactaaccttgttgctctgctttccaaattccaacaattcgatatctttctcgatttgggatctgagaattagagtgttccatctatcgagcacgttaagaatctcttgagagtcatcttcaagcatctcgagccaaagtttgacactttgactactgttagtactccatcttctgttctcggcgtcttggagtacagctttaatggaccttagttttctcttggaattttcaactcgggtttggacattgttgagcaagcttacttctttgattatcatttcaagaggaagagaacccaacagctgaaccaccacggaaatcacagcagcagcggccattgttagttgttaagcttaaaaatctgatctttatagtttttggatataaagataacatttttttttcttttaatttgtcaacgtaagagagcatggacctaccacgtgcaaatgcaatattattagtgacatttctcattgggaaatttgggtttaagtgctacaaggcgcctagttggaatacaattcaaagatttaacattttctaattagcatttttgtcatgctcgtttaatttgtttagcgtttaaaataaattattgaaattgttaaatttaaatatttttgtctaattttatttaattttattatttatgtatcaaatcatgctctcaagattttgatatctactaaaatattttcttcgaacttttacactaaatcatactccctaaacttttatctaaagttagactttgtttctcgatagtttgggaaacattttttacgactttaaaagttcaagaaacataatttgatacatgtttaagttcaagagtaaaaatctgaattaacttttaaaatttatgttaacaaaaaaaaaagtgtgtttcattattataaataattagatgagatactattttctataaatattttatatttttatattggaataattatataaggcaccattttttgtaaaatatttacatttttacgtttaaagaatgttattttacatttttacggttttccaaaaaataacacgaaaacaacataaaatcaacaagaaaacaac

SEQ ID NO: 296856 - DNA, 698 bp, Cannabis indica
tagacaatggagcctcatcaaacatcttttcaaatccatttatgaaaagatgggcctccaccttaaaaatttggtcccttgtgcatttttcaagcataatattgcgctgctaggagtcatctgcccccttatagtgggaaaagcacctacgagtagcactgttatggcatagttcccggtaatagatgtgccttcaactttcaatgtcatgattggccgaccaacattgtatgacttgaaagaagatgtcaatttaccacctttctgtgaagttttttttacaaggaatggggtaggatgtttgaagggagaccaacggatagcttgctaatgctataatatcacgctaacaaaggcaaagaaagaaggttagttcaaccagagctcaaaggccaaacaaaccgaaaaatatgtagggatccgcccaaggcatgaatgatgagatggatcctcgctttggggacctaacacgagaattaggcccatggaggaattagaagaagtagagattgacccagccatgccgactagaataatcaagataaaccgagatttgttgcaagaaataaaatctactttgatcaaatttctaagagcaaacctcgatgtgttcgcatggtcacatgatggcatggtcggaatcagtccatctgtaatttctaagagccttgtattccttcactgtattggggcatttg

SEQ ID NO: 296857 - DNA, 3635 bp, Cannabis indica
tgtcaaaatttaaacttaaatgcaaatgaaatgataaaaattccaattaaattaacatgttacatcatatcattctctgcatttaataaaataaaagctttttggtatcaagttagttttgaaaaacatgatgtaaaagaacaaatcaagaaacagaccaataaaatgtacaagttttcttaccacatctcaacatttcaaaaatattaaaaaataaaaaagccttgtcttacatttagtgaaagagatacaaagaaccagcaaccaaagaattgtgaattttacaaattacattatccaattagattgtcaaatagaaagaaagaagaaagattcgaaaattaagaacacgccttcttgagaaagatattcttcctttcgaaacttgagtgaaacaacaactggccgaggtaagctgctccgcaaaaatgaagacatccccaagtcgccatagtatactgcgaatatcctgtggaaagcgaaaaactaagcaagccacatttcggcaaagctatatatgcatggcaaatctattccgtgtttggatctgtgatgagcttagaagttccttgaatgacgatattgctcactccagcctccattgcttctctatcatccgtctccttcttctcagaaaagttcttatctgaatcctgaggtgggacttcaacagcagcaacaaccgaaggctcaagaccccgtggaacagcattaaaccatggatggctgaggcattgtgctgctgttggtctcttttcaggtacaaaatcaagcaaaggaatgaggaaatcagccatgtcattggcttcttgttcgctaaactcgtacttttctactagcaccttactaataggccagaaacgcaaccgacgaatgtgtctcagatccccatatctgttaaagaattccctcgagtagcgaccacccaatgcaatctgaaagatgaagttagaatgtcaaagtctagcttcttcctcaacacgatattatttttctaaatagacgcatattgccttaccttgcgtggcatcatcccgagaagctccatcattaaagccaaatggtcctgcaacataaattagaatgttaaatccatccatggacattacttcattttcttcacaggaaaactcatgaatcttgaatcacaagagcaaccctttttccatttttaccttttaagttaaagtaaacgaacaattcgaatagtatgtttacagttaacagcacacacgtagacataaataaaagccagtgaagaaactaagttccttattgttcaatgtcagaaaatgcatgtaacacacattatggtgtcagatgaaccatgatgattggttatggagaaaagagaaggtaccccattctctttattgaatttcaagaccaataaattattaactacttaaatttaaaatttccatcactgactgaaatcttcacatacctcatctctatcataattatcaccactgtgaggatcaaatagaacatcaccggttgcgagctcaaagcaaatgcaagcaaacgaccacaaatccgcagaagttgagtacttagaaccaagaataacctcaggacatctatactgtcttgtctgtatatcatttgtaaattgtttatatgtccaacaagcatttccgaaatccaccagtttgcatttgagatcgacatcagcaaggagcttctgccttgtcgttcggttccctcttctagcacctttattatcttcctcatcattgtcctttgtctcttcaccatttgtcagtttatctttagcttcggatctcttttctttttcgtcaacacaatctcgccttgattttacaacactcttaacaggattctcaaagccattattagtcttggaatctatctcatcttcagaagtttcctttcctccacaatcttgagctgccttcttagcctttttccgaatcttctttttctggtttttcgtaagatcaccattataagttgtttttacttctttggaggctcccgattcagaagcaactttgttcttggcagttggaaggataagtggtgcaccagatcttttcgggtcttttgatggatcaatcatggacaaaagcaagacattttcaggtttcagatcagtgtgtatgatcgaaagttgttgatgcaaataatctaaaccggtcaaaatgtgaaaacatattttcttaaccatatggagtggaatccctcggtaatcactatacttaataacggtcaaaagattatctcccaagtactcgaaaaccatacacacatgttgcccatttggacccgaatgcttgaagtgatccaaaagctttacaacctcctttttatcatccggatctccctctgcaatttgcttgagaatctttatctcatccattgcagcttcggtgtaatgacgggcactcttttggattttcaacgctacataccgctacaacaacaacaataaaattcccaatgctgttaaggaattgaacaacaagctcctaataacatgtttttcactatgttactaagacataattcaatcaaaatataatcttgaacatgatgttttataaccatctctaatcacctcaacaatccacatgaaaataaatcctactaagctaagcctatattcactatcaagaaattaaatatcaataatttcggtcgatatttctaaatttttaggatacaataaatctttttcttgccaaaaaatatccatggatatcgatactcattgaaatatccatgtactgatatttccatcgacattgatattttcttccttgttcactataacacaactcaaaatgaaaaattaactcaaaatttagctttgacccaaaatttaatttctttcttcttcttctttaatgatatttacaactatcaaattcaaattgaaaacaaagcaaaaagccttatgctcattcaaaatcctaaatttatctttctccaagttctacattatcacaatcttactaatatttgaagaaccctctccgaaaatttctgacaaactaaaatctcaagatttcatatcaatgaaaaatacataccaatttctgagtgtcccaagcgagccaaacggtggagaaatgtccccacccaagcttgctctgcaccacatagcagccatttttgaatgaatccccaactcggactgagtggtaccctccttgcctgtaatcttcagttccctcgtcctccgaagtgtagtcactcagctcattctccgccattgatgggagcaaaagaatcaaactttaatttaaaaatggaaactttgaacaaaatatttgatgggtattggagaaacggtgaatctgaagtaattagagtgagaaatttggaagctttaatggggatgggagtgagggaggtttggttggtagttggggaagaagaagaagaatgaagaatgaagaagaagaagggaattagggtttttggggtttgccgggaaattaaagaaattaattttatgtagtcgagtgagttggacttggaagactctccctctttctttcaactaacgaggtgtattgcacgcgccaatattttttaaaatatagataagagatgtataacacttcaaaagttcaaaatttacaaaaacataattcaaatttagt

SEQ ID NO: 296858 - DNA, 3625 bp, Cannabis indica
ctatcgggggtgccgactgatctattgaccaagaacaacacaacaagaatggccaacaaggcaggggcagttatacaagttcagaactcagatgtttcaagaatggtggcagatgggttttttcggttccaagtttggatgtccatcatgaaaccagtttgtccaggcttccctttaccgtattctggcaagaagatatggatagcattcaaatatgatgaattgccattcatgtgcttcaaatgtggaagaattgggcatagcgttaaagattgcaataaagaaccaataaagattcaaatagaggagagtgaagaagtagaggcttatggagtgtggttgaagacagaaaatggatgtagagatggctttcaaggaaaacgtactagtatggggcaagtaaactctcaaggcagcttaatggaaaaacatgtcacagagggggcaactggcactataaactccaatatgtttgcaccattggcaaataccatgaccggggaaagtgggaaaatgctacaagaggccaatactcacagagaaccacagcaacaattagatcaaggggatttaagcgcaaacagaaattatctggaaggtgaatcgaaatctcttaaacaaagagatatggaagagttgtatgaggatggaggaaaaggaaagagaagattggtggaaactacggaggaaattggatatggaaaactgaaaaaaacaagccattcaatgtacaacgaattaccgaatcaagggctgtatgacataccagtaacttacacaacagaagctcaattcttgagtgaaacaacaagttttgcagcgggtagtacttcgaatgtggtagctaaagaaaatagaaggaaagtctcggtgaagaaggacccaaaggcaagaaagggaaagatagtaaacaaggtggctaaggtttctcaacaaggagattcggaagcgacaaagatcatggaagaggcgaaccctgaaactcagggtcgccttcaaccatgaatctactactttggaacgtccaaggtttggggaacccttggacggtccggtcacttcaatcccttgtgagttattacaatcctaaggtgatctttgtgtcggaaacgagattgaacaaagttaatgcagaaatgttacgagtaaagcttggttttagtggttgtcttacggttgaggcgaaggggaaaagtggtggtcttattcttttttggtctgcggatattgagactcaagtgttatccttttccactttccatattgattctttcattagaatagaggaggggcaatggtggcgatttacgggtttctatggcgatccggacccgactcaaagactaattcgtggaagctactgaggagactgagcaggatgtatgttgggccatgggtaataggaggcgactttaatgaaatcttaagccaatatgaaaaaatgggaggctcatctaaaccaagctatctcattagtaattttaggaaggctcttgattactgccacttaagggagattgagtttgaaggaagtgaatttacatggtgcaatgggagaaagaacaatctgatttttgaaaggttagatcgggtttgtggaaattcggactggtttgagatgttcccacacgcaattgtcaaacatcttgatcgcgttaactcggaccattgcccgattctagttacaagaaaggatccactatccaaactgcaaggcacggtgagatggagatcgagattccattttgagaatgcttgggcggaagacgaagagtgtatggaggtagtacaatcggcttggctcaaggaagaaccaattgaacaggctatggatcttaagggcagaattagggagtgtggggctgctcttcaacgctggaatcaagtcaaaaagagagagatgacaaaacaattgaatgaatacaaggaaaaaattagccaacttacaagtagaaccggggaggacgattggcaacagctccgggatttggaataccaacaaaatatttggcttgataaggaagagaagttttggaaacaaaggagtagggcggtttggctaaaagaaggcgacaagaacaccaagttttttcatcggaaagcgaataatagaaaggccaaaaacacaatcaaggggctggtgaacgagcaactccaatgggtcacgggcaataggcatatgggtagggtggcttgtgattacttcaagaaattattcacatccaatcctgctactgaggccgaattaacagagttccaaagacttgttccccatagagtttcaacacttactaatgatcaactccttgcccccttcaccaccgaggatgtttacaaagcgatgcgagacatacacccccaaaaggcccccggaacgtgatggtttgcccggcttgttttataggaagtattggcctactataggtcccgaagtgacaaaagtttgcttaggaattctgaatgatgacatgcccgtaaaggaactcaatgatactctaatttgcctcatcccgaaaacttcaaaggccacaaagatgacggattttaggccaataagtctttgtaatgtggtgtacaaaatagtagcaaaatgcctagcgggaagaatgaaaaatagccttcatcaagtcatatcggaggaacaaagtgcttttgtgggaggaagacttatccaagataatgccataaatgggttttgaaagcctacattgtatgaagacaaaacgatttgggaatggtaagaaaatggctctaaaattggatatgtctaaagcctacgacagagttgagtggaatttcttaatcactatgatgagggggctcgggtacgaggaaaaatggattggaaaaataatgagatgtgtaacaagtgtttcgttttcagttcttatcaatggagaaaagctggggtttttccaaccaacccggggtcttcgccaaggtgattcactctctccctacctattcttactttgttcggagggattatcttgtctcatacatgaagccgagagagctggccatctcaatggagttcaatttggaaaagatagagtcaaggtttctcatttattcttcgccgacgatagttttatgttcctaaatgccaacacaagtgaatgtgatactatgaagcttgtgttgcaaagatattctagactttcggggcaacaaattaatctagagaaatcggaaatttgtatggggaaacggatctcacctcaacaaggacatgagtttgctaatagattgggagttcgccttgtctcgaaccatgccaaatatttgggattaccaagctttgttgggaaaagaaagaaggaggtctttgatgttatcaaagataaggtgtggaataaactcaaaggatggaagagttcaatgttttcacaagcaggccgagaaattcttattaaagctattgtacaagcaattccaagctatacaatgagctgttttcgtctacccaaaaaactcatcaacaatctccatacattggcagccaatttttggtggggagacacaaaggaaaacaagaagcttcattggggctcttgggctaaactttgcaagcctaaagagaagggggtctcggttttagaagtctaacggagtttaatcaagc

SEQ ID NO: 296859 - DNA, 2799 bp, Cannabis indica
ataattaattttataatcgttatttttttgattaaatatgtatcataataatttgtgtaataatattaattattttataattatgaaaaatatatatttatatatttatagttggtggatcatggagtaagccctttgttggtggagaatgtgaaaaaaaaatggttgaagaatttttcaatatgggaatagaagaaaaaaacaagtttaggcaacaaattggggatttggaaggattagggcaagcttttgtggtttctgaggatcaaaaacttgattgggctgacatgttctttcttgtcacactcccaaaacatctcagaaaacctcatttgttacccaaattgcctcttcctttcaggtaataattataacttaattattaatattttcgatcacactttattaatatgattataaagatatcgatcacctctacttacaataaaaaattacttattataaaaagtagtatttaaatacaagtatggtcggctgactctgaaattttgtgggtcataggatgtaaaatatttttaggctcttatttagaaaaaaaaatataatattttttttttaaaaaattagtaaaaaatatgttaattttatttttttaaaaaaaaaaggttttttaggggggggcagggctaaatgggccctagacacaggactaatctgtctatacctaaggccggacttaaatacagattatcactaatttaattttaatttattaaatactgttacgtaaataaatattaaatctcacatatattttcacatgtttaaataatgtatttaaaaaaaaaatactagttagtaattttttgtaaattattagtttgtctaattcaccattaattatttgttatataaataaaataataactaattatttctagaatctaatatgttaaatcatataagataagataatgtagtagttggaaaactaatcacattaattttagtgtagacccaccatgcatgactatatgtgttatattactaacaatcggtctcttattaaaaaaaaactatatatgtgatttttttttatatatttttaaatataactataattaattataaatattattcattttttattttattctacaagaacaagacataattaagaagaataagtaaataaatatatgtaaatataattattgtgtactatatataataatataagattatgtttattatctaaaaaaatttggatacattatttaacttttttgaaattgcaatggttatccaacatttatatatgaattaatattggttgctcaaattggctttctagtttttttaaaatttattaaaatatcacacactttgcatagggaaaccattgaagcttactcaatagagctagaaaatatagccaagaaagtgcttgacttaatgggaaaagctctagggatgaagcctaatgaaatgagtgaattgtttggggaaggatggcaaactatgaggatgaactactacccgccgtgtcctcaacccgagcttgtgatcggcttgaacgctcattcggactccataggtcttacaattcttctccaaatcaatgaaacggaaggtcttcaaatcaagaaagatggaatttggatccctatcaaaccccttcctaatgcttttattgtcaacattggagacatgctagaggtatcaatgacttaacattttagtgaatatgcaacaaaatttttaatttattattactattagataccagtagtgtctaacactatattgaggtgacgctttataaatgactaacgatattcaattataattattaaattaaatcatgtaggacctaatccttaactctatccatagcaatataacattttaagtggtactaaacatcaccggtgcgttttaatatttctctttctaattaggtcaaataaataaaatttcctacttatatacatattatattttgtatggatgtgtagattatgacgaatggagtttatcgtagtattgagcatcgtgcaacagttaatgcagaaaatgagagactttccataggcacattttatggtccgagcttgtatggtgacataggtccggcaccaagccttgtaacaccaaagacaccagcacagttcaaaacagttcgtgttgaggattactttagaaaatttttcgcacgcgaacttcgcggtaaatcttatattgatttggtgaggagcaatccaaacaaagaagggtaaggtaatattgcctaaaaaatactaaagagcttgataaagaagttgaataaaagaatgttttctatattttgatggatatgatttggtttaatgaataagttgcaaattttatttaaaataaattataagaaaatagagaccatgtatgtacttgctctcaatttctaaatttcaagatgttgtaagaatagtttaagaaaatagattttaatgttacttaacttttatatagttggaatttatgcatcactatatattgtttatgtttaatttttgttaaattgcaataaagtatgattatatgtggatagtgtgttcgtgtaccctactcgttataattcactatgagtgcatgtataattaatttaccataaaaatgaattaaggacacctctcaaacaaactatcaaaatcctcttataaagaacctaaatcattacaaaagaggatcttcataatactcaatagaattgatagttgtagagagtgaaagtagagtgagaagattctcgagctcagttgtttttcctatacaaagaaagaaatagagagagagaga

SEQ ID NO: 296860 - DNA, 4846 bp, Cannabis indica
atctcatgcttagttatttttcattaaagaagtcttttattgtctttatcttaaatggttttataacggactagctagtgtgacatctcgggaaatcggggcgttacatcaaaaatagaaatttacaaattataattgaattttctaaaccatgaatgacccaaaatccatttgtttttatttaattatatttatatttattgctacaatgagccctattaacaataaacaaacatgagttaacaactattatattagtaaaataaagtcaagtccaaaccctccgtagaagtggccagcttaggagtgttcatttaataatattttgaataaacaataaaacaaaaccaaagtataatctctattgaacaattgtttgtatataactaataattcattatgttatcgaaatatatatattttaaaaaataaataaataattgatgtgatttatacttaccggcttagacggaatcttcctaataatattccgtcctttagattattccggcagttttgtcattttcatatgtttagatatagcaacctgtgataattggaattttgtctcatttcctcgttgttataatcttataattacaaaataaacaaatggattaaataaagaagtgcccattaaaatacttagtcttactatgccttttttctttattattaataatttattgttctagttgagtggctaatcaatgctcattataataaatatctaagtaaaactaacccattaagaatgaatatacccgataattcgggcaaaacgaagctacaaaaacaatgccctcacactttggcaaatctagctaataaccaaacctgttatcctatttttaatcaaggctataactttgttaacatttgggaacaccatacagggtcaaacgttaagacaacatagcatacatttttgatcaagactaatatggagagtaatgaagtaaagacaaatataatcaaataaataaataaataaataaaaaggcttgaatgaacagttcttgaggctagtttagtggtccttcacaacttacaaggagggtgttgccttttagctcaattctctatcagctttaattggcttattgcatttggagtcattatcgttatgctgcaaccccatgatatttgggcacttgcaatgccttcttttgttgcccattgactgcttctaaaatatccaacgtgtgtgtatatgtccctttccactgtttttttacctttaaaaactttgactgataactccaacaaccttgcttaaaatcattgatgcaatcatttagtgacagaaaatagtttgagcagaccaaggcactcatggatctcatttcgttggtacaaaagctgcccattggggtcaaatgcctatttgggcacttgctggtcatcattgattaagcaaaaaaatgtttaggaaattgctttcaagtcaaatggggtttcacttgagcattgttgacatggtttcatcacattgagacacaaattgtcttcacctctaagtcactagtcatttggatttacaattttggaaaatgttctttctgactctacttcccattcttgccaacttcacaggcaagaaaaaatttctttttttttctttttttttagacatacagcaacactctatacatggagtagagtgcatagaaatatcttactctaattaaaagatgacaaatcatggaagcagacttaaaatctatattccataattagtgatcccaagaggatcaacttgagtcacattaacctcttgggttctcactttggtttcgctccagatcaacgaggcagttgagtccaagctcagcatacttttcttccctccacctggagatccttctagggtcaatcctccaggactctcatgtgatgttaggcagctctctgtggaacaatcagctcttaatggacaaagactgttcggcatttcttctcggccttgaactccggctacccccgcagattgtgaagaatagaagccaagtggatccatggtgtgactcataggtgttttattccctaatccttggtatttttggtgttccatgtcaataacagaacctccaataaattgatcggcaagcatcttacaagctctctcaagcatcgccatatatctacgctcagcgttctggcgaatctgcaagtgcttctcagcctaaatagcaatgaaaaagagtgttgtttagaattggatgtgcttttaacttaatcatcactcactaacaaatttaccatataataaacataataataataaaaaaaaagtcccattgcaggcaaaaagattacaaaataatctcacataatatcatcaatatctttttcttttttcgataactatggatacccactgcctcaatgtcatgtcttgggtgacaacagagatttctgcagctactaggactcaaacttgagacgtctgtcataagcagactttctcaagtccatccttgccgccaaagaaaattctgaggtactcaatccaagttactactcactactaccacctattactgaggttttgtacactttaaaaaggcaagtttaggaaacgaaaattacctcaacttgtaaatgtaatttactttgtacttccatttgtgctcttagtgcctccttcacttcatagcccctatcaataacagttcttacataatttagtcctatttaccaattccatgagcaatgacatgaaaacaaaccataaaatgattttacaaaaagacaagaagtgttttcttactcattcatatcagaagtaggcaaatttggagaagaatttccagttcttgggctgtctataaggaatgaagctgaaatccctcgcataaattggctaaagaaatcagtctacttaacaaaattctgataaatgatttatacttactgtggttcatcattcattcacatctaatttacatacacttcataattccttatatatattagtccctctctggggaataaaacaaaagagaaaagcaggaagagaaaaataggttattatgacacaacgaccctctttagatgccttacccatatcttttcctgactgtatgccgagtctgtacttctgaaatataagaataaacattacatatcaataataagtctataagaattttgcttttggccaacaaacagtccactttatttgtcatagtaatagctaaaaatgaaaacaaacctggaggtgactcttcaaatggaaaagagtcagtcccttcacattcattgtccgcattatggcctttggtgtggcttctgcagttatcagtcatgaccattttagggcactataataataaaatatgataatccagcagttatcagctactaagatataagttaagatgtgctaatgaacaaacaactgagtggccaaagcttgatatatgaggtccatcaaacttgtataagttacaaaatatgttaacatacttaataaagtgcaaaaattagcaagcctttatacaaaatggctgagaatatagtttgttaagattctttcttaatgatcttgaaacatagattgaggaaattaaaaggttgggatccaggggatacatatactcaaacaatcagcttatttatccagtacagaagatcatcaaatgaagccaagaaagacataaacatcttctatctaaagactgaataaattctatgattggtctggcaagtggaattgaaagtatgtctgaaagataaaagattgaagaaacctaagaacacaagcttcaattggaaaatacaggcccaatgaccttaaaatcctgagaggcttcaggacgacaaagcctgtcctgtcctcacaactcataaccgttacagatactaaatcactaagacaagaatggccccatcagaaaaggcatcattgactaaagtgatcaacacaattatccttcaagattagcaactagtaatcaatttgcccttctagaaatctctttcttcattatgacaagagtttactaaagctatatttactagttcattttacttatttaaggcaacaactggcgaatcttccacataattatataaaaattaagaatttctttacattgccttttagaacattctccgtatacgattctgatcctaataacatgacctaagagtcctaagttcaaaagaatatcaaatctagctacccaaaacctaaaaacacacatttggggactctgaactatgaacaaattgaataaagcaaaatagatatagaaagagagaggactaactactagcgccgccgagctgagtaacggcgtcgacaaatcgttcatgaaggtcagcagtccaacgaagacgtggcttgggatcggaagtcaagacgagacatgggtctcccctcagattctgattaagtccatggtttgaaccaatcccttggatttgaatatcatcctggcccattatcccttcatgggtctgaatcaatctggggaacatttgacttttttccttcggaatctaaagccccaacgacaccaatcaatggaagacacccactttcgcctgaaccgaaaatatggatatgaatgaattattgatgaagatacaacagttttggtccctcgctataatataatatatccaaggaaaaataaacagagaagtcgaaattcattaatggtaagaaaagagagaaaagggaaaaagtaatagagtaatgtggtagagaggagtagggtaaggggggtcgtgacaggagtagacgtgtttctccaaattttgtcagttaatgtggtctgtcgtcttcttcgctgtactgtttttcacttgtcctctctctctctctctcgttctt

SEQ ID NO: 296861 - DNA, 2156 bp, Cannabis indica
aaaaaaaaagtaaaaaaattaatggctttattttatttcataaatatattacatgtctccatgcatgaaattcttactctttcttttctaacatctgtttcgtgcaatctcttagtgtcctaatatctgttatttttcccacctacacctgttctctaatattggagttatttattattattttgagaagagagaagataccgtgaaccgaatttgttgtttagttaactgtattaatttctaatgattttatttcagaaatgtcattagcttaattaaatatatatcaaactaagtcgaaaactaaacgggacgattgaatttacctgtaaaaaatcgaaaacacggattttatatagttggaatggatgtttaaggattatgaattggattggtggtaggaaaattcatgaattgtggatatgataacctaagcaatatatagattgcattgctgaggccagaagatttccacaggtcgttgtcacattattactgggcctggtccttatcttattaatttattatttaatttaattatagttttatatctggtaccaaattaatacaagaggtttatgtataaaaaatggagaaataaatcattaccttcattgaatttatgtgatgatgtattagaaattgttattatgtatatgtgtattgttttgtgctctgatatttctcaatttgtaggtatgattctcgagtgagagacctcctggacttcagtatctacttggacatcagcaatgaggttaagtttgcatggaaaattcaggtagctctacaatctatacacacggattatatatgtagatacagttaccataattgtatctgatcatcatcatacccataatttacagagggacatggcagagcgtggccacagtcttgaaagcatcaaagccagtatcgaagctcggaagcccgatttcgatgcttatattggtaatgatctctttaagataattaacttcaaatggtttaagttctgttttcctttcattcaaatgacaattttaatttgtttctgtgtcaaatgggaaatgccttatcatacatccattttattttttgggttggttcagatccacaaaagcaatacgcagatgctgtgattgaagtgttgccaactcaactcattccggatgacaatgaaggaaaggtgttgagagttaagttgatcatgaaagaaggggtcaagtacttcagccctgtttacttgtttgatgaaggatccaccatttcatggattccttgtggaagaaagctcacctgttcataccccggcatcaaattcgcctacggtcccgactcctactttggcaacgaggtatataaatttcactacaaactctttttttgagtatgggccagttcatataagatttaatatgctgttttcttgttaaaaaaaattaggtgtcggttttagagatggatggacaatttgacagattagatgagctgatctatgtggagagccatctgagtaacatctcaaccaagttctatggagaagtgactcaacaaatgttgaagcattctgatttcccaggtagcaacaacggtactggtctcttccaaaccattgttggattaaagataagagatctatacgagcagatcagtgcaagcagggctcaaactccgctagaagcttcaaaagcttaactaagataataaataaatcacaactggacaacatgccttatttgccaatgaataaagtgccaatgagatcagcttagtccagaacaaaatatctcctcttcttcttcttttttttaacggttttttacattttctaatttaaatttccccaactcctactttcttttctttttcttttttaaagaactttctgttgagtgttaggctattcctaacaaaaaagggaacagagaacgcttctgtacgtatgtatttatttttctgtgtatttcgatgatatgttggagatgtataatatagagaatcataaagcagagaatgaaaattctgttatcaataatgtttagaaaacgaatatactgcgaatctttatatattaaaagtgtctatctaacggcaattcttggtttaacagaatattcttaaaaataaaaagaatattctgtttaaatttaacgattaggtttgatctcccg

SEQ ID NO: 296862 - DNA, 5671 bp, Cannabis indica
ttattagaaaaagaaaagaaaatcaacttcagttctgcgtcaccaattacaatcctgaaagaaaaaccattacaaaagttagaaatgaaaagcaaaatggatttattcatttttccattttaacaaaacattagacggatgagagacaaataaaaataaggtaggttcaataaataaataaaataaattaaaaaaaatgtagtagtagtaggtgtgagtcagcatttattaatttgcttttaataaaaacaaaaacaaaaaaagttagtctcctctttatttattagttgggggtagttgaatatgtgaggcgtagtagcagcagtgacaggtggagacgaggcgtgggacacgagggaaggaatatgcgagggcattcttgtaattaaacccgacaaacagctccattctggtcaaacgtccaaccaatagatgagtgaactatgtacaacgctgcaaaaccaaaactaaactacaaaatattccataatcgaactcaaacttaactctctctgttctcttctatgtcaaactcaattatggagtagtataaaatatttcttttgatctctgttcaaactcaaactaaactcttcaatggcttccatctcaggaatttgcttctcttcaccatctctcaaacccaacaaaaaccccttcctcagagccactgccgccttcttctctctcccaatgcactccctttccgtaccgactcgttctcctcgaatcgctcccgctcactccgtggctcgggagatttcggctgacttctccaagtccgatgggtctgcctttccgacgaagaacaatggattagagaaagacccccgcgagctttggcggaggtacgttgattggctgtaccagcataaagaccttggcttgttcctcgatgtgagtcgggtcgggttcaccgatgagttcgttgaccagatggagccccgtttgcaggccgcttttaaggccatggacgacctcgagaagggtgcgattgctaaccctgacgagggtcggatggtcggccattattggctcaggagccctgaccgcgccccaaactcgtttttgaagtcacagattgagaacacgctcgatgctgtgtgcgctttcaccgatgacgtcgtcagcggtaaggtcagtttagtgttacagttcatatttttcgacaacacccggacaacaaaaaaatattattgtgtttaatttgatttgagataaagattttgttacttgtgagaaaccaaataaaagacagagccatcgatttgggttatgcaagtatttttgcaattagagtagtagtgttgagattagtttttgatttatttgcagattaagccaccctcagggggtcactttactcagatactttctgttgggattggtggttctgctcttggaccacagtttgttgccgaggcactggcgcctgacaatcctcctcttaaggtaaacaacaagcttgtattatgtagagcgctatagcctatagcctaggaacatattttatttatttacttctttaaaggaaaaggagatatcccaactcctagttgattgttttcttttggctctctcttgttggcagataagatttatagacaatacagatccagcaggaattgatcatcagattgcacagcttggcccggagttggcatctacacttgtcatagtgatctcaaaggttcacatggatgttttgtttgtctattttatacataaattatatgtatatatatatatgtaaataaactactaaagacttgcttgactatgtttttatgttgtatttttcattttttaaagtgaaaagaggacgaggatgttctcaagatgttgtttgagaatgtcactctattatatttcgtttaaaaacaaatgaacaaatatgttggcaaggaagccttaaatggttttatcacttaattactatatcatagaagtagctcaccatattgtaaaattgtaatgagtacaacaagtagcatttgcaagcttgtcgtaatctctcgtttataattgggtatttatttaatataatttattttcaacaaatatatcttatttgtaattttgctactaatttatttatcaattttttttctctttttcttagagtggaggtactcctgaaactagaaatggcttattggaagtacaaaaggcctttcgtgaagctggtttggagtttgcaaaacaggtcttaatctcaggttttctttctgcttaaatatgtgtctttctgcatcgtgctaaatatgtataaatctctttggtgctgtctatgtcttgttgggtagatggctcatttttagtcagatgcgaattgatatttgatatgccctaggtgtggacctctttacctattatcatatcattttctcatgcagggtgttgccataacacaagaaaattcattattggacaacactgcaagaattgagggttggttagctagatttcccatgtttgactgggtaggtggaaggacatctgaaatgtctgctgtaggtcttcttccagcagcactacaggttggtacattcatttcattgtgtaatgtaaccgtaactctttaataaacattctctgattctgaactatgctttagggaattaacattagagaaatgcttgcgggtgcagcattgatggatgacgcgaacagaaccactgtggtgagcatcctttctgatctgttttatttgtctgatggaagttgtttctgcataagcagacaaagtggacattgccacggaaaagatgcttttccaattagatcacattcttttatctatctcactcccacatttgatagttctgctaatgataacactttgaacattcaactgatcatcccttcttgtttgttttgtgatggtacaatactaaactctgtcattggagatgaccaatttcttgcccaacttgttgaacttctagtaaatagtttctgtatgccaaagagttggattaaactgtttaatacagatttgatgacctttccaatcgcattgctcaggtgaaagataaccctgcagcattgcttgcattgagctggtattgggcttgtgatggagtaggatccaaggtattgattcttaatctttttcttcttttcttttattatgcgctcttctaaattctgttattctttaatttggtttcaatttggttctcgattatgtttattaaattgtcctcatcttcgcttcttacaggatatggttgtgcttccatacaaggacagcctgttattatttagtcggtatcttcagcagctagtcatggaatcccttgggaaagaatttgatcttgatggtaatcgggtaagagttgagtactaatatgtaagcagtcttttgtttgtattagtttgtattttattgggaaaattagcaacatgtgaaatatgttttgcttgatggattagttcttataggcagcatttggaagttgcaagtcttgaacatcaagttggtcctgaaataatcttgtgatcttataggtaaatcaaggattgactgtctatggaaacaaagggagcacagatcagcatgcgtgagtttccattctctaaaaacaaaaattggtcacttctgccttgatgtatactctattctcagccagatagtaactgttctttcctgcagctacatacaacaactgagagatggtgtgcacaatttttttgtgactttcattgaggtgctaagagataggccccctggtcatgactgggagcttgaaccaggtgttacatgtggtgactacctttttggaatgctacaggttatattttattataaaacactgtcattcctttttttttttttgcctgctaattgctatgctttttctttcatttagtagtaactcacacacactgaatcctctacagggcacaagatcagctctatatgccaatgatcgggaatcaatcacggttactgtacaagaagtgacacctagaactgtaggtgccctagtagctctctatgaaagagcagtaggaatatatgcctcagttgtcaacattaatgcgtaccaccaacctggttagtatccatgatttcagttgttgtagatattgagtcttgagtgtgaaatagggattttgttctctagcatcataaatttagtaactgatgttttaatttgaaaattattttgtgttacatcctcattcacctcattgtgtttaattgatttctcaggtgtggaagctgggaagaaggcagccggagaagtgttggctcttcagaagcgggttttggcagtacttaatgaggccaggtacgatgtcaaattttgtccttacgatgaagcgacgcagttgcgtcatgccaaagcatgagattacagtgtgagaaacatttttaaaaaccagaaatcttgctccattgttgaaactaagctttctttctttaaatgattcagctgtaaagagcctgtggagccgttgactttggaccaagttgccgaacgttgccacgctcctgaagatgtacgtatacatatgtacttttttttcttttactcttttatcttgctcttcgtacggtttagttttgtattgcaatgaaaatatatgtgctaaaaatcatgacatgggaaaagaggggttcaaggattggatgtttttctaacttttttataacttaaattgtggcagatcgaaatgatttacaagattattgcccatatagctgcaaatgacagagcactaatcgcggaaggcacctgtggttcgccgcggggcttcaaagtttttcttggggagtgtaatgtggatgagttgtatgcttaaattcatttctatttggtatgcatgccatcgggccttaattcggaaaataataacaaagagtagtaatttggtcgtctttaatcccttttcctttcttacatttgtttgaactcgtggatttttttaaattaagttgaaaataaaattcaattcaagctttatttgatatgtagtttatgaaacctgattccagatggtttgtacacaaataaaatccaagataaatgatttagaattgcttttgttctgctgtcttatttgctagtaatttttgtgctaatattatgattttgttccaaacacccatattggtcataagacacacaaatctctggatattgatactgacattggtcaatgcaaaccattgtagaattcttctgatgtgtttgaaccactgaaacattgtttgtttagtttttattatttccatcataaatattgtaaaattggataatattttgataaatagggaaatttgacatttattaaattgtgtgatttggttactgaattttataaccgaatctcatgttgttccacgggcagaagagggcttgggtagcagagaggtgacgaaaagaatgtgttcatccgattcaatccgtacttttttggtcaaacaacatctaatccgcactaagtgcggatttcatattttggatccaatccgatccgcataagagtttaaatccaatccaatccaatctgcaatagtgcggattggatcggttatttttttaataatagtttatttaatatttcatagtaaaaagaatttttttaaaaaaaaaactattgtttcttaatctccaataataatctatttccatatccatttatatataaatcaaac

SEQ ID NO: 296863 - DNA, 2755 bp, Cannabis indica
aaaaaaaaaaaaacaccacaccacaccaatctatctatctatgtttaactctctattcctcatcgaatttatgctttcctaatcctatccaacctttttggaccttaattatatcgaaacaccactcaggtactttcctttctctttctctttcttttctcagactttttcaatgctaatttctttgcctgattaatatttttggtttttggtttgcattgacttttgtttccagctgattggttctgttttctcattgattccattaaaataataatccacataataattctttgtttcttatattcattaggccatctttgtacaaacaagcaaaaactatccacaatctaaaggaagttttagaaagctaccaaattagtactcgaggtattggccttttatctttgtgattgtttattataattgatcattatgatcttattggttttatggagattttttttttcatgggattgaatttgattattggctatagttaaaacaacatattagattgtttgtactttagatgcagcagcaaatggggcaatttgatgtggagcaaaagaagatggaggagaaattatatgcaaccgagcatgaaaaagaccgagcactggccgagctgagagccatgagaaagatgattgaagaggacaccaatgcaaaacgccgtgaagaattatccaaacagaagattgaggagatgcatagggagttgaattcagtcaaagcttcattagccaatactaatgaagaaatgaataaaaaagacaaaatgatcaagtctcttaaacttgaacttgaaaaggcaaaagggttggaactgaaattggaagaagagttggcttatgtgaaatcttctgaggctaaaacactggccttgtcaagtgaaagtgcgaaaagggttgttgaaatggaggtggaagttgagaaagggaaggaatcaggaaccaaaatgtttgattccttgataagccagatgaagaaacttgaggaaactcaaatgttgcttgaagaatcaaaggttgagattgcttctcttcaccaaaaagtaaagacattggagagttctacagggcagactggtatacaacaaaatggtcatgtggggaaggcaatggagagtttgaaatatgagcttaatatggcaaaagataatcttgctgatgcagaagaggtaggcaaacaggcttgtttaaaggccaacagcttgattaatgaattggaatctcttaaaaatgaactgaagttggcaactgtggctgaagaaaacagcaaaaaggcattagatgacttagctttagcacttaaagaagtggcaacagaagctagtagggtgaaggaagagcttggattagccaaggctgaactagaacactcaaaaggagaggaagaccgtttgaatttggttctgaagagtagtgaagaaatgtataaaagacatttggaagaagcatttaaagaagccgaaaagtacaagaacacagctgagaggttgagactagaagctgaggagacccttttggcttggaatgacaaagaaactggccttgttgattgtataagaaaagctgatgaggaaagatctaatgctgaacaagagattgccagattggctgatttgcttatcgaagccgaaaacaagacaagattatccaaagaagagaatagtaaactccgtgatatactcaaacaagcattgagtgaatcaaatgtggcaaaagaagccatgttgattgctaaagcagagaattcagagctcaaggacagattggctgagaaagaagaatccctcattttcatttcacgtgaaaatgacaactacaggcttaatgaggctgcagctattgagaacatcaatgagttgaaaaggttgctctatgaagccagtgaccaggagtgtaataagaaaggaggagagaaggaaaaaacaaattcaaaagtggggaagactaagattggcaaaacatggagctttcatctcaaggagctgaaactcttgaacaaaaatgatgatgaagatgtaagtgaaaatgaaattgatgaggcattaaggggttcaatatttgatgtggtggactctcctgttgaggctgaaactgatgttaatcatcatagaaagaagtcttcttctgtattcagtaatgaagatgaagcagttattcagttggatgattttgataatcttgatggaacccattttgatgatttagagaatgatagaacctcaagaaagaagaaagccttgttgagaagatttggagatcttcttataaggaaaaggagttttcacaagaaggaaccttcagagtaaataactcttcttatatattggtgtgtttgtcatgccatttctaatttttgttgttcccttattttagttctgtactatttttattgtaaattgttctttattattactttattagatactactacaattttgtttttttttttttttctttctaattgatttatttttggattgcatatatgtaaaaaagttaatttttttttttttgaaactagagttaaatgtttttattgtactagcagagtatcatcattatcatggttagctcgagtaattgggtgtatgagtttgtagttagtggataggagttttattcaccgttgtattaaacaaattagtataatctaaccaaaaatgtgttcctgaaaaatgaaaaagaaaaaaaaaacaaaaacaaaatatatatatatatatatatactaggtgattgttacg

SEQ ID NO: 296864 - DNA, 6108 bp, Cannabis indica
tgttgttagtaccaagccattttgaattacaggtttggctcttgattttgccttgaacttgttttgtttttgagtgtcggcaaacacacaaacgaagccattcattgtctaatttgaccacattttgaatttgaggaacagtattttgtactttgtacgtacaaattagcctactccattttcaatttagtaattcaatttcctttctgctcacttaattgttatcaattttgcttagttcttagctgaatattccaagttcaactttcacaagataatcttcaaaactcaatttatttctcaaagaataaaaatgagaagttgtaatacgtggtaattggaaccagctaagcggtagaatgggccaaacgtgttttttgcagttccattaaattattttctctcatttttttttcttacgtaatttagtgaattaagaaagtttttgaaatattctttccaagagaaattagagtgtgaaatatatagtaattcctttcttaaattagtgctaacatgcgccacacggtctgcttcccaatttgcccatattcgttttaattttcgtctctcactataaattcgaccccattataaagaatttttctcctcattttccttgtttctgaatatttttttttattttctcaggaaaatttcttatttcgagaaaatgatcggaccaaacttcatggacgagattgactgcggaagcttcttcgaccacatcgacgaccttcttgatttcccaagcgatgacgtcgacgccggcttgggtccaagcaccgacaacaaatcgttcccaagcatttggtcaactcaatcgaactcgctccccggttccgactcggttttctccggcaatagtgcttctgacctctccgccgagctctctgttccggtgagtattagtcagtagttccccctcacatggttttcatcagtttcccgttaattccgtgtttggcttaccatttttaataatttaaattttttttaaaacaaacttttagttaatttttttttgtaaatgacgtcataacctgtaattacggcgtcgttttcaaatttccgattaatacaaaattaagccaggctggcaacccatgaaatcttcatgcccattgcccactgatgtcaacatcgttgtgtctctaatttggtggttttgtttgtttttctttttcaaattttggcttcatgtctaaatcaaaatgagtttaaatttcgaaatcggtcccttttggttaggggtacctttaggtaatttcactctcttcgtctagaagggtgctttctgtaaaatcacagtgcgttatcaatgtcggtggataacttgttgaataattgctccattaatggatgtcatgtgagtttgtcatgtgatagtttgaaagtgaattatggcgctctgtgcttttttttattattcttacctggctgtcctttactttgccccccttttttatattttatttaacttttatgaattaatacaatcattgttttttattaaattccaatgttacattattatttgaagaaggtatgaatgaattgacaattgagtcataactgattaattttttattttttggttataatttcagtatgaagacattgtccaattggaatggctttccacatttgtggaggactcattttctggtggaagtctcactatgaacaaagaagactcgtccactttaaacaaggactcatctcgccaacagttccaaacttctagcccggtttcagttctcgaaagtagctcttcttgctgcggtgataagagtggacctcgtagccccgaagccaccacccctggagggcggcgtggacgtgctcgcagcaagcgtcctcggccagccacattcaatccccgccccgccattcaactgatttcgccaacatcctctgtgattgacaccccgcagccatttgttggccttaagagctcatcagattctgagaatttcgctgagtctcgcccaatgattaagattcctagacaaattccagtggatcaaaagaagaaaaagaagatcagactaactttccctgcaccccctactgagatgaatcaaaatccaactttgcaagcagcagttaggaagtgtatgcattgtgaaatcactaagacacctcagtggagagcagggcctatggggccgaaaaccctttgcaacgcttgtggtgttcgctacaaatcaggccggctctacccggaatacaggcctgcagctagcccaacattcattccatcattgcattccaattcccacaagaaagttcttgagatgagaaacaagggtggtgagctgatagctgtgtctggaactgcgaatgcgatgactttgaacgaggccaccacaccagaacttattccaaatacaaatagcagcatttccctggattatatgtgaggaacaactagggaaggagttgttttcccagtttgggaaaatggtttctttactggccttccctattagttcctctattatgttatatccgcttactgtttatttcatttctttgttcattggttttttgtacagggatggaatgggggggttggcaaataggagcaaacatagatgaccatatatttttagctagtagagaaggaaggattgtaatgagagaactgaaaaggaagaagatatggtagaaaaaaggaatatgcaagtttaagagagtagagagtttaggtttagtttgatgattagtaaagtcctcgaggttatattaggtttgttaagctctattctgtgtttgtctctctctttttttctttctttctttgtattcttttctcgtgtacttccttttgtaagggaattctttttgcagttcatttgtagtagcaaaaattctgagacgagtaatggaatttgaaatttgttatacttcttttcttaattattttatttattttctcaagaaatgaggtagtattcttcttttttactttaccttgtttataaattgtaatagtaagtactagttgtatgtacccaatcgtattaatgggacagattttgtcagtagtgtctctttcagatgaaaagcttgtcttacttgcattatagattggcttagtagttcagtacaccttttgctgctttacaaagcaagcttgtataaagctcctctccaaagtaaaggtacgttccctaaataataaaagctattgggtgaatcacaatcatgcttatcatctagaacaaataacacactcttatcatttttttaaattgatattgtgggcaaaattacataaaattttatgattgtaacactttaactctataaatttattttttgagggtaaaatttattctgttttggcatttatacttctatttgaaaaatttgttaagtgtcaaagtgaattgtctatgtgtactcaaatgtaaactgacaaatttttagttgaaaatgaacaagaaagttagagcttagcttgaaatcaatgtcaacaaaaatgtgttctttattgactttcaacacattacaatcagagttttgaactcaattatactcatcaatggtgtacaacactagttacaataattcctcacagtggggagtctggatcagatacaccagaaacccatttgcatccctccttcacacactaactgtctagaactgagtacaactcgagagaactaaatagtagagagagctcttctaggtgttgaagttgtcttaagtgtagggttgttatgtctatttgtagttattggcaattgaggtagttggatataattaaaagccaactaacttaattgcctatcgagtacaaaggaaacagacagatgtactagatcgatgttgcagcattcggctagtggctagtttagtgagctaattcccatcctgtaaaccagtcatgcatggatgattcaagactcaacaatcttgaatgctcaataggttcaggatgtcatgaaacttgtctctgcaaacacgcttagtgaacatgtctgcagggttgtcatgggtgcatattttcctcacttgaacctgttttgagagtactacatctcgaatgaaatgtagatttatatcactttgttttgacttttcatgaaacataggatttttcatgagatacaaagtactttgattattacaatggacaattatgtcttctgaattaaatcccaactcactggtcaaacactttatagccatagtgtttccttgatggttttagttgtagccatatactcagcctctgtagaggaaaaggccacaactttctataggttggatttccaactgacacaccatcctaaattgaaaaaacataccctgtacatctccttcttgtgtcaatgttggtagcaaaaattaatgaacaaagcctgtaacttcttctttgtattgacttctattgttgaatatcagaccaatgtttaaagttcctttgatacacctcatgatccacttcagggcttctcaatattcagatcctggatctaagatatatctactaagcacatggcatgaactagatcaggtctagtgcatagcatttagtacatgaagcttcccacacaacttgcataaggtattttactcatcttgtacctctctgcaccagtggttggggactggtatgcaatgagcttgaaatgttgtgcaagaggggtggagattccttacatttgttcatgccaaattcgcacaacaacacctataagcaacttttttgagacaatgttattgtgtttggtccaggccttttgattttaatgccaaaaattctcttagtagcccctaggtctttcatttcaaactcattattgagttttgcctttatctcatctattttttatctttcttttccaatgataaaagtatcatctacatacaacaacaagtagatatgattgttgaaataaatacatgaatacttacttttgttgaagccaattttcatcatatgagagtcaaatctcaaggtctattaccttggagcttgcttgaggccatacaatgacttcttgagtaggcacacctcatatggattttcactttcaaaccctagagtagttccatgtacaccttctcttctagttccccatgtaagaagactgttcttatatctatttggccaatttccaaatcaaactttgcaaccttggccatcgttgccctgattaaagtttgcttgaccactggtgaaaatatttcattgaaatctacatttctttcagtgtgaatcccttaaaaactagtctttccttatacctagctttctcaattccaagaattcattccttttctctgaatatacacttgcaggctattagtttcagtccatctagtctcttgaccatgatccatgtcttattctccaacagggacaacttccattcttctattgcttacagccatgttgcagcatctttcctattgattgcctcttgatagcgcaagggttctgagctatcaacctctttagcagcagttagtgcataggcaatgaaatcaccatagccaaatctactaagtggccttctttctctcctttgtccgtctcttgctagttggcaactactaaggtcatcctgattaccttcatctttattatttcttcataatcttctagaattttagggttcccaagtccacgacaattctaatttaaagtactcataataattggcgggttcgagcaccaaagcccacctgcttcttgttttctaaatctctctcattatcatggttcattaagtccatactcaccattggcccatcacttatactgagcctaattttcttttattattttccaagaatatagtgcctccttttgtcacactattactgattctaaggtttttcattggacaacatctaatgtttttaggcatatccacatttgatccaattatatattgcatgttaaattttaccatctgatctgatctaattaatttcagtaattcaatcgatccaacatccattggatgttggattggatcagttctattcaatggatgtatttcatgtgttgacctcgcttttagtcaacgtcaatgagtcaattaataagcaattaagagtgtaattaaaatagagcaaaaa

SEQ ID NO: 296865 - DNA, 4038 bp, Cannabis indica
agttgttatatcttatatatagttatgtgttggatttttatttgattattcattatcccaagtttcttttgggtgttaaaatgaagaaagtgaagcttgctgggttgtgttttcaagttatgaatttgttatctcttatgtcatttgaatatattgtttcatattttattgctatattctgaatctttttgaggtaaataatgagatttctaatgtacacataaatgcatttctctgattctctttttttattttaaattagatggagacgttcttgtattcattgtagtgtcgtcaggactcttatctgggcaattgttgatgtatcttgtaataatcacatattgtagttataaatctaaaggcagcagccacaaagtaggccaattccatcttatggtcgctattatcatcttcaatcgtgggtaatcattctgcattatcatggaccataaagataatcaatctcctcaaggttccttaacatgttccttctttttatttagttattttagtggggatagttttagttttatctcattgcgtgatttaattttaattttaatatggagccatgcatgtggaacagttcggattctgctcgaattcttggaggttgcaattacttcagttgttttccttaaaggagtttacccttcaggtttgattttacattgtttctttgtagtgtttggctgccaagaaaatttgtgtttcaatattaccgataaaaatgagattttttttcttttttccttcaatgaaaatcttgacatacaatgcacttgtggtcccagtgatagaattgctttttcaataacagatgatctatttttcgggtcttgtttgaaggtgcttttgaaagaaggaggtatatgaatttggtagttcaaagagctcgccatcccgaacttagagattatatccattcttcagtttggggacttcttcctttcattgaaaaggttggccttggtcctttgttctttgtttacttcatttctagatattactatccataattggagtcttagaggtgaagttagattattctcaaaatttattattattaattgtccttaacaaattgaaacactacaatgaaaagaattgtaagcaaaattgattcaaaattgagtttaaccttcacattgcactaatcatgtgagagattcacaaattacatatgcactaactgtggaagaaaacacaataatagaagcaaatcattaagattttgatcataatcaatcagcatagccattatagaccataaagcatacacaagcactctggagtccatgaatgtttagcattttgagaaagtttattgtttatatttggattttggtcttagaagctccaaaccgacctctcatcacaagtgtgtttctttcttgcatttgcattttgagaatgtttttttttgttaatatttggtctttgaaatcggcatcccaccaattatgtgtttcttttctgcatttgcatatgtggcataacttttttttgagtaaattattagatgttgtccatgggatttgaattgtacaagatcctagaatttcacttaaagttgatgtttctcacaccttttgtcaccaaatgatacttgctagacacccataataatctttagaaaccctctctattcaaaataatattttgtgaaacaatgatatagaaattgttatgtaggtatccaggacgaactcgaatcttagtccttgtgggatcaaaccacatgtcttgactgtttgagctatcctgcttgggtttctacgaaaaaaagtaatcattagacaccatgtactagtatttcggggtattgctcatgctgcctcatgctaaggctgttcaatctgaatttccaatattctagcaatttcactgaatagttaaaaagacagaaattgattgatccaaaatttgtttctactgctttagtgacatagcactatatctacctgatgttgggcaatgggaaaattgaataaagattcctgtatacttttcatttacaagtcgaccaacattttccttaaccaaattcaacaagatcatagtatatgctttctggttacattgttacttttctggcaatgttaaccttttaaactgccaagaaattcccctaaaataatgctcttctgaattaggatttggttgaaagagtagcagtaatcttcttcaatgcagacaacaaccctgtggaaagatttatcttcaagcttgcggtgaaccagtcttatggctctaaggttgaagaagccgacttggagttctcccttaggtcgtttttgatcaagctttctgtctcagaaccacttactaatgttctttctcatggtaatgcctactactttttcgcatattgtattcaatttcatctgcttttgtcaatcttgggtttagcattgatcagatgttggtgcttttgcataaatgaataatgtcactcttttctgtttacataagttggaatttggtgcgtgtgtacagattgcaggtgggagattacggcttatttccgatccctccctgataaaagtacaagtaaagatgcagggttatggattccaacagacacaaaacaatggcatcaacctccattgataactccaatcaagtcaatgagtagtgaacctctgtctttacagttatacctagaacatccaagtctgaattaggcttccccagttatacttaaaacttcttacatgtgttgtaagaaatcttgtgaggacttgtgctttatgctcctcaccaagagtgcttcgaaagtaaataaataaatattgcttcttcacaagttcggtttgattaggtgattgatttcacagagtagatttgtaaagagtaatggagttggagaggactcctctaagattctctcccatttactgtaaccacttccttttgtctcagtttacagtgttttttttaagtacatttttattggattcataaaattaaaagttgttgatttcatgttatggctaaggcactgagtcactattaagtgtttgtaaaaatttctccctagatttcactcttgcttttgatcccatatttatattatattattccaatcttttgttaatttgaaatttcttttttatttctgattttgatgtgtagtaaaatgatttcatagttgctaatcttcaaattttgtagaaaaataaatggagcttgtgatttcttcagataacgacaggaggaaatgaaaagggggctcaaatatatgaccttggctatctaaacaaaatcccaatttaattatcattttgttatattgctggtgactaagggaaccatatatataagggatacccaatataggaattggctcagagcaggtggcctattgcttaagtgttaatttggtgtgtttctattttgaacattggatttgttttttttttttcgtaagaggaatggatttggagttaaccagattggacccatgtctgagcctgccttaactggtattgggcttcgaaagcttcgaaattgcacacgtcatcattctggaaacccgaattagtttaatgattttttttaaaatacaatttttaaaattttaaattatacatgtggcgcggacatgaaaattgtctacacaaccacgttatcattctatttatcacgtgtgacaaaacctaatagaagaatcattcctactgtgaatagtttgagaactattttaacgcgttgaaaaattcaggagcacaataatagatatatcataatttagtaggtaaaaatcctaaatagccataaaaaaatgctctatttgactaagtttatgattttgattaaaacttgaaatacaaaataaataaaagttacaccttgttttcggtaactatttgttgtcctcaaaagtgagtgttttaatatttatactcgcaagtgcacgaatcgtttcggaatatagtgttcatctaagtgcaaggtcgaacccataggagttgactaacatcaaaagaaactatttcaaacaaaataagaatattctaacctagctccaaa

SEQ ID NO: 296866 - DNA, 3779 bp, Cannabis indica
tttttgtgagaagaatcgagaaactagtattattaagattataaaaatcatcacaatgaaagggtttatatatccaaacacatcaagccaaactaaaataattaaatattgtagggaatcttagccactctaatttgaaagactctaagttaccaaatgtcatccatcttatagtgcctagggtactttgtccgcaatctgtcatgtaattttggccaatcacccattgataattttgttttagtctatcttttgtacttaaaaatcaaactttacaaagtcccaacattcttgggaaaaaaactatagtaaactattcagacctgatgaattatctctaccacaataaaaaaaacaaattgaagccatatactgcccacctttattctgaagttcaaggactgctcattattgatcttgttttactattggaactttatttttatttctccccttgttttgctgttcaggatacattatatcttttgttggttatttatggaattggaatacatttcttatcttaccttaaattctgttcttttgtggttgctgtgatgcaacttataacaggcaatggttgagcgattgttaatgatgctccgagatactgattatcgtgttaggttttctgttgctgggcggattggtgttctttttcaaacttgggaaggtcatgaagagttatttcaagatatctggtaacttttacttttacttttactaaccatttttttttcttaaaaaaatttgtgattgctagctcttatacttaatacaaatgttttctctcctcttatgaaatttatttgggtctatgggtaacataaattcaatttagactgtgtcccaaactttaacttggcgctctgaaaaagagctcttatagattgaccaataaataaatcacaagaggtatattttgtggattataaatatagaaaatcaatttgtagtatttttttaaaacaaggtacttaaaaaaagaaaaacgaaaatcaatttgcgcttgttttagtatgtttttatgctaaaactcatgtaaccacggttttcctccgtcacaagtgagggttttcaacatgtttcgggtaggggccaaaaaaagaaaaagaaaatcaatttgtagttaaaatggatatttatttgttttttaagttagctaaattgaagtgggctgtttttttttctccatggaactagttaagttatgaagtgttgttcttgatccatacttgtgtaaatgcactatttttttttttttacattatagatttgtcattatgcaaatggatgtaggttttcatcgatgataggatgtataaaatcaacagcatttttgtctataacttctttttaattttggttattttgctagttccaactttggcatttcattggtggtttcctcaaaagaaaaactcgttactgctgctgaggtcttagcagtaggtccacagcctcctcttacaatggaaactgttatcattacactcatgaaccttgcattgaacagcgagaaaatagaacggcaggtaaatatgctgtctttctcagtttggtttattaatttgtgtatggggcaaataagggtctgttaaaggtagtatgtcagagtcactctttgtctgtatggagttgtgctggaaaattcttaaggcaaagtacaatatgagtggttgattccgtggagacattttccttttttttctttctttttcaaatgtttaaaataagggtttgatttttctaaagttcatttatgtaatactgcaactttttgtctttattctattctcctaatttctgtataatatacatggtgtatatatatatttatatattttgttttcttcccctttctattgcttatgattttaatgagttcaaatactattatataagtttatgttgtatggtcttggtggatcatcgttctctattgtttcttcgctttaatgattatgcataagcattattactactttttcattgaagtgttctactttgtattcatttatttcctattcttacttgcaggctgtatttatgatgtgtgtgatttctgctattaatccttgtctgaggtaccgtttgccctttgttttgcaaattgaattgttgtagaatttatttggcttggctttaaaagctcttctagagattgaagttgcattttagaatgtcgggttgagattaaaatttatttatctaaatggaatgtcttctaaaaaaagcagctctctactttcttcttttggaaggtattttgaaaaataaaattttgagttttgatgaatcccaagttcattctgatgactggtaacactatcttaatttcttttacctcttttcaggggattggtttttgtggtacttgacaatctttccagaatgcttcagtatgcaactaggtttaaggtgacacaacagttctctctttctactgctagtccatgggctagtcacttttcatatttgtggctccacatggttttatagaatatttggagtttcactgtctattaatttgcatggagtattccggatgaattatggatttcattcaactttgttatattatatatatatttttactttatatttttgtataagaattagatttatagagcttaaatctcaataattcttttgcagtacttggaagagctcataggatccattcttttttgtgggttgcttgtggtgtgagcttagtgtcacttgttgaggtaagtgttcaggctgatgattggtcataaaattatcattttttttgctatttttttttccttttctgaaagtatacgaagtttactaccagcaggatttctgtttgtctagataatatatatatatatatatatatatttttttttttgcttttacttccttgataatattgtctttgtttgctcatcaaaaataaagaaatcttctttgtttgttatcgttattttctttttttaaactttgcagataagacagctctttgtttcagattcggaacctagttattttatgcagtattgttgcaattggcttcttcctgctctggttctgcatggcgacagttctaatttaaactgggtttctaaggtaggattataaactaggatgtgattgataaaactttttcttttgattctgatgttgcaattgggctggtactacagttggcatcaaaatgtcatcaagtactgcaaaataattttcgacatgtaagctccaataatagtaacagcctcacagacactttacttatgggggaagctaaggatttgcacagaatccttgcatggggagactcctgaaatgattcattagcaatcaatttactgaatgctgctgtattgtttttactcattaatacaagtctcaattcttataaaaaatattaaagtaaaatatggacataagattatgtgttaacttctatgtatttactaagatttagtgttgtcatttcttttttatgtgtcttaactttctatattttctgttgaagtttttcattttccaagtgtttgttttgttttagatagctggtcaaccattgccaattctgttgaaagatcacttcgtgcagatcttttcaatttgtatgggattgcattgcagtaaggcatgtggggaaaaaggagtggttgtgcttcaggattcaattttgcatcttgcacaaatatctgagagtgaacgagacacactcataaagaaacatatggtatgcacctacttctatttagttaatattaatattattattttattttcttaaa

SEQ ID NO: 296867 - DNA, 1520 bp, Cannabis indica
atcaatttcttcttctctctttctcaacgatccaaagcactaatcactatcctgcaatgggagaagccaattaccaacttagaaacgatttatattgtgtaatttcaaaacaataggtactaaattaaagctaattttcttattatgtactaaatttataattaatgaatttttgtgttaatttcgactattgcccgaaagtcaagcatcgttcaagaataataaatatagtactagtctaacaattatcaactaattgagaaaacaatttaatttcaattgattaatttttttttggtgaatcctaattaatttaattcagattaatgtttagtgtaataataaaattataaaacaaccaatggtaaacagtcggacttgtctggttattatgagtgcggtcaacttcaaaggcatcgcctgcaacagggaattttctccttgtccaatgtttcttcatattttgatgatcgccaggcgttccggctgcacccaatcaaaccccacaatttacttttcaatcaataattataataccaaaatttataaaatttaatttccaacttatcccttctttatttacatatttaattattattattattttaaaccttatccaggatgaaacgaacatatatagaataataataataataaatataattaatcatgaaaacccccaaataattaatgaaaaattatatgaacgagatgtatgaagagatgagaagagttacgggtggtgggagtggagggggcactgctgaacggaccggaaggagaatccgggtcggaaaccggaacttgatgagtggataaagtcctgagaggaggtgtggaatttgtcctaagaattgtgatgctccgactaaccccatcattaaccaccacctgtggaggtggaggagctcttgaactattattattattattattaatactagtgccaacggcaaaggagttatacttccggagtttagacagcccagtctccggggtgggcccagctagagtttcgtcccagagcttgtctaagaatcccattaacaatttattatatatcttacttcttgatctcttcgtacctatatgtggcttccttataattttatgatcttatgtatataaataaagatatatttatatattttcttatacgagtgttacgaagagagattatgtgtgggagaatatataggactagacaagaccagaatgaaacgaattacgagagagaagagggaatatgtatgtacaaaagaaggagaggtttattagtttcttccgtttggtaataaggttaggtttttatagagagaaagaataagaagataattatggagatctcgaagagagaaggatgatttatgttggctaaattgagtcaatggcttcccggctaactaggattcattttgagccactaaattattctcattaatttcttggataactataaaataagagcattgctattaggcactagtggtgtctagcacctttgcgacatgtcgcgttgc

SEQ ID NO: 296868 - DNA, 3394 bp, Cannabis indica
tccacctcccccataccactacacctcacctcctccaccagtaaaattgccatcacctcccgcttacatatactcttccccaccacccccacctccatactaagctcaagaattttattaccatacacacatggatcatgtaagtaataagtaattacttagcttttttattttatttaactggtgttagtattacttaattacaaatagttaatttttattattattggtattataattgcaggttctagattgaaaagtggaataaaagaagtttccatcatcgcgcaccaagcctcgaatgaatgttcattattcaataagggtctgtcaattagcgatgacccacacacatttcaacttcttttgtggtagcgttgcaaatgcttttgctgattttaagttggagtggttatggacaaagcaaagtaagaagaagaatgtggagattggagattaagctaggataaggacatgatctggtttgtgtatgttttgtgtttttttatttgtttttaggcaacaataaattatttcatcattgtatagagcgtggccatatatgtaattgtaccatattggactagcttctatttatttgtggagatccatcatatgtttgttaaatcttcctcctcgatctgtccttttcagaggctccgagatttataataataaaggaaggcatttgatctgccctcggttcacttttgcaattctaatctaattggctaataaactcaaattagaaagcaaaatattaaacatagactttctttttcactacatgattggtaatgcaactaatatataagaacgttattttcctaactttataccatacaacatcggtcctcagtaatgatacgcgacagtactcaatttttgaaatttggtcgaatcgatatagatatatttctgaatgctcaacacttttgttttcaccatgatatttatatatatatatatatataaatgtacgtactacaaaatggatggttttttaattatttgttgttttgcttttggctattgctatgattatatattattctgtatctccttttttagcaatgatggttctatttatatattgatagtgggctttcagctttttcttagtgcttgtatatagacataatactgtcattctttataatggcaactgtattagatcgttccaataacaacttgtataaaagaattttcaggttgttggtattggagagggccttcgaaaagttcatatcctctctggcaggatgttgggagacaacttaatctgaatagttcttttctgttagtggattgtgggacccttcattttttatttttatttatttattgatcatttatgttagaagcaattatatttagtaattatggagtaattaacacaaacactagtcacactcaattcaattatgaatgtcaagtatgtgtgtggaaaatggtttgcaagtgccaaaaagtcctacaaggaacaatcaaataatgtatctatatatgaagtgatgggagcaggtgaaatcacagctggaaagcctaattataattttggtatcttttaatataaaattatctacatcacgaaatcatttaacacaaattttgaaaagtcaaaagtttgattgggtcctacataacattaattctattgaacatttatcgtttttctctttagtcgacctttttcttttagaagggtcgaattattattattattttaacattaattttaagttttggataagtatatattggtattccaactagtttgtttttattatggcttttgtctaatattataagatccatcaactaaacattcttttgtccacgttgggcaagtgtcttgaaaatttgaaatgtctcctatgtatgaaggaacagtcataaatagtactcttttaaagagtaaatgaaaagaaaacgttggcaattgggcagccgcctctaaagcaaacaaaaggatgaagtcattgatccacgtcacaccaataattgctatctacatgtaattatcactctacaaatttttattattttttcatataattatcatataacaacaattcaacagctttccatatagttatattattttcacgtgcttccttcttcttaaacctctaaagtcaagtaaatgtagcatgaatatcatgattactactacgttatgagcaataagattatacgaataaaagtatgataaattatatttatctatatacattaattaatcatgtagataaatttgaacttggaatatatatgcgtagctcatacagtacgtaaaaacaagtttcttaatgacctatatcataattcggttccttaagtatcatgccgaattgccaatgtttaacaagtcaaataaaataattaaatgaaataagtgtccgcgaagtataattatttgtggtactattatttatataaagacaaatctgaaaaattttatacctactaattgagtcaagtttgtttgaagttgaaatgtaaatgggtaaagtgtatatgttgggttttgtgccctaaataaaattctatttcaatgtaattttctctattcaaatatcaataaacaaatagatttaatttcattacttatttaatgcgttatttggttcatgtgatcatctatttacttatttgattaataaattcatccaagcccttatcacactgatattcttgtttgttgtgttgtcaacacagtagaaagtaatcaagattgtgtgattaaatgtattcctagatttatcagtacacagggtttaactgatatgataatgtacaacgtagttacttacaccttggaaaagtgttatgtcctttccaggacattggcaaaattaagccagtgttggatgtatggagtatgcattggaatggaccgatattgaactttgaattagatatttgaaacttaccgtaatatctattcaattcaatatctcataagttgatcctagatcacatgatcgaaatcctgatatggttaggctcaatttcaagagtgttattcgtgttctttgatttgttagttaagcctagttttgtagtcagggtgatacgtacattttgggaacacggtaatgcaattgagtgggagcgctaacataaatatggaatctatagcttctatttggcaaatagaagtaaaggatgatttccttcgagcttaaccaaacgaagataaatggtggagatctcatttcacttaggtgaaatatcatttatacagggttaagtgttttaaggataaaatacattgtagggtgttacggtaatttaatccctgtacagtgtaaatcatctatatagaggatcattgatcacattagggttataacaatggataactaatgacgtgtctatatcgtggaac

SEQ ID NO: 296869 - DNA, 4751 bp, Cannabis indica
cccatacccgcccccgcccccgcccccgaaagtctaccccgtatccgttccattagggacgggtacccgcgggtataattgccatccctatataatggtaattatatatctaggaatgatcaataagtttatccagcgatataagatcattaaccacaatcaacctaagatggaaataaaaaaataataaaaaagagacttgcatattgaagtttaaagtgctaaactatgaaacaataacttatattgactacaaaatattaaaactcttattccttctaacttaattagcacaatatttttattaaaaattctaccctaattaactaaaaggagtacgtgttagttgataaaaaaattatatatatttatatgatatttttgtaaaataaatagtttagtgtgattattaaaaaattagttaaatttatatttacatcataaatatattaagatatttttgaaaatttaaagaccaattcaccaaaaaaaaaatcaaagggatgtaaaaaagattcatttagttagagcaggtcaaaactctagttcgagagatcacttctgataaaaaatattcgaatacatattagatctcgaatcagatccgctccgccccgcttaattttttcccaaattggatatgatctaatttagtttcaatatattaaaaaaaaaattaattaaagactcagaccctgaacccagacctagaccaaacccgcctgggacccaaacccaaactcaggttccaggctcagactcgacccaaacacgagacccaaacccataccccaaccccagatcccgacctcaggacccggacccagacccgtgatcgagaccggaacccgaacccaagacttaagactcgagacttgggcatggacttgggatctgagacccaagaactgggattcgaacccgagacccaaacacaggaaccaggactcgagacccaagaaccgggatccaagtcccaaacccaaacctagacccggacaaagacccgaaccaaagttggtattggggtcgagtttattgaaaatatattataaatttacacaatctattaatacaagttaataccaaacatagtattatattaaataatactaatacaaaattaaatggatataaaattataaacttagattagaaaaaagtcagggtgggtcagatcaaatccaaataagtcaggtcagatctgatccgatccgagtatcttatctagcggggcgggacgaaacagatccttgcatgaattggattaggtcagatctgatcaacttaccaaaactcgtatagtttagagacttccgctaaagataattaataagtaatcaatatctgtaaccaagatgcattcacaagcaatcaatatctgtaacccagatgcattcacaagacattctccacaagcttttcagtctaaacaaacattgatgtacagttctgaacaaatttacaagataaaggaaaactggatagaatctaaaacaaagtttttttttccctgttcatcacacgagatattgtgaggtgaaggaaattggagcacctgaagattctcaagaacaacaagatgcacttgcaactctttctgcaggtctatccatgaggaccattcctgaagggttctgtgctggctgcactcgtggtagtctctttgctgtcaacaaggagaatcgaataaaaaaaacatgacaagattgaagcattaataattatgtgtataacaagttaattgaaatttagaaatttacctatctcatagaaaatgtcattcacattggttgctgtttttgcagaagtttccatgaagaaaaggccattctcttgagcatatgtttgcgcttcctgcaaaattagcagccatgtcaatcagccaacactaaatatactaaatttgcaagagaagttttgaaaccatatctatctacctatctattctgctaaaaaccaacataattgaattaattcctactaaataccagatgataaaacgataaaagcaaaaacataaacaaaacacacaacatagttggcaaaaacaaaataacatatcttttgtttattacaaagattgtgacactcaaattagatactatccatacacaatgatgtgtaattagtctcaactacacaaattaaaagttatgtacttctcatataatgtctaagacaatggcctatgtctctttcaaaaaaaaaaaaaagttaaatacacatcaatgtgtaaaaagtgtgtaatttttgtgttcaaacattttattttatttattttttaaaattctcttgttcaattagatacacaagcaaaaacaaagcacatatcatagttggattcaaaattattctccagtctagtttagtcaataaaacttgtccaatacacactgtcaatggggccactagcctctcagtttaaatgtgattacataatcttagtctcctagcacacactaatggcttttcaaactacgaacttctgaaaaaaacattgcttaatatgtaaaaacagatgagtcatctggtaaatgttagaacattcacacattctagaaaagagaatgctgcttcatgtttcactagcctaatctttggagcaggaaaaagcacttgtcccgccatatttacattctaaactactaagtattactcttttgagtgctaaatctccatattgaatgacattttatacatttccaagatgtcatcttaccagcaaaccactcgaaggatagcaagtgatgttaagtctgaactgaacttatatatattgaacttatagatataagattatcttgttttcttacacgtatatatagtggcaaaatataaaagttccacataaaatttcctttcaatgtgtttccattcaaacattaactgcatatgatattcaaacatcaagttaaaccatatgaagcagaaaaatctaagaaacttgcctccgcagcgaccttcctcgcctctagcagatcagctttattcccagctaatgccataaccatatttggattgccttgtggcacaaagaaaaataaaaagtaatagaattattaatacattatagatagttaaaaaacattattacaataccatttaaattttttcaagaagttactatgcatccttctacatatatatggatgcactcatgccaaccaataattactcaaaaagcatccaagacacaaaatacaagaatgagaaagatgtaagcagatgacaactcgaaaaagaaaaagaaaagaaaataccttgtgattgaagttcttgaacccattttttggctcgctcaaatgaagcctaaacagagaaaaacagattgtatccataagtaatgactgagcagaaaccatgctaagccactgagcttatatctattgataattaattaattcacataattcacataagtttcattccatctagtttaattatccctagaattagaataagtaacaagcttttctatctgaatttcaatccatcatgaatcaccctaatcgagggcaaaaggcttaaagttagggccttcacacctacaagtttctgaagtctatgtgtcattcacaaaatacacagtaaaagtagccactagctgcagtaacctgaacaaaaattgtgacaacaaatgtaaacttgagacaagatgagaccccaaggactcaactaccaaacagaaaacacacatgcgacactcagaatttactcacttgatttgttatatcgaacacaattattgcagcagcagctcctctataatacatgggagccaaactatggtatctttcttgaccagctgtatcccaaatctcaaatttgacagttgcatcatttacagccaatgtttgtgagaaaaaagcagctcctattgttgattcctaaaaggtcataacacataaaataagttgccggaacaatagagatggacattgttcatatttaaggaatctgtactaagtgcaaacctgaaattcaacaaattgtccttttacaaagcgtaaaactagactagactttccagctccaacatctcccaaaagcacctgcagcaaagccaaatatcagtcaaatactgccaaaataagttttttatcagccaaaataagctactgattagaaaatctcagaaatgtcactacaactgtatataactcctaaagaggaataagaatggcttcctaaagagatgcacaaatatttcaaaccgatctagtgttaaataatacttgtccttagttgcaatacttctagttaaccacgcattatcagttaactcaataccatactagcacacacggtattatgcctgagaactcataaaattaaggaagaaactgaaaataaattaagcaagctcacctcaacataccattaaacaaaaatgtgaagcaattataaagttatataatctgattctaagaaatttgaagaggagtttaattccctgacacagatgcaacatttgcaaaactaaagaattaaatagtgacacgggaaacaggcatatatgctttatctaagattctaaaccaaagattgttgttcaacatcctggaacaacaattcccaggtctaaagaaacaataaccaaacgaaaatattcagcttccacggaaaacaaaagtgagctattaactaagtcaatgataagctcaaaacccaagagaaagaccgtgcctgaatttacaactattttaaaaaattaataagaaaacgatagctgcctacttaaaaggcaa

SEQ ID NO: 296870 - DNA, 3686 bp, Cannabis indica
agagttccaacttatatatatagtccaatcaaattaataataacacaaccatatatttctaattatacagtaccactctctctctctctattcatttttttttatcatacatttccacatattacattcgattgttcaaatatataaatatatatattacacacataatacataatgagtaattaaacctcaatacatatatatgggtacccatatttatacactcaattaattatatcattattcgtaaatattgttactacttggatctgtttcgaaccgaaacccttaggccaccagccatgtgtgcagtcaaaagaggaacaaaaaccggttggtccaaacaaacgggtcgaatctcaaaccgtttaagcacagaagcaaccacatatttcatctgagtaaaagccatctctttccctaaacaaactctcggaccagcttgaaaaaccggaaacttaaacgggctaaccgctttcaaaacccgacccgtttcatcatcttccaataaccaccgttcaggtttaaactcaccacaattttccccccaaagctcttctaacctccccatcccgtacggaaaatacgtcactctatcacccttctttacgacagtcccgtcaggcaaaacgtcgtcgtttgcagcgtgctttgagtcccaagacacaggaggatacaatctcatcgactcacacaaacaagctttcaaaaaactcatctcttgtaatgaatcgtaattcaatgcaacattattgctattactacatgatctgttgacttcgttgagtagaagcttctctgcttttgaattttgagagagtaaccagaatagccacgtcatcgccgccgaagtcgtgtcacgtccggccatgacgaaacttataaccatatctctaactacttcatcgtcgtgtccggccattaaaaacctcgaaagcatatcaccaccacctttattttcatcttcaagaataagttttctcttctttgttatgatctccgaaaccgattcgtgaacgatttcgatcgcgtcacgaagctttttctccgatccgaaccgaaaaaatcgcttcattttccacaacagcgccaccgttgaggtactacgcttggcgctaatctcagcagcagtgtcgaaagctctaaaaagactcggcacgggtcgtgacgtgtcaagacaacacgggtcgtgaccgagcgcgactttacaaatagtatcgaaagcgaatctcttaagcaaatcttgcaagtccaaaacggtgtcgttttgagcagcgttttcgagcaaaggaatcaaacgctcattaacttcttcttccagtgtcttcaccacgaactccctcaacgaacgagtcgagaattcgtgactcgctagcttcctctgagtcgaccataactcgccgtccatattgaatatcccgcagcctaaaagatcaccgaggatttcagtgaaagactctccttttgggaagttaggaaagttggtctttaaaatatactcgacgttagtcgggttggctgtcacgatcgtgcgcagagccccgagtcgtttcacgactacggtgcttgtgggagagcacaacaccaaatcggtgtaccaatggagaaggcggcgccggttctcgtagaaagatactaagcacccaattatagggtaagaaatgggaccataagtagtagtaggagtggtaatattattattattattaatgtatataacataggattttcttagtattgagaagaggaaaaagagtatgagaagtgatagtaagaggagagctaaagagttaagcatgagaagaaaattgaagagatacatggcttgatttaatttgtaatattaattatattgagatagagatattgggaattgggatattattatcaagatagtttgatgaggagtggagtgaggtaatggtggtgttaacttatgagtatatatatatattttttatagtgggttttgtttgtgtactatacgtgtgtgttagtgagtagagaaccggccatatgtgcttttgtgcgtaggaatatcggctttggtcttaggaaggaaaaagacaagaaaaagataataatctcaatcacatgaaactcgagctaaaaatggctagttattagcttataagctttagctagctttcactgcactggtgggagtagtacaattatgtcaattcactctataggattgttttatttttggaaccacataatttacggcagtgtgttagaagatgtattatataggtccaattaatttgcttagttatattggtggacctagatggagggggcagctgatttatttgtaagaaactcgggtaattttatagaggatagctattgagtactttcactgatgtggagtatattgcaacaataatagtatgtcatattttgtggtacttaagtgtcactaaatatttttaattcagtaatacactcataaaaagtattgctatgtgatggtgctagtagtttcgtcatgacgtagcacattataaatagttagttattttctacaagagaaatgctataagagcatccatgatacctactattcttgtgatgtgtaatatatcgttattggtgcaattagttttcaagtatcgcttattttaatttaataaagattatagaaaactgctaattaattatagggcaccactatagtggtgctaggcactttcatgtcccatagcaatgctctttctatgatcattattaaggtaaaacaagtggggcttgataatgaattcattactataaaatgcattttcaatgtctagtaaaattagtgttggacatgaaaaggttttgaattttttttaagtctaacattactggacataaataatatttcatcatgtctaacaatgtttgacatgaaaaaaaggacattatatatataaatcaaataaaataaaagctggaaacgtgtgaatcattaacgggttaataaatgactctctattcttcgaaaaatcctaccatcaaccatttcatcttctttaaatagaaaacctagcaaccactccatttttcccatcttttcttgttatccgtattctcggacaaatgatgcgtagcagtcatggaaggatgccaccatgtactactcgttgtggcatgaacccttcgtgtgttagattcacgtgagaaagagtgttcctagaggaactaaggatcctctatgttaatacgaacagggaagactctaaagctcctaccattcgcctattacttagaaatgacgaagttctcacaaatggcctagaaggatagcatggtcatgtagtctggggtagagttggccaacctgtcttgaactctatccagctatattccatatagagctttaagtgacggttgtatgtcctttgacaccaaatcagatcttgtcccctatgtcagactgtggtagtgcgcgaatgtgcttttgtagtgctttttattcaacgacttgtctaggaaaccacttttaaaggagaaacctttgaccgacacatgtcaacgctcttacaaaatgccttacaatagctgtgcaccacacgatggaaaagttacctaccaaaccagcggtcagatggtcctgttgtacactacaactatttggattaataccagcggacacaataccggcgggccacatccgctgtaacgccctaatctatagg

SEQ ID NO: 296871 - DNA, 4012 bp, Cannabis indica
tggggggattgaccttcgctttcaacgggtggaagtacacatggcagaataagagattccaaggcgatttgatcagagaaaggctagatagaggtataggttcctctgaatggattgcatatttccccgacgttagagtcagaaacttccctatttcaattttggatcatgctcctattatattagataccaagatacactcaaggcggggtagaattcctttccgcttctatgatgcatggacggtggaaagctcctgtagggatgtgattaggaagatttggggtccaaggactttcgaagctaccaaggaaatgctaagtaattttgatcagaccagaagagatcttcagaggtggaaaaagaaaagcattggtgatatggatcaagctatatgcatgttggaacagagacttgattggatccaacagaaagaaataacggatgacctaaaagaagaagaacaagtgatccaaaacaagcttcatgatttctggtgtatgaaagaaagtatgtggcgccaaaaatcaagggagacttggttaaagctgggagaccgaagcacaagattcttccatgctgctgctgtaattcaaagacgaagaaaccagatttcgagcattcaggatatgaacgacaatttgttggaaaataggaaggatattgcaggtactataaatcaatatttttctactcttttcttttcaaattgccttgatattccccctactttggatgagctttttgataataaactggatgaagcagcaaacttagaattgataaaggttcctactctgagtgagatacgtgaaacggtattcaatcttcatccgttaaaatctcctgggccagatggtctctcggggtgtttctttcggaaatattgggatatagttggcaaaaacattagtgcagcagttcaagagattttttaacagggtgaaatgcacaataagtttacactacttcgtttgccttattcctaaaatagacaatccaaggaagatggaacagtttaggcctattagcttatgcaatttttcttacaaataattgccaaaatcttagctaatagacttagacctttcatggatagtcttgtatctccaattcaatcggcgttcatactgggaagatggatagctgagtcttcaattttaactcaagaaataattcataagattcgtcatcagagagggaaggaaggtctgatgatggctattaagctggatgatatgcacaaggcatatgacaaaatggagtggagcttcattcaaagaaagctggaggccaacggttttaacaggaaaagtcagaaattactcatgtcttgtgtgagtagtgtgacttattcagtattgttgaatggttctcctctcaagaagattgtccctcaaaggtggttgagacagggagatactctctctccattcctttttttgctttgccaagaagttctatcaaagatcattcagaaaaagggaaagaaatggacttatacacggaattctgattgcgagaaatgctcctccaatttcacaccaaatgttcgccgatgatacaattctttttgctcgagccaacacgaaggaagcagagaattttattcactgcctcaaaacctatgaagagtagtcaggtcaacattgtagtaagtcaaagtcaagtgtgctcatatcaaataatattttcggtgacaagagaaaacaaattcttgaagctctttcaatcgatgaaataaatgggcaggaaagacatcttggaaacccattcattttcaagaggcgcaagaaagagaactatatcaaactgaaggagagtatgctgtaaaaacttgaaggatggaaaatgaagcttctgtcatatgcagggagactcacacttatcaaatcggtagcagcatctatgccaatctacatgatgtcaacaaacaaaggtccaatctcttcattttggggattggatgcaattgtgcgaaaatattggtggtgtgtaaacacggagaaagatagatatcttgccttgaaatcgtgggacactatatctcaacccaaatcctctgggggcatggaattagacgtttctaagacatgaacatgacacttatcaccaagttagcttggtgtgtagctaacaaggaagacaaaccttgggttaaggtacttcttcataagtactgttcagttgataatttctggcaggtatcaaaaagatccaacgactcctacctttggaaatgtattctggatgttagaaacatcatcttaagaggttcaatgactttggtggctgatggtaacacgacagatttttggaatcaaccttggattccctggttggagcctcctgaatttaaagatcttatggataggctcaaatcgaagaggtacactgtcaaatctcttgttgatatatccttgggtatgagtggaatagagagctggttattcctattttcagggaggaattaggtaactgaatcatgagtattccaagattgcattttccctcaaaggataggataatttggaagaactcccaagatggatccttttcagtcaagaaggcttactgtgtggatcaaggaatgacatttgaaagtaagaaagaagtgtggaaatggatctggaagtcgagcattcatcctagaatttccatcctcttatggagaattcttaacgaagctcttccaaccaaagatagattgaagtttgttgtggataaggaatgccccctttgtaatgagtcatgcgagaatggtctgcatcttttcaaagaatgcaatttcgccaaagctctgtggttctcaggcttatttcccattataattgagggcataccaggtgaaaatatctctgacttcttcttcaacttgatttccagttttcccaacaacaataaggcagagatggttacctattgtggctgtgttttcgatcaaattttgaggcagagaaatgattgtcgccttaagtgcagcagtggtaactttgatcaggtgcgaattagaattcttaaagccttctctatattcagtgttaatggaaagcactcaagtgttagttggcttgagaattcgtggatcggtggtgatgaagaaaatgcatgtcaggatctcggcttagtgtgagtaaaagaggtggactgtatcatcctcactgatgcttcgtggaagcaagaaaaggccgggttggcggcagtcatgatcaataggagtaatggcaattgggtatataaaacacaacttattatgacaagatctgctatggaagctgaactccaagaaattcttatggcactcaaatgggcgatagtgaatgattggaaagaaatccatgttcagtctaattccttagtgatcacccaagctttggctaaaggcaagtgcccctctgattggaaatcctttaatatttccctgattatcttaggtttaattaaactatttaaaacttgtagtttttttcatataaagcgtgattgtaattcctatgcggatgggttagctaaaagaactagggtaactaacagttttgtaaacttgtgtcaaggggagggtgatcctcctgtaatccccatctatgcttcctttatatgaatatcttattcctcaaaaaaaaaaacttggagttaaatctccttttctttccagtggccacgtaaggccatgaatcgatatataccacatttatttatgtgagcacatatgtgatgattaatctgtaagagggacccgattacccacgctcacatgctaattttttttttaggttgagttacacaccaattcataaatattttttcgctgacttatataaatatatttataagacaagtttatggtcgagctagcaaaagttccctaccggtaggaaactttttttgaccattgattttagatcatgtggttattattatgtaaggtatatactcttacgataggactgcttgtatacgatgaaaactttatacatattataataatatttattttttaagaaaaataata

SEQ ID NO: 296872 - DNA, 8088 bp, Cannabis indica
atagtaaggatgtacaaacaaagtttcattaaatatatatatatatatatatatttatatatgagattttagtactgcaaaaaatgcttattaggccgctccctgtcattgtattttatgtcaatctggcactccttttatgttcttcattggttttaatttacgtttcaattttcagtaaaggcaatcgttaatcttaaaacatgatttattttaatacaagagctgtagtaattcttaaattaattgcaacactgatcaattaagtttataatatttcaatatatatagaataattaactgatagtacttatagtgttcgacaaaaatagtacgaatattgaacacatataagaaataacattttcgtacccttatttcccagcaaacaaaatttattatatgtggaaaagaaagtgatagaagaaaacctaattaacatggatcttatagaaagttaaaaaggtgagtagagcatggatatttaccaacaaaaaaaaaaagaaaagaaagcattattatttgacatttgaaggtgctcaataactctaacactccataatttgttaatgatttctcgtaatatatattttcttggaagctcaaagagttaagttcattgataacaaaaccatgtaacaacaccttaagcaaaataagatataatatatatatatatatatctatacaagtgtgactcgtaataatatttattaaactaataatatttattaaactaaaatatgtagatccttaaattgtactagtataataatatattatagattgttgtcatgaacattaagtacatccatactaattgttggaaaggttccgatacaatgcgatggctgttttatcttggggacgaccgacaaattccaactgcacagtgtcgcgaacgtcttaaagagagagacctaatccgtgactcaactcagaattttttcattcgaatcgtttctcttttattttgctaccagtttattcaacattaattaataccttgttaaagttgttgtggttgaataattttatattgtaattattaaacattatcatctcctaatttactttgttataatttatctatatgttaaatatattgatagacacttatacgaaatgagatttttgtcaggtgttttttaaaattatactggtaaaagtgatatttttaggaggttttgttcttttacgaaatcaagtgactcaggactaccagttttgcagataatttgccgatattccactttgccgaaaaggtaaaaaatctcaaagtatgaattcggcttgccacaagttgtagatctcatttgtgatggaaacatatccagatgctcgagaggaaacttaaaacagacaagcagaacccaacacaccaagttaagtatcaacctttctttcaaaaaaaaaagttaagtatcaacctgagcgataggtgcttgtcactaggcttttcaggtacttagatcatatttttatctaggtacgagggctcctcccccatttgtgactaaaataaaaattattcccagaatagaattggcatttgagtgacgaaactatacacatcaggttgaatgtcaatctaggcgttgaagctggtgcccaggtcaacctgagcactggctagggtttctggcctccagttggtctagtttgcttccctaaagcatatgtatctttatgattaatgaaaatggagaaaatttctagaagacaactcacacaaagtagttggaagcaccccaagttgacaatgtgtcaacttgggcattgtacaccaagcccaagtcaacctaggagctgggttggtgtttggtccaccaggaggatccgcttattccctaaatggacttgtatatctattttggttaaggcagagaaaatgccttggaaaaatcttcagaaaattctttggaatctccctcggttgatactatgtcaacttgaaagttgggcaccacgtgatgttaacttgggcactgggtgcctagatgctctaaatgggaagtgcttcaaagttaattctggggcctctggtatgcttatggtagatctttcatgcgttcaagttcaaatattgagtagtttaaacaaagaggaggatcaaattgacaccatagggcacatatattaatctgggcgctgggtgagaccctagacgccagattggcattcgagatgtcaaaatgacatccttagcttccaagtctacgactcagagcattcttgacttgttggctcacattattgaaatggtgatttggaaacaacttggtgggatccaaatacccactcaggagtcccttatgtcaacttgggcgctgggctagggacccatcttgaggttaactgttatgacaagagatgtatgactctaggaatattttccttcttgccatgtattaaaaatgatcatgtccacgttattagagacagttttcgggtaaataattactctcaagtctaaagacattatagaatatatatatatatataacttttgagttatgcggtcctaaaaaaactcttactcatggtgggtgtaactactttctatctatagttgatgactattctagaaaaattaggtatttctattacatcataaaaaatgatggttttacaaatctttaaatgtgtaactcaagaataaagactttaaggacaaataatggcctacagttttgtaatgacttttgttgactcagagatctggccaacattgtctcgctagattagtgagaaaacaaatataggaaattaactaaataagagagagtccaaaactttataatagttcactccccctgtgacgatggtaatggagctatgtgtactacaagttcttttctcatgaagacagattatgtaatgacgagttagaatcaataaataattagggcttatcgtcatactactaaaaaaactctgaattctcgatagttttacaccgtcgggtaaagaattcctaacggtctataaaaccatcgcctaaatgagcatcacgaatactaggtagaatagacgacagtaaaaaaatgttgatgtaaaattattccgaacagtttaaaaatgttggctatagttgagactataggccactgtttaaaatcgccacctatactataggtaacaattttaaattgtggcctatagtatagttgatagttttaaaccgtcgctatagtagattttcttaaaaagatcatcgccttcatcctcctcgaaactaagatgggagttttgtttggccttaagatcccggaatagtcaagatctccgacgatctgtgaaatatgaaaatctcaaaaatacataaatcccaaaataaaaataataacaaagaaattatgagaaagagtggatgagaaagagaagattaacagatggttctcgtcgtggagctcgtggtcatggtcgaccatggtggagcttgagggctttcgtctatggtggagctcatgaaggggaaatcaagaaagagagagcgagagacgagtgatggagctcgtggaccgccctctatgagaaacaaagagggagaactctagagatagagagagtctgacattttaaaaatgtatagatttgaaaatttttagatctaaaacgtgttatattggagcaagggaaaatacattatttagaaatttttagatttgaacaaatagtcgacggttaaaaatcgtggcctataacactatataggcaacggtttttaaaccgtgacaattttaaaccgtggcctatagtataggccacaatttttatccgtcagcaattcccctataaaaaaatctcaatttttaaggcacgctttaaaaccatcatgaataacactataggtgatggttttaaactgtcagcaattctcttttcaaaaaatttcacaattttcaaggcacgcttaaaaactatcgggaataacactatagatgacagttttaaactgtggcctatactataggccactatttgaaactgtcgagaattctcctttaaaaaaattcgtattttttaaggcacacttaaaaactatcgagaatacatcacgagtgtttaaaatttttgggaatacccaagtttttccaacatttttgaatgctcgcttaatttttttagcgatgaccccccaaaaaaagtatttttaggagaatcaagaataatggttttgtagtagtgttaaaactaaactttaaataattcttttttataattatggagatatatttttattctaagtatattatttatgttatacatgagatttcatgtttttcctaatatacttggtaacagtagaatatgatgattcgaccgttagagtcacttagatatgatgtagtattttagaattagcagggcaagatagttagacatttagaatgtcaggttttgtttggggttataattttggataatcttaccgctatgagtgtagattgcttaattagtggaggaaatggcatcttttagcccatttgtagtaacttaaatttagtgggatttctagtatatgttttactgttagataataatagataagtttattattagttgattaattcactaaaaaataaaaaaaaaaaatcaattctctctctttctccttagggttcgaccaagagaaactgaggttttctcttcaatttcaaacccaattttatggtgttgttgttagtttccaacatagttagtagaggaaaaatcaaggtaagatcttcccttcatattcctttctcattttaaaagaaaagttaggtttcatcatgtcatttcgaattctagttactgttgggttttgaggttgttagagctgagtagttatggcagagttaggtttgttttacatgatttatgactattggtgagttgtagcaagattgaactaggtttgagctttcaaagctcaaatttagctctttgacaaggattttcatttttggtgcttgatggtggatttttatgttggatgatgttatttatggcttaaataggtgatctggagctttgtacaaattttgggttggttttaggtgagaaacaacagactgtttttctaaaaatggtttaccatttttagcaggcagagacccaagaaaaacagtctgccatttttaagaaacgatatgctatttttggggtatttttctcgaagtctcattataacactgtagacatctgttttaaaaattgacctatagtataggctactgtttgaaactgccaataattcccctttaaaaaaattacaatttttaagacacgtttaaaaaccttcgggaatacatcatgagtgtttaaaactgtcgggaataccaaatttttcctgatgttttaaacacaatttttttagcgacgacccccaaaaaaaaaaagcatttttaggatcgttgggaatagtagttttgtagtagtgttagaaatagactttaaataattattattgtaattatagagatatatttaaattttaagaataataattaaggtaattaagccaattcaaggttttggctattatgcctgctaatagtagaatacgatgatttggccattagagtcacttagatacaatgtagtatcttagatttagaagagcaagatagttagacatttgaaatgtcaggttttgtttggggttatgtttttagacaattttaccgctatgagtatagattgcctaattagtgaaggaaatggcatcttttcgcccatttttagtaacttatttttagtggggatttttagtatatgggttggtgtgctgaaatctacttatccgattgtgatttatccgtttcgactgcctgtctagtttttcataataactaggatccatgaagttagagaactcaaattcacaattttgcatttctgatttccaacatgggaaactcactcgaaaataaagagtttcgagtcttttatttccgtagagcaataacatctttgagaattggtgaccagctttgccagaccactaaaaccgactaagtgatgtcaaaataccacataggcatctgaaagtacttcccttggacgtttttacacttacctagcgtccaagttgacgtcatatgtcaacttgggagctgggatgtcatcttgggcgctggatgtcaacttgggtgctgggtcatgaactgccttcagtaaaacaacaataactcactcaatattgatatgattgatgtgattgaacttgcatttcgaagctattctaatgctatatcaagtaatgtatcatacttcaatcgcaattctgaaactattgatctcaaatttcaccccaagagagttacaaaaaagaagctctaggttatccacgatgggtcctatcggactccgaaaaataactatcaccatcaaaagataattttcatcgttgggtcatcatccatggtgaaaaacatctaattttattttcccctatttttgtgggcctccttcacctataaaaggagaactcccttagctcatttttcacatttagaaaactacccacaaggtcagagcttctctctctagtttctcttgataaattggagtttctgacacttagcctttttttataataccatctcatgaggaatagaaaattgaattagacgtagctccattactgtcgcaatacagggagagtgaactattataaatttattgcgtctctcttataattacttaacaactatttgcttctgctgcttcaagggcatttccttcaaatttagaaaactacccacaaggtcagagcttttctctctaaatgcatgataactggagctgatttggaaagatagttttggggagaagctttcaagacaacatgctacttagtgatcacagatgtccctctgtggcaattgatttcaagatacctcatgaaaagtgtactagtaggattcctaactgtgatcacctgaggtgtttgggtgctctgcccatgctcacaccagacaagaaaagttacaattaagggcaataagatgcctatttcttggctaccctgatggggtaaaaagttacaaactcgtgtctttaaccaggtttcaaaatatgcatcatcagcagggatgtcatcttcaatgagaaggaaattcccttgaagtaggaaaagcaaagtgaactacaaggtacaacaacaacaaaagcactcaggttcaacttaccaatgatatagctgcatcagaagagaggttcgatgaatctacatctaatgaggcttcaacatctcaaggtggacttgggagttactaacttactagatatagagaaagaagagatatgcacccaccagaaaaattaggatttactgaacttgtagacttcacatggtttacattgtctgttgcagatgtgattgacactatagagcctacatcctataaggaggccataaatagcagagatggtacaaagtggcttctagccatttaggaggaaatatcatcactgattaagaacaaaacttagaccttagtcaagagaccacttggatagaagtttgtagattgcaagtggataatgaaagtgaaggaaggtattctaggggttgaggataaaagattcaaggcaagacttgatgttaatgggtttactcaaagtgtgactatgaaattcaacatatagatgttagaacagctttcctacatggcaaccatgaagagaaaatctatatgaggcaacctgaggtttttgaaagtggtgatctatatgaagtttgcctattgcaaaagtctctctatggccttaaacaagcacctagaaaatggaacatcagatttaatgaattcatgacaagaattagattcaagtagctttgatccttgtgtctaatcaaataataagttgtttcttctattgtatgtagatggcatatggttgggaaaagcataactgaaatagaggttataaagggtctcctaagcaatgaattagagatgaatgatttgggtgatgcgaagaagatacttggtatcactacaacaatttatgttataagcggcggacttattagcggcgggcactctccgccgctaataacaggggtattagcggcggagagtggggtccgcc

SEQ ID NO: 296873 - DNA, 3018 bp, Cannabis indica
taaacataaaaactatatgtaaacataactgacttctaatcttctattgataacaaatcaggttatatttaaataggttttatttagggcataaaattccaacaacttctcccacaatgacacttttgtcataaaagctcaaatttccaacaaaagagtttctcaagtcctgggggacaatggaagctcaatcaacgtactgttcaagttcaaatttcaggcaattgggctaacagatgctgatttgtcaccctctcccatccaactcgaagggttcaatggagattaactcatgtcaatgggaaagattcagcttccgatcacgctgaaaggggagaacaacatttgaaccttcaagcattgcaccttcgtggttgtggattgctccacagcttacaatgctatactaggatgtccaatcttagtcaattttggggccataacttctattaggcacctatgcatagtgttggagtgctcagaggtgactagagaagtgctagaatttgttataatgttcctgtccagtccatgttcatggtccaggaagatataaatttttctctcggaatagacgttcaggtggaagcttaagctgtctgggaggagtatgaagatgaattagatcccatggttataatagaaagaacaatagaaacactagaagatgtggaagaagtcattatttgtgacttagaccccactaaaactatcaaggaaggaaaacatttatatccaacgatgaggaaaaagatcgtggctacagtaaagaagaatcaggatgtgctagcatggagccattttgacatgatgaggatcaatccaaacactatttggaatgcccttaacattgatgaaaatgcaatacctgtctaccaaaaaaggagaccactggatcctgtaagtgcagaagaagtgaagatagttgataagttgacttccaatgaatttctacgggaatcattatacccagtatggttggcaaaccctgttctagttccaaagccaaatcacacatgaaggatgtgcatagactttagagaccttaacaaagcctgtccaaaagattattttccccttccgcggatagatcaaatggtggatgccatgtcagagtatgaactattaagttttatggatgcctactctggctacaactagatcaagatggatgtcatagataaggaacacaacagcttctaaatggacaaaggtctgtacttttacatggtgatgccattcatattaaagaatgctggttccacctattaaaggttggtcaataagatgcttaaggataaacttgggaggaacatggaggtatatgtagatgacatgcttgtaaaatccaaaacatctacaaagcatggtgatgatctcaaggaggccttcatggtcatccagaaatgtagtatgaaactttaccaaaaaaagtgtacatttggagtgtcctctgggaagtttttggatttcatagtcagatcttaaggaatcaaagctaatccaaagaagattacaacttttattgaaatgccttctcctaagaggcaaaagtatgtacagagtgtaagcgaaaggattacaacccttggttgattcatttctaagtatacagtcaagtgcatcccattttttaatgtccgagtgtcaatcaagggataggccctagctaattttgtagtagagtgttctggaatgaacgacctcccaaacaaactagtcctgaaactacgagtttggaacggctacgttaacagagcatcgaatgagaagggagccgaagcaggacttatactattttcttttcaaggatatcagctctaaagtgccatccactttgaatttctagcctccaacaatgaagcagaacacaaaattattttagctagcttgtaattggctaaggaagtaggagcccaagttatcaaaagtgtacaatgattcctagctcatggtaaaccagatatctaggaatatcaaaccaacggtgagaagatggctatttatgtgacacgatctagggaactgttgcacgaatttaaaagttccaacattttctaggtctcgagaaatcaaaatgcattcccaaacatcctagttaaacttgcagcagactcgaagatcgtgtaatactaagtagtgcgtgggccatttaaatgctccgagtattgaaacattgggagtaaatgccgtcattgatcactcaagttcctggataggcccaatctattagtttctaagtttagggtagcttttgcctaactaggctgctgctaagaaaattcagtatcaagctcttccatacgtaattctagatgggaaactttaccgcggggggttttctgtaccatatctgaggttcatagtcaggactgaaataagggcaattatccacaaatttcatggaggtttttgtggagatcacacctccagaccaagcctgtcaaaaaagatttttcgtcaagagtatttatggttgacaatgaagaaggatcgtgttaagtatgtccagaagtgtgaatagtgtcagagatacgtgaaggttcttcgtgcaccctcaattgagatcactctcatgcacaatccttaaccttttgtagtgtggggaatagacctagtgggatcacaaccaactagaaaaggaggagtaaaatatgcaatagttgttgttgattacttcaccaaataggtagaagctaagcccataaacttgtcacctccaagaaggctttggatttcgtcatcaacaatatcgatgctcttttgggcttttcacataaaattgtgtttgataacgggaagcagtttcacagtgtacattttaaggatttatgtgttcaacatgaaatcatcaagaggttcttcgccgtggaaagaccacatgctaacggacaagtggaggccgtgaacaaaattctgaaaatcacattgaagaagaaacttcaatcttgtaaagcccattggccaaaggagcttctgcgagtcctttaggaatatagaactgttggaaattatttt

SEQ ID NO: 296874 - DNA, 1309 bp, Cannabis indica
tttggtcaaaaagcagtatttttgtaaaattccctacttaaattatatttctgaaactttgtaggtacattatcgttaaatgttaagtcattatccacgtgtcatttctaattggtatatttaaactaacttttaaaaaataaaatttaatgatttggactaatcagggattgccacttgacaatttacttaacacttaacaactaggtatctacagaagttttaaaattataatttaggtattattatcgtaaaaaattaaacttaaatatttatttacaactatgaattaaaataaatatttatacagtaaattactctattataattaaaaaagattgtattacttaaagaaagaaagaaaaaaagagattgtattagtatcactcattttgtaaatgaaaaaagtatctgataaatttagcacactttttatggtatcgctcattttatattagtactatacaaatcaaatttaacacacatttaattagtatgtgaaaaatttaggataattaattttagcaagaaatccactttttacaaatataataaaatatgacaattcataacaaatttagcattcaattaaagatggtctaaggtgcatacatatatttatttttgctctaattcttagcccattgtcaccattcatactcatagtgggagcctaaccaaaaggcaacttggaaatattaaatgtgtacatatagaaaactatttagtggaaaggtgtaaggtattgttactatagggtaatttaaattaaacccatgattaaaagagcaagttgtagaagtagaagtggaggtactggtttttggtcttttttttttgaaagaaaataaaataaaatttgaagttaataataatataagtaatggagcacactactctactgccttcgttttctcactgcggtccccatgaatggatattggggacctcaaagcttgaatataaataaatacatatacatctcaaccaattattcattttaattactatattctaacctttttgttttgtttggtcacttaaaatatatctatatatattttaaaaaaactttaagaaatcccatacctaacgtaatcttcattatttgcgtgtgagctgacttgtgtaagatatagaatatagtactttaactttttcttggattagggaattatataccacattttcttatagatttaattacaatacaccactttatatatttcttgctttagctaggttgtatcaaaatcctagctatcttatttgacaagggaaatttcaatttttgaccctaataatacaa

SEQ ID NO: 296875 - DNA, 2997 bp, Cannabis indica
tttttgagtttgataaaaaaaaaggaagaaacagcgtgaaacattaatgtcaaagtgttgtcaacaaaatccaattttattttttaccaaatgaaaatatgatctgtacctcaccaattccaatctcactttaataacaccaaactacctgtcaccaccaccaccaccaccacatagagacgacaccaatttgtagcactaacattacgccaatatatggcactgtagtccttttacaaaggcacactttagagcatacataattgcaaatgccatttgtgagacattaatttcattacgtggcaatgtatatacatttatcactcttttgctggactcattaaattgtatattatttaagttaagaaaaataagctttactaataggttcaaaaacacagttgaaaaaaaaaaacagtcaaatatttccttaaaatttagaggttagcttttatggtgcccataaacaatagaagaaaggagtgtaggattggtatgggttaagcgcgggctctcccagctcccaactcatctggagaatgaattgggaccctgtgttaatgatctactagttgattcaagattcacgtgattaaccccatttaactagtgtcaaaataggttgggaattcgatatgatagcacaacacaagtcactattaatcattattagagtaaaataaataaaactaatattaaattacattagtaataatattgaatgtttaaatcttttgctgacgacagtttagtcttttttggagcgattaggcaggagtgtgtatggttctgagacattttgtctaagtactcggccggctctggtcaagtagttaacttccataagtctaagatgtgttttggtcgaaaggtggggatgaatactctgaggcgtttggcttccttgattgggggtcaagactgtggataattatggcaagtaccttgggcttccatcctttgtgggtaggacaaaaaaagagctctttgaggtgattaagaatcgggtttggaataaggttaggggctggaaagcttccatattctctgtgtctggcaatgaagtccttatcaaagctatcttacaagccataccaacctacacgatgacttgttttaggttgtccaaagacacgattaaaagcttgcaccgcgcatggcagccaggttttggtgtggatcctcggaacacaacaagacaactcattggtgcaagtggacatatttgtgtaagcctaaggagaagggtgagttagggtttagggatttggagctacacaaccaagctctacttgctaagcaaacatggcggtgtatttggtattcagattccttgtgtagtcgggttctacaggcttgttactttcctgatggtaatattatagaatcgaagtgcgggtctaaagcgtcttttgtatggcgcgacttggtgtgggggaagaagataattcagcagggttatcgatggcgaatcagcaatggagagagggttagggttcttgaggacccgtggttaccaagacctgtgtcctttcgattttatgataaacctatcatgcctgatcaaatgcgtgtggcgaacttgaagaatgttgatggtacctggaatgtcaactttatccatgggatgtttaatcctactgatgcgggtttgattctgagcattccctgtggagattgggagttggaggacactatgttgtggcactatagtcgtaatggtgaatactcggttaagagcgggtatagagttgtagctgcattaaaggaggagattcatcaatcaaatgtggtgaactcggagagatggtggactgagatgtggcgattgaaactacccccaaaggttaagcactttgcttggaaggtttgtcactcatggcttccaacttatgctgttctttctcaacgtaagatggctgtaagttcaaagtgtcggcgatgttcttcgggtaaggatgaggatgtggctcacttgttatagggctattctgcaagcattagaatatgaaaaaaatgtggtttatggcaggatattaagaggtacgttgtgaatgataatatttcttatctccaagctctgtttgaaatgtggccgaaggatacttttaatctgttcatggttatttgctggtatatatggtttattcagaatagtgtcaaccatggtggctgtcaacctagagacgaagatatgttggaatggagcagcaactttctacgggattacaatgatggtaatagcagcaggaacacaaaccagcaagaaaaaagagaccgagtaggcaaagaccggatgaaggctggtttaccgttaatgtggatgcaggggtttcacagaagaaagggcaatgtggtagaggggtggttattaggaatgacagtggtcggatcctttatgctgctgcaacatcaccgccgggggtcccttctccacctgctgctgaacttgaagccatattatatagccttaaggttggcattcaaagagggttgaggcgttttaaggtggagtcgggttgtcttcaggccatcaatttaattaagaaggggtatgaaggatgcagagatgttgatggcttgatcctggagataaaacagctgctacattctcatcatactgctgatttgacttttatttatagagaggcaaatcaagttgctcataattaagccaattatgcattgtgtaatgatgttagtgctatatggattggggttacacccccttgtgctcgacatgccgcgaagcatgacttgtcatttccttgtaatgttgtttgattaatgaaggctttctatttaaaaaaaaaacttttatttattattatctcaaaaaaaatcttttatttattaccgtgtaattattattcctttttttttagtttatataatcattgactctcattatgtttataaatacgagatcacccattagaataagataataaaaaaaaattcttaatctctttttattttctttctctaaattataat

SEQ ID NO: 296876 - DNA, 4090 bp, Cannabis indica
ttttttagcaggtgatgaaggaagacttagaacccgacctagtggtagctatttatagaagaagaaattaactgtaagaggaaaaaaaaatagcattatggaagataggggagatcgtggcataaatgggtaggttgaaattcgtgggtagagcttcacaggagatgatatatatatatatatatagtgggttatggaaaaaaaaaaaaaaaactaacaaaaaataaaagaaaaattaaaaaaaaaaaaaaaaagaatgaaatagaagaaggtggcagaaataggagaaaaaacccatgacataaacatgcataagtatttttgtaaatcaaacttttttaaatataatattgaaaaaataaattttttaaaaatatttaaataaccgaataaagacaaaaatatataaaaaaaaaaaaatagcaaaataagacaccgagtgtaaaaatccaaaaataaaataactatatagttttgatagtagaaaattttccttcttgattacgaaaagacagtatatatagatggaaaatattttcagttcgttcatattttctcattttatatttttcgttctctcttccaagtacgattgagtaggtacgtacgtgtttttataattttttcatttctcgagtaataatcttattctttttaattaaacatactttaattgctgtatatgaactaattatattttcatgaatctctttacttgaattctgcatatgatcaacctttctctgttcagatctttaatcagattattattatataaaaactagttttttctttctttcttttatatataattaaatccttagagttaaagtattggaaccgaaggagcattgttggtaaatattatcttgtctgtatttttttttttttatgagaattgtcttgttggtattcttgaattggataattattttactaatctctaaatttatatatatgtaattaatatatgatactaataatatgtcatgttcatggtgatgttaactactaattatcatttgtaatacttataatgaggcaaactattgtcatcaaatcgccattattttttgtctttaatttcaagaattcacaaagaattaattgatacagttaacttgtaaatgaatatatattttatatagtttaataattattcgttgtgcttattaatttcaggaacaattataatatctggattataaattatcattcaagacagagcgatggccaatgtttgggaattaggcgatgtcaacaatgagaatttgaagaacgcattaaatgaagcaatggtgattattgataaagcatttaccactatagatcagaagcttgatcatcatcatcgtaatatttgtgagaaagatatattagaccaacaaaagaatattaatttagcatcaatgtaagtatatataattaacaatttttgtttctttatacatctggattaatgttaagggaaattaaattaatgttgtagttgaaaattagttttaatattgtttttttcgtgacaacttttcttcattactaaattattttatatagatttaatagctacaattattaattaacatcatttgtacatatatatgtgcagagctgtccatgaactgtactgtaaaaattatagtgtcggcggtttggattgcttgcatttgataacgaaatccctttatgagaaatacgagtgtgttttaaaaaagaggattacggaaagggtgagtgtatcttatatatatttattcaatttcttcaaaaatattattttttgtttgtttattacttttaatattattatacttattatgtaattttttttaagtaggtgattccttttctggagaagaagagaaatgacaagttactgttgaaggaagttgtggaacaatggtcactatttgagatttacagaagcaatctggagaaaatatttaaacctgtggaggaacttggatatataagcgtatactataaaaatcaaaattatcgtctttggacattgcttcaactttcaaaaaactgcttctgtcaaatggttagtaaattccattatctttttttaattgacatcattataacaattaatcacccattctccctccatttttctcttaaaaatttttaggtatgggaagatttccactatgaaatcgacgaaggactaactgaaatggtataactttacattatttgaccttatttttactaaaactatatatcttggcgtaagtataacaattgttttttttttttttgtctaattattaaactttctactgagtaatttttatatatatatctgactaatataaataagtatgtgttatatattatagattaattcaggggcattcaataaagaagttgggggaaactgcattgatcctgaaatactcaaatttagttttttctattatgaaatggagttcgtagcagtatcggttccaaacctgaaaagaacatataatctcttgaaagattataacatacggccataatggataataacaagtagctagcctcaatttttgtgggaaatatttttttgatcgttgttattttattgtaaggtctctagttatagattacgatcagctttagcttcaaaattgttgattaattttcagtcattttttatatgtttttgaatatcgctcgtgattagatacacaatatgttgatgattactatgtgtattgtggattgtttcagtacacggtggttataactaccttgctatgcaattttttgtgtacatatttaatttcaatagagcaacacaattattatgtataagaaaatgctaaagggcaccgtgctaaacattataagaggcgctgtattattgttagtgcatatattaatattgggtgctaaataatttgatttaataaattatatgagaaactgttaattaattacaattcgacatattggtataatgttggatacctaaaattgcttaacaaaaatgacacaaataactctcgcttttgaaggttcttatggaatcttaaaattcctctccaaaagttcatcatgtacgttgtggacggcttattttagtatttttcccacctcaactcagttgtgggggaagcatttgaatgtttcgttgacttgtcaagcgtgttgcgagggtgttgacactattctacatattatggtggaatgtcccactacaaaaaaaaatactatctttaatgacaatttttaagtcacaatataaatttttttatgactaaatctgacttttagtcacaacaaaaaaattacttgtaactagaacataatatttagatacaagttatgagtaatttaattttagtcacaacaaattgtaatttttataactattacttttagccacagattttttattcacaacataggaatgataattagttacaatttttttacttttagccatgaattttattatgactaaaagttagattctttgttgtgcccatttgctacactttgttggtagagatttgatataaatatatatatatatatatatatttatataattcagccttatgatccccgcaaccaatttgttttgcctattctgtaatgtcttgtcaatttttcaaagaccaaaactagtcaagtgaccataatttgttggtctttgtggcgtgttcgtaatagtttggtttggcaaaacaagagtgtaagtgtcgtgtttctgtgtggcaaattagatattactgttgtttggtaattctgaaattgcatttgcttttctaacatcttatctgtagttagttgcatctgtcttcactaaattcattttagtgccatgtcagctttctgcaaggttgttagtttgtgccagctgtacattgctggttgtttagttagttaggtttattatcttcagcatacaaatactgtgagatctgtcatactaactaactctcttctgttagaatcgcctattggattcttgctctgctagggcttctctttctgtgtttgtttcttgaatgtgcagattgatatttcgaagatcttctggtggttgaagatggagattgaatctgcctgatctgaggagagttcagat

SEQ ID NO: 296877 - DNA, 3566 bp, Cannabis indica
aaaatctaacaatctcaatagttagagaaatttttaacggtaaaaaaaattcaaagacataatttgatacatgttaaagttagagcaaaaatccaaataaccttaaaattatgtaaatttttttctcatataaattcatcaaaataatatcatattttattattaatggtaaacttccatataggtaatacggctgaaaaaaaaaaaaattgttgataaaaacgttcccatgaagtggcaacaaacttgtaagactcaaatttctaaaaagaaatgggaaaattaagtttgacatgataatattatagaactcaggccttcacatttggccgcacgaagttgaatattggagctcttaagcaaaaacagaacagttcttgatttatgaaccctgttgacaaagtttaacatcattttaaaggacactgattatttaccatgacaaaattcagaaggttttgtattttggtttatgatgagattatacaagctaacaagataggcatgtggctcacaactttagcaaaaccatcgtgaaatcgatcgttccgatgaaacaaacaaggcgttatcaatatcttccctgtaaaaacaaaaaatcagtgtcatctaatgttccatgaaaaaattgattttacttttagacattaaacgttccaatcaaagtattgtaagagataaaagcactatattttaatttggtaagagataaaaactaggcaaaattactcctaaactactgtgatgcttcaatcaaagtattgttttccccatgtatctatgtctatctcaacaattgaaaaagatttcaagcaaagaaaatgaagaactaaggtatgtgattgtggccaactgtttaatgtttagtttgcaagtggcattagtaatcagcaggcctacccaaatcattgatatcattttgtcttagaatagaggttgtctatccttcaaactagaagaggggtgtaagtgtttccaggaacttgatagtcgacggaaaatataacttaaaagactatataactcaggaaaaagcaatatgataacaaattcttaatccagcttatccatctaacttccagcaaaacataaataaataaaagatcatctacaggatggtaagaaactagttgtaccccatcaaatgaaaattaatatttattatttaacatagatactcttacttgattaggtcctgtttgtcctatcggtggatagttcccttgctgccctggcacattcctttgctcctcttgtgggaaaccttgtccttgtccttgattctgcccaggataattttgcccataacctggggttccttgaccaacaggtccagagtttgatccttgccaataagaatcgcgtggtccctggccttgatatccaccaactccttgtccagaaggtggaccttgagttgggccatagttattatagtcttccctaaagccaccctgctgcctaggaggtgcatagttcctctgatctccctgttggaattccctctgttgttgaggatgaaaattacctgaacccccctgattgtagtttccctgatatgaaggggttgaggctccacttccttgttcgtatggattcctcccaccaggagcattgattggcatacgatctcgttgttccccatgtccaggaggtccataattctgttgggttggataactttgtggaggcccatagttccttccgcctccttgcataggaccttgttgaccatatgagggatttacctgctgatttggcactggtcctcccggccgatcttgtcttggttggtttggaccacgattgcggtcaccatatcttccagtctgcctaccatactgaattggtggtggccttggaatgattgttccatcaatgtatttatctcctgataattaaagagttagtttcaggtttttctatttgcatcttttttaatcctacagcagttgaataattgctacaagggtcaaactatactccatgatagaatctagttttcaagaaatcattggagataaatacaactgagtgcacaataaatagaccttgtaacattaaacaaaagttcatggcgaaatacctccatactccttgttttgtggatcaatgtaagaatcagggaggacaaagataactccaggtagacctgtttaaaccaaaaagttaagattatgacatttgacctttccattgatcatctacaataaaacttttgtgccacaaaaaactaccattaaacttctctgactcttcttcggtcattacagcttgaaagcctgtgtaagttgttgtgctacacgcatacattttcttttttgcctcttccatactgtatacatagaaagcagtcattacaagactaaattatttccaacacaaatctaatctggggtacaaagctaataacaagtctgagacactaaagaatttaaataattttaaaaatgaaatacaacacaaacccggaatcatactcaaactatgccaatggatagtcccatttatgaacaaaagccatcgaaaaccaaaatttgatatgattccgtctgcgaactagctcttccaaatttccagtgctaaattaaagcatgtagtaatcataaaagatagcaaacattttaaatgtaatcccaatcaagcgacccaacgagggaaaaaagactaaacttaaacaaaaacatcatgataaaagtaataaaataacacatacattcaatgattcaaatagttcatatatatatatatatatatatatgtacagagagagggaaagagagagagctaagacctgatgttcaagcccctggcacaggtttcctcatacgtacgaaccatttcttcaggggaaggtttacagtccttagggaaatccatgacgataagccagtggttgtagtcacatccctcaaacagtatcgtgtccggcccaatttcatcgttctggttgttgctattgccgtatgctgatcgggcagacaagagcgagagagacgacgatctgaattgacgagaatgacggagcagaaacggtgagtgctctgccaaagctggggaatctaccgaaatgaagccctggagtggaggcgatgaggaagagggagcggaaattgcagaagtagcggcgagagagcggccgagtgcggatatggtgctgctgagagttcggcggaggtggagagaggtcagcgccatggctggttcttggggtggtgatgcagaggaacaccagcttttagggttttacagagatttaagaaatgcactaagtattcaaggaaggtttgtttgcctgaaaaaaacaaatgaagtttgtaaagggatacttttgtaattacattagtagattaactagtgctcttagaaattttatttatacttcaaaatttattaaagataccctattttaataatttttatcttatataaaatttaagaaaattatataatgcacccctttaaaaggaatagaaatgtactcatacatttccatcagttttagtatccgaaataattagttatttaaaatattctccaaaattttaagaaattcgaaaaaattt

SEQ ID NO: 296878 - DNA, 2627 bp, Cannabis indica
tttttgtaattggattagattggttcaattgtattccattggatgatgcccacccaaaccataagattttttatccgtttttttaaatgctaagtgcatatttattcgtatgaatatttatcatatatactatattacaaaaaagtacgaatattttttttatatatattatatacagggatgataaaaagttgtcttttaatatatagaatcttgtgcaataatttaagttgtcatatacttaggtcgaccctatttatggtatggcagtaattagtttgtttttgtgggagagtcccacattgataatatgtggaaattaaataccatacataagatacacgaactactattctcattgcaaagtgattttaagatggaactcgataatacatacaccttaccatacactcacctaatccaaagggtgacaacctcatcaggagcttgtttccctcagtttgataccccattgtcttcttcctttccttcccagggttgttttctatcaaggtgatatatgcatcaaagtggttgccaataactttcctactactaatgccctcgaattagaagctttggcaattctaaattgtgtgcaattcgttgctaatcaacgagtttgttgaaaatcgtgattaattaaaaatttacttaattaccctttaaatgaaaacaaacatcctttgcataaatcgggatcccgtatttaaaatatttacaaccatatttcaaaatattagatacaaaagttgtcgcataacgactgttcaaaatacaacttactgtctcgaagatcatacgcttcaggtctaaccgccgtgacatatacaatcttcatatgctcacactcactgctatttagccttagctttgcccatacctacacatgtaaacagtagctgtgagtcgacatactcaataagaaaagtataatcatatcataaacataaatcggattacgatgaggcacccatacacccaatcataaccctatcccacgtcccacacatattgagtctagaatgtttgtacgataatactattgaccataatatcagcctatactcggtactctagtcgtaccgatgtgatagcgtcaatcagtacttatgccaaatatacattcaccgatatccaatataactctatgtatattgatgcctctattttaatataatctaacatgcatgctaaacatgtaatcatatattcatatcatactaattttacctcgatcctgaattcaggtgtgctggttaacctgagtgaaactgctgctcgacaatttacaggcccctaagtcataatatacgtaaaactgatgagtgatatgctaaatcacttttttggggacttaaaattgaaagtaaaaattttcctatcgatggttaacatggcaataccctacatatctctaaaacataaaaatctagggtgctcaaaattgccacaatcggtaaactgaatcccaactagaaaaccagtttttatgggttctgcctaagggaaccgatagactggttctatagggtaaaactaaaccggtcgaccagttcagtgtaggaaaccccaaaaacttcacacacgtctcaattcaaccccaaatggcctcaaaccttccagagtgcctaattagatcataataaacttaactcatacaaaagaactggacaataacctcataaacacaatccaccatggaaacacaacaagcagcaaccaaagaagtttaaactagctcaaacaacatcaaaacaacctctaaaaatagaatcaaacttaaacaattcttacaacaactttaactcaaattttatgcatgaaaacctaatttttgctatgaattttaaagagaataagtaaagagattaccttgaacttgaaattgactaaagctactagaatttctgttggaatcctcagaaaataactagaaattgaagaactttctggttgctttgatttgggtttgatcgaaccctaagggagaaaaagacaaataatttccttccaattttctaattgcttctaagtgattaaatgaataaaactcacctattttagcataaagaaaattaaattaattaaaggttagtagaaatccacctatcactaaagacaaaatctagggtaaagttaccaatttatctcttgcttcgttatgaagtaactttgccacctatgggtattttggtcaaacctaataaccctgtataatcccgacatatcaaatgtctatctataatggcccactatttctaaagtactaaaccaaaataaaataactctatagaccatacgtcgcattctactgttactgggcataaaaatataaaaaatataaaatttatgtataacctaattatcacgcctagaatttaaatatatctccataattacgtaaataataattaaaagtataattttgaatctaattcttatattaaagctaagcgattattacaaaattacttcaccattagaacgagacacaaccgcccccatgccaacctgcttccgctcagaacagatgccgacatccacaaacaaattaaactctaaaattcaacttaggacccgctccccctatatgacaagagttagtctgtaaagaccgcttagtt

SEQ ID NO: 296879 - DNA, 4876 bp, Cannabis indica
atatagttttgtataaaaatattgtataaaatacaattcaatataatacaatacaatacaatacgacctaatacggcgttccaaacgagcactttatgtgatgcattaaaaggtttatcaaaaaaaaaaaccaaaaaaaaaaagaataatacatatacaaataaaaatttgttaattttttttaaaagaatataaatagtctttggtgtagtaacttgcaatcatttatcaaattaaaggccacaaatttattggagagaaaatgaaaatagtattattttattattattattaaactcacatgactaagcttttggaaacgtggaaataatactttattagaatacaaatataaagttttaattttcagttagaataaaatgaccaaagtgtccctgtgaaccaatcatattaggaataggaaccactgaacaagacatttgccaactggcagttattttctatgtcagagctggcattaacatgttgttcctcctttttcgttatttttttttttttttttgctgagctttccagtttcaagacaacgaaccataccccaacccaagttttgtttttcttttcatttttctttcattattattaatttaacattttatataatatatatactatatatgtcatatcaagataaaaagtgaccaaaatcctataatagtgtcaaagtgttaatatgacatctaaattcatctgggctttactccaaatactgaaaagaatacaggttaaatcaaactctgcatgtgaaagttgattttggttttttccataattacctatgattttcccatatcaaaaaaaaatatatatctttatttgtttatacaaatatatacgggtgtataaaaaaagccagtcattttttctttgttgactcttcacgtaactaaatttttcaattatctttctatttatatatttattctcttcactcaccttcttcgctggccattcattcattttctttccttttccttttccttttcttctctctctcattttctctccaaagggtcagtgaatccataaacagatctcatctcatcgctccctttctctcactctcattttcttttctggttaatttcatcagactattgagttcaaaacaccttgctttgattgagaggtatcacctaatataccaaaaaaagccttaaacttttttagttttttttattttattatccctgaaattaagacaattaagtcaaacatctgggttttctttgattcctttttctacatatattatgactatctcaaaaaccatttctcacaactctataattctttcttgtcttctgggtttcctcaagtctaagggaagaacataaaatcttgcaactttttctttcttttactattttcttttcacctcatatatatacatatacatattcatacatacatatgtgttaatagagtctgtgaagataaggatgaataccaagttttggtcttcaaataagagctctgctgaggaagaaggagggccaagtgtggagcattgggagattaagcctggaggaatgttggttcagaagagaaactcagatgtgaatccaagttctgtgtcaactcccaccataagagttagagtcaaatatggctcttcatatcatgaaatctctatcagttcacaagcaagctttggtaacaaattcaaaatctattaagtatgctatgctctcttattttcatattttgaatgagaatttgacattttcttatttgtggggtgagcaggggagttgaaaaaaaaactggctgcaccaactggtgtgcaccatgaggatcagaagctgatattcaagaacaaagagagagattccaaagattttctagatgttttgagagttaaagatggatcgaaaatcattcttgttgaagatgttgagaaaaaagaaagaaggctcttggaaatgattagggatgcaaatgtgcaaaaggttactaaaacattgaaagaaattaacttggaactcagcaagctacaaggacaggtaatcaaaattttggcttcaattattacaacttttgcttttcatgtcgaattcgattacagattgtttatggtttgttgctgaaatttgataggtcttagccttagaacaagcagcatctaaacatgagaaaattgaagacaaggatgtggatgttttgattgaaattttgatgtcaaaattaatcaaattggatggaatttcagctgagggtgatcttaaacaacagagaagaatgctggtactttaatttttacataaactcttttttcactactatttgctaaaatttatatgcagccccccaacgaagttacaatttttgagttttgttttttattaacctttgaaggtgaaaaaagttcagaactacattgaaactcttgaccaagtaaagctacaaaaggttaaaattaacagcagcatagatggaagaacaaaaaacaagacaattcaagacaattcaaggatgcgaaacgacataaatttcagtgtaaggaggccagtatctcagaaaccatccaagaattttgagtctccaatggtatccacaaaatgggaaacttttgattaatttatagaatcttcccaaattcatcttgaaaatttcatggttcaacttaattaatctttgtttctttttctcaattttctttctgtctcaaaatattttctctcattctagcaaactatccaaggatctagcttttatgatgcagtgaagaaaaataatctctttgaataattataaatattctttcttattgtgggggtaaattggagctttgcaaatttgtatataaatatatatagttaaagatattggagttgtgagtttgtgtatactattatgctgttccataagtaaataaatcatatcaagttgtaattcacttgttgcatgaataaattttattgagttcttatgatttcttatgtgtggcataatctaactaataactagtacttttctagcttataacttcagtccataaaaattgataaagcaactaaatcttttgctttttagttagttacagaaatgaacaaaccaaaaatctctcaagggattttagttaaagacatttgactttgaagggtgcaataagtgacaaggaactctatttaatattatcaagtacaacatgttataaagtgttgttcataataaaaataataattctacaaaatcattattggtacttaaaagggcatgtcacttgctggaacttgagctctgtaaaagtttgtagtggtctggaatggtcggtttagttctcgattgctaaaccaaagagcacttcaatccaacacaaataaataaaaccaaacctaaactacatgacaaaatccaaaactatgtacatgtgacccaatatctttattgtctataaagaaaaatagcaaaattcaaagcataaatagaatttgatttgcattgtttggcacatatcttgaataattagtggagtacatcatgagtagaagaatagactaagtcagacaaatcatggaaaaaaaaaatcagaatttacttgagaaactctctatttctctcatctgaactataaatgcaaagaatagtaactcaaaagcaagaaacagaggaggtcatcaaggtggttctctcactttagcatattatgtcagagacagtgagtgagtttgaagtggtttttattaactttggaggaaagaaaacaaaagggttgtaagttgtactatagtagaagaattaaaataggagtaaaaataggaccatatttggtggtacttgtaacccatttggaagaatctgactgacttacatgtgatctttattggactatcatctcaagaggaagaaaggggttgtttgttttcattttcattttcccattaaggacatggtgagattgtgataagggatttttatcctttcctctggttcccttccctttagttgtaggggaaaaaaatttgaattccaaatattttcatttttttcatagttgaatttgatttcacacaaagggttctttttgttttgttttttttttttttttaaagtaagagggttctttttgtatataaaataaaacataaataaaatgcagggggtgcaacttttgttgtgagggggctctaagccccatccatagttgaatgtgtgtaacttattttatagttattcaattatgtgataagtaattaagtgcggcaaattaatgttttttttttgttaaattgtaacgtacaatatgaacttacaaaatgtgtaaaatgatgatcttaaaataagagttgcaaattttttaagttgatgatcacaaaaacttataactctcatctctattattcttaaaatagtgaatggagttactaattgtttttaattatgattgaatagtatataattgttggagagttatttctattactagtatataagtgatacaatgtcaaatggagaggttttgaacatttgggagtgaagtgcaaaatgctgaaaagtagtcattatattgttttagaatgttttgtgagcattgagctcggtaccaatagctcccataaccccagtatcactagcatatataaccattttaatattggtaacatttgatagctggataattctcattcatgtttaaattagagtgaaaattcaaataggatattgttcacttgcgagacactaataaaaattacttgttatgtgtgaaattctgtattttaatattcccagtttaattatttaattaagtgattaattaaatgcggaataatgaaactggtactgaaaacagttttttcgtagttacagaatacaactctgtaactccagagaaacccagaaaaacaaacag

SEQ ID NO: 296880 - DNA, 2129 bp, Cannabis indica
ttccaattctagtgtcatttcaggcatcaccaaataaacatccatctttgtccacttcctccttttcatttggtgtaggatggcctggacatctttatctcccagaatcatggtaccatatttcagagctctatctttagccttatacaacataccaaaatgcagtttgtaccctagagatagtcaaaacattctttgaatgccctcttcattttctccttatcaaatctatcaaagtaattaacccgtcaaccctcatatctcttattaccaaagggtgtgagaacatgcccccatggtggattgcaagtgccaaatagtctaaattttcaccttaaaattcaatttcaacaaaaaacccagacagatcacatgaagcaacaaattagcatctctcaaacattccaaacaaaaaattaagtaatttttttgagtcaactatagaccccactttcagtagttggacatgcataaagttgcaaaaatagcaacacaaaactcgaaccataagctttaacgattcctattcttattcccaccaaccatttgctcgtatcataactcaaccctaaaaaataccatttcttcatgtcaaatggaatagaaaaaaacaatctcatcactattaattgaataatactctgaaaaacacctttttagaacagaatacacacactttgtaatccccatcattttctaaaccctaaatcacacggaaatactaaaattaggaaagaacccaagaattccatattcaaaactgacaaaagaaattacaaaaaaaaaagcacataccgtagtctgggggatcacccccatcgtccctgaaaaaagcaataccctctcatcaacctttgattgtcccactttaagcttcaacctaaggttgatcgtcttcaaccttgaagctaagattgattgtcctcaaccttagaggaaccctaagtttactctgaactctctcaacaaagtttgggttttcttgcaaaaatggtaaatgttgtcatttcaaaacctttgttatatttggtttttaatttaatcgtaaaatttggttaatttaattgttttatttgtcgttccctgaattacattttcataaaatttaattaaaagttattttttttatataatttgaattgttattatcgatataaatgcaagtgtttttattttgattttatgagggtttaattaattatagggtattattatatgttttaggatgtatgatgtagtaggggttagttttaagtggtgggagtgatgtggcatttattttattgacatggcacactgtttggcacattataagacaaaaaacggagaggtaccaatggaagttccacactaatgatcgaaggtatttttaccgccaaaaataaaacttggatatttatctgctactaaggataaaacttaggtacctttttcgtaatttactctaaaagatatttatggtgcctagtaaatttatgagatgtactattggtataatttaatatcgggttccatttattttaatttaataaagatgattgaaaaccactaattagttataaaatgctattttatagaagtgttagacaccttaataccccataacaatgtggcagttggttggttatagtgtgattgggttcggtactggctatagggtggttgtttaggtgtgattggggacggtgggtgttggtgcataaggcaggggaaagaatgatttgattgaggtggaggacaatgtggtgtttctatgtttggtttttttgagtttgttttggggcatgaaggtgtgaccttgtgggggacaatgtggttgtgggtttgtgagagtgggtaggggtgtagtcaaatatggacttggaatttgtaactaaattggcagaggtgttacaacttgatgaatctgatggattggtggtcaaactgaacaaggaaagtctcgaaggtggcagtatttgtcgcctggcgcctgggttctaagaaagagcagggaggagggaatcgatctaggggagcatggaggaggaatctaagccagagggaagaacatggggcagcgcgggtgggactaggagacctggggttgggcgggagattatcttatgatagggttttttttttctttc

SEQ ID NO: 296881 - DNA, 3089 bp, Cannabis indica
tttctttctcactaaataaaatacccgaaccataatctatacatatacatatgcatatgtatatttcaatgtattttataattcaaaatccaatccaaagcttaaattccaagcaaagttttaaaaagtttattaaggcattagcctcaatataagaataaaacagcacataaaatatcataaaactcatacaaacaatagaataatcctactttaatagaatagtagaatttaaattcgaaaattcatattatatagaaatctttaaaatgtcttacaaaataactatcatatactatagtttagcgtaaaacgacaatttagttaatttaaatattccgattacgtttcctaataaaataaacaagataaataattattattctatttccaaacaattttagtaaacaacatattcaaaatattaatttcgattattctttcttttttttttttcgtttacatttctctattaatttatttcaattctaaatactgtatagtaaacaagccagagattccatatgaggtgaggagagggagagggaaagggagagagagagagggagtgcatgagtgatatgaagaagaggacagcagatgttgcttgcctatgatcaatgactagaaatgaggagatgttatatttctcgaaaaaagaaataccaaaattaaaataaaaaaaataacataagattgacaattagtggaaagttatgcttagcaaagcttttatcaaattttacgctacggtggttaacaatgatagcatgaaaacctgatttttaagaggctaaatgatggctaatggcgctaaaatgattgtcaacgatggtcctattaatatgcttgccattatttttgtcaaattttctgcaacgatactactatgaatattttatcttagttgccaaaacgatgctaaaatgatggttaacgatggtcaaacgatatttaatgttggtcccatcgttatgccttgccattgtttttatcaaattttctgaatcgattgtatcttgaaaatttgattgagagaccattgcaaagcattgtgtttgctcaaattactgctgaagtctaaaccaaaaagtcttttacaaaagtgtagttcatgaattagtgtcgtaagtggatatttgttggagtttaagttttggatttgattttgaatcttagtttatggtttaggtatttttgtcttggtgagagaaatggaagaaagcaagagaagagaggaagggggaaattctgtgagtgtggatcaaatttgatggatagagtaatatgttggtttaggttatgtagcatattttataattagaagttttatgattcatgaagccttaatattattatttcagtacaatacatgatgttttatggaatacatgaaaaaatggttgtattattattattattattattattattattattattattattattattattattattattattgtctttggtattgtattaaccactacacaactctcttccatatttatttgtgtcctcttatttataatgaaatttaatactaataattgtccctactttgtgttcgttttgttttgtactttgatatccctgaactagtacttccttctcattcctgaaagtgtaaccaacattgtgagaaggaaaatatgctaagacttacaacaaaagtacaacttcagcatctataggtgagaatttaaataaaatgtacttgttgagaacatcgttgacattttctctccatcgttcgttggctaagacgttaactacagcaactgccaaataggacattttctgtagaagcaaatgtttaacttgcatggcatcttccttcaatttgattaagaagctctctagaacaagaactgattgtgttagtgtttagcttaaatattgtctctttaaacaagctttttattttgttaggccaatattgtataagttttagaggcatacgtatcataagcaaatgtttaacttgcatggcatcttccttcaatttgatagctgtatttaattcatacaacttatttgttttagttggattttaattatattctgaatattaagttggataaatggtgtgggtgtgccctgcctatgatcaaaaccacaacaatacaggaaattttcagtaaaccagaacaaatgattataactgaaatgaactattattgaattggctacattacaagactggaggtttattcgaaagaacatgtgctcttcttgatgcagagaattactgtctattcatgcatgcctttttttcactcggcctagactcttcaatatctgattaattcgtgtatatatctgattatgttttacagagtgctgtttatgggggccttgtagcaagcgaggatgatctaggcaaggcagaagaggatgcgaaatcgcttgaggcagctggaggatcagtagatttgtcagtaggtattgataaactgtaaggagatggaaacttaaatagcaacgcctcatctcagactcttggggggaggctgtctgaatgttctcactggtgggccaggtaatctaatctcatcaaaaatagtctatatatatatttttttttgtgtgttctcctttgaagtctttgacaaatatatatatatatatgctacatatggtttacttggtttcaatttggtgtttttaaactgactaacaacacgactaacaacacgaactgagaattgagaatgtaatttctagattatttacagttaaataattcaactttctaactaatctgtgatatttctcaggatctgcaaatagtttcccatcacgtgtaagatgcacgtttggatttattggagtactacaagattttgctctaaatttttccgttcttgttaataaatcaagtacatacttccttttagacagaaaaataccttttctttttacttcgagtaacttcaactcccaagaaatacttgagcacccctaaatccttcaagtaaagctgggtatgaatgaaagacttcagggatgagatctcatcattattatttacattaataactatgtcatccacatacacaactaacaaaatgatactagca

SEQ ID NO: 296882 - DNA, 4584 bp, Cannabis indica
ttttttctccttcgtcttcttcaatagaaatgcctcatctcctctctcgttcaccgcaaaaaccagacgactgagcacgccctgcaactaatggaacccattgaccctgaaaccctttctccgcccttagtaactttctgctctcgcttgccttaagtcatctcgtcttcatctcaatgtcatcgcttgattccctctctcttgcctttgtgactggcatcttcaccaatggctcacctccaacaagaaaaaatccacagtaagttctattttcttgtctttttcttatctctctctttctcggctccacctccctttttcatttattattttttttattttgtatacagatttggtttgtggtgaaagaaaatattgtgggtttaattggatttttattaacttcgtggtagcggatgtaactatgttaccctaaatagtgtcatattcgtggtggtgaggctagatcttaacggcgatgaatgacaaagggagcttcaagaaccttgggactcagggtttgaaccccgacaaaggccatggtggcctacctacgacggggaggtccgtggtggcctctatttttgatggcaatattttgtcgttggcggaacaacatccttggctcgagagagagatttggggcttaggggttgggggttggggcttagagatttgatgcctttacacacttcttcttccaagttcaatgaccatgtgaggattgagaaaaaagaaaaagaagtgatgaagagtgggggttgggtgtggttggtggaagaagatgaaggagaaaaaaaagaaaaaaaaaaaaagtagtttttaaattttaaaatatatttcttagtttttttttaatttaaattattttaattaaaattattatttagaacaataaggtctcaacacgtagaaatcttgaataagtgaacaaatcgatcaaattcaggattaacaaacttacaaaaaagtgaccatgaagactattgtttttatttctcgaggttgggaactaatctacattaaattgaatcttttggagactattgtttcaaaatgcccttatttatgattgtacactattttgaatcaaacaatatgtatttatttttctttttggatttgattttagataagaatatatgtgttttgattggggatgacaatattagatattgtactaggatttgattattatgggtttgttatctcagacatggtttggacggagtgattcatgtctgggcagatttgtatttttttttggtagtgtcagtctaggttcaacagataaagtattagcgacaatttgaattggtcatctattctctctcctttttgttgttggttatggacagttggggatgctcaatattgattgtttgtaactagcgcctatgctatcctgttttgcgtcgatggcgtaagtgtcagtttgaggaactgacggtaatacaatattagactcttaaaaattgtggcctaaaccactttttttagtcgtgaccataaaaagagcctcaatttctatgacattgttgctatcagtttttatattgaccgaagtgattgacgttagaaagtacatactagaatcttattattttcatgaaaaattacatattattacaaatataacatataaatacacctaaaatatgtttctaattaatttaaacataaacatcttttagtattacttacaatatgcaacaaaataaattgactcattccttcagtttctatctcttgtatcctttatgttgagcacaatcaagagaatgaaatgttctacctttttctttatagacttccacaaagacctttgattacctaagttagtgtacgaaaatattctcaacacatgaaattaataaatatgtagagagagcgctttgaatttcaccatacagtgagagaaattttgtaagttcattgtgtgtcttacaacactaaggttacatctcattatatagtcattttgctacatgtttgtttcttttcctttcattatttaattaaataaaaaattaaattaaagggagaaactcctgtggccgaaccaagatgaattttaaaaatcaaagattgatatgatagtatacttggaactaaaatgaatcttagaaaaaacaatattaattgatcattgatgctgattcaatattcacatccttggctaagtctaaaatcattcaaaaaaaattgaagcaaaggaggaaaattttatccaaaacaactaccaaccgaagcaaccaagctactaaaacatcagccagaagaaaactcaaaaagagttaattaaagcaattacatcagcctcccttctcttaaatttagtaaaattcaaacacttaactctagcttgtatttctcttttaacactattactaacaataacagttgaattacacgatagctcaaaaacacatctattacgattacactaaataaaatagaacacaacaacaacaatggcatttaacatagtatccaccagcccttgccgagcactacaaaaaatagctacttttagtgataattttttagtcacaacataaacttcacatttagtcacaacaaaaaactacttgtgactaaaatataatatttagacataagttgtcactaatttatttttagtcagaacaagtattgtgactaaaaccacatttagtcacaacaaattatatgttttgtgactaatacctttagtcatagaccttctagtcacaacataggaatgataattaataattagtcaaaacttttttacttttagtcacaagttttattatgactaaaagtaagattttttatagtggaggtctagcacaccactctttccaagccactagatcagtaggccaagcaagttgacccatccaactagtaattttttgaagcaccatcttatagtaaaaatacaatcaaagaacaagtgatggtgagattccatggaatagggcagctaagagaaggcaactccatgaacctaccaaggtggttatgagttaagagatggttattgatagcgtgccaagtaattaatcagtgcttaggaacacaaatacgatattccaaatagtataagcataacagatcttggaagtattaatgagagaaaaataaaatgatttgactttgaatttcccattccaatactagcctgaagtaaagcacttttgtctatgttattcctcatattcaacaacttcttgaaatactaactagaatttgctttcgaaatgaagctccataaaccttaatcttttacgtaaatggaattaattcattttacccatagactatcttgtttggacaagatagcctatataaacttagccataagagcaaagtttcacttcttatcttctatgaaaccaatatcaccaaacctttttggtaagcaaacttgctcccaagaagtaaggtatacttaccattggaaccccataagaagtcaatgcaaaccttatcaatagttttcgtaatattttgaggtaataaaaagatattcatccaataattccttattctcaaaagaacaaaatggataagttgagctctaccagcaaaggaaatattcttgcttgcccagttatgaagcctcttctgaatctaatctaagccccccccccccccctccccacaatctgaaactctccattttagttggtctcaaattaacaccttaaaggggatgtgccttcatccatgcgaacaatgttcagtaattgcttttaacaatcatcagagataccaccaaaataaacttgggatttttccttatctgctaagagatccgttgtagcacaaaatctatcaatagcacattgaacaattttgacggtcttcacattacccttacaaaaaatcacaaggtcgtccaaaaagtaaaggttaaccaactttaacgacttacacataagagggacgccaaaccctttcaaggttgaggcttcgtgaagaagacgggtcagataatctatgatcataataaaaaagcaaaagaaaatttgggtctccttgacaaagctcgttttaccttggatagaaccatgtaaccgaccattaagcataagagtataggaaagacctttgagataaaccaaaacccaattaataaattgagagggaaagcataggcctttaagaagatcagaaacaaaaaaccaatcaacgatatcatatgccttgttgaggccaatcttcataatacacttagctgaaatattcttcctagtatagcccttaagcaaatcttgacaaatttgaatattgtgagaaagaagacgatttttaataaaagccccttaattactatgaatcaaagaaggaaggacttcagataatctagagcatagcatcttagagatacaattgtaaattgtattacaataggcaatgagctgaaaaatctacagcagtggttagattatcaatcttaggaatgagagataattgtttcattaagctcaactactagaatagagacctcctggaagaactagagaatagccttaaagacttctgatgggttttatgccctaaataaaaccctatttcaatgtaatctctatc

SEQ ID NO: 296883 - DNA, 1295 bp, Cannabis indica
ttattagtttctagtgtccttttatttgtcttcttttttaggtctttatttttgtgacagaagaagaattgtgtcacactactctctactttcttctaataataaagttagattgtgatgcttccaatttaactttggttaactacataacacatataccttcatatttggagttggtatttgtgagtgacagtcagtagttttataattcttaaggagaaatattaaataagttgtgcaatctcactccgtttgtgaaatgttaagtgtaataattctgagactgtgtagatatgagattacatagttgaagagaatgtaagtagattgattggtactatctatatatcaacaaagtgcatcttgttttctagtaacctatcacgaaagaactctaaatttaagcgtaaattcatagaggaaggcctaatggaagtttgaagcggagtgttacagggatatctttacttttgtaacgagaagtgtaagggttcaaatcgataccattatttgttcaccaaaatagtggtgagtgtctcctaatatagtggtagtattgttgttttcatttttgtttatgttccttcatcgcaaactaactggttttttattatgatatttttgatgggttttatttgattcaaaatttaaagtagatttgaagaacataattatataacatattatgtgtaatattcatcatcaaaatattcataattttttttatatataaatacaatatatgaacaatgaactatagagcaagtcatgccaaaatgctaaataaatgagtggcaaatgtgagatagttgatggaatttctatctctcttaggataattatgcagaggcataggacactcacacaaataaattaagaagagaaaaataaaaagactcattttcattaaattcatcacagatttccatgtttctttttaaagataaattatagaatccactcattgggattcattttcttcttctttttctttaatcaactgtgttttgtcttctagttaatgaaaaatatatttttgttgttgttgttgttgtggtagtaggttacaaatttgtaacacaaaatactatactggttctcttttcaattttcatgtttttttctttattattgaaaattacaatatttttttttggttacaaatcacacatccaactacgaatgaagacaatcaaaattttcaacattattagttggtagcaacttcaacattacaaagtaagttttattggaaaattctataatgcataatttatctatttcgatatttgaaa

SEQ ID NO: 296884 - DNA, 2290 bp, Cannabis indica
atttgtatattggagtataatattaaaaattgatgcaaatatatcataagttattttttgtgtcaaatatagcataatttttatatctcccattagaaatagtttaacactcatttagtacaaaagattaataatctaaaaagattacaacttttgttcaacagattagttatctagtggaaatatattccaaattaacattataaggtaaatttttggtgataagattgttaccataagtatatacctcctgattagagatgaaaatttatatcaggggatgagtaatcgtggggacctgcccctaatgggacggggattccccgacttggcagttgatggggcagtggtgggggacaattttaatactcgaagtggggatgaggcgaaggcggggataatactatccgtacaatatctgatctcggtatttttttttgagaatacatacttgttattataacttaatgggacaagtcatttacaacaactgagcaaataggcggggtaaattttttatccaaaagcaagcttcatccacccctaaagcaaatttacaaaactatgagcagccttattggttgaatgcctaacatggactacattcacttgagataaaaagaataaaaggctacaaatatctattattaaatctttgaaagaagtaatagcagaaaaaagagttctcaaggcatttgacaccaataaagcatctgtgttccactattgcaataggtaactgcatctgcaacacccaattaagactataaaatattgcctttgcctccattttgtgtgaagccaaatttccaattaaaggcttggcaagtgcaacaatcacccgtccatatgagtctcgaacaacatccccaactcctatgatatttcgattggtgtcaagagcgacatccacatttagcttcagatcaccttcagtaagcagctttcatggtggatgaacagctgccgacggggagatgtttgggattgggctagaagctggatggtacttgatcttggctattttgaaaatttttaaataattgacagcaaagcaagtacaacagatggtttaaccatattaccatgaataattcaatttctttttgtccaaatagaccaaagtgtacaaatgatttgttccatctcttccttgctgtaaatggttgagagatacactaaataaacccttttgtacatagcagaagccttactccaattgaaactcatttgtgtattttgccacataaatctagcatatttgcagccaaaaagcgcgtgaccaatggactcccaagcagatttacaaaccgaacaagtagaatcagtgatgatcttgcgtttgaccaaagatgttgcaactggtagtacgtcattaatgactcgccaagtaaaaatcttcaccttttgtggtagttgtaaggaccaatagaacttccaccaagaagaatgagaactagagcttgaactgtcatgagcttcagctattgatgtagctaaatcgtatcccaattggactgtgtagccacccgaaaaatggtggtgccaaaaaagagtatcattatattggaaaaagcttaaagacaaggtcaaaatttgatcaacatctagcggagaaaaccattggtgaagtaggggaacattccattgatgatcttcagaaatcaagttcgcagcaactccaattggagggcctgaataccgaaaaggaaaaaaggagtcatggcttggaatccaaggatctatagcagctcgaactgatcttccttcaccaatcttccatctaaaacctttcaataataactctctgccccaaatgattccttgccaagttagtgaagggctatgaccatgatgcgcatcaagaaaatcattatgagggaagtagcgacgctttagtagtttaccaaggagagaatcttgtttttccaataggcgccaagcttgttttgccaataagacttgattaaaatgtttaaagacttgaaaacccataccgccttcattttttgatttgcaaagtaggtgccaagcccgccaatgtatttttgaaccatttttgtttaatccttaccaaaaattagccatcatggattcaagttggtcgcaaatatagactggaagctgaaaatgtaacgcccgtatttcataataataaactcagaaattaattttaataatttatatactaataaccatatggatcgggatcccgagaatcaaaatttaggttaaaagtacttttctattacatatatttttttaaaaaaaagttttgcggacatgcatc

SEQ ID NO: 296885 - DNA, 2614 bp, Cannabis indica
aaaaaaaaaaatctttttaagaaaaaagagaatagattccatatttgatgactttaattaataatgggaaagaatggaatataatcatatatagtctctaaatgggtcaacaccaaaaagcagcacaagtcttctcattcaaccatttcttagatttgagctcatcacacctgaaacagaaacccatagacaaattcaccggaaaacatggtttccgaaaacggaagctgctgccgttgctgcttcagcttcatctttacgatgggtcttactgctctgttcatgtggttaagtctacggacatcaaacccctcttgttcaattaaagacatctacataccaacactcaacatgaccttgaaagataccaaaaacaccaccatttacatccacatgaggctcgacaatggcaacaaagacaagggtatttactacgacgccgtttctctcaacctctcttacgttcccaacaccactgaccctcataagagaaccctcatagacgagactacaatccctgctttttatcagggtcacaagaaaaaggccactaaaccagtgaatttctctactgagggatttaactggactgaggttaggagagttgtttcgattgataagaatgtgacattcaggttggatttggctacggctgtgaggtttaagattatggcgtggaaaaccaagaggcacaagttgattgttggggcatatgtgaaagtcactgacttgggtctcaaagaaggaaagcccaagaagggtatcaaactctccaacaaaggaacaagaattgggtggtgttctttacaggttgggattttactcaatttgttcatctgtataatgcttggtatttagtgagtttttttttctttcatttttgtctgtttcaagattattcttttttaatttcaatggagagattttgtcaatgtgtaaaggaagaatcttggaattccaaattaggtgagtgatttgtacttgatttctgttgtaggtcattgttgttacaattagctttaagtaattcagagttgtttttagtgtatttatttagttataattatatataactgaaccaattttagaaatggagtttggtgcacttgcttaatttggtctatttgcagttttttggatttagtgaaaccaataattatcagttacagtttcttgtgatactttggatatttctagatttggaaaattccaaacttgttgtttggtaagttaacatctgcaaagttggagtcctcaatttctttccagcatccattggaaatttatcaagtgagaaagaaattacctgtcaaataatcaattgggtggcaacattccaacaaatctgggacacttgtcaacattggttgtgttagaaataaaggagaacaattttgaaggtgccataacagaagtccatttggtaaagctttcaagcttgagtgagctaacaatttgatgatcttcaatatcagctcagaacacaaatagtgaaattagatatagtcaattaggtcttgttccaccatggtttaaaagtcaaaacaagtcaaccaaagtggttactcaatatttaatcaaaaaaaaaaaagtggtactcaataatgctaggatttcaggggtcaatccagattgtttttggcaactcaatttgcaactagacaaattagatgttgcttattgttttaagcttcaacaatccttccactgttgacttgagctcaaacctttatgagggtcccatacctttatggtcatccaatattaccatattgtagttgagggataagtcaatttttttggtccaattcttccaaatataggtgaagtgatgccctttctctcagattaagacatctccagaaactatcacaggaaccattgccaggtccatcagtaagctaacagtattgacaaccttggtaatctcaaataattaactctgatgaaattactgatgttcggaatgatatcattcttgtacatagtagatgtgtcaaataacagtctttttggtacaatccccagttcaataggtttccttagtaatatcagatttttggtattgtcaaagaataacttcttaggtgaaattccatcttccttaaaaaactgcagtgattttagttagtcttgatctaagtgagaataagtgtttttggagaaattccaacttggctaggagaaaaatatatgagctctttgttgattttaagccttaggtccaactccttcactgggatcattccacaactgtgtagcctttcaacttttcacatatcggatctgtcacgcaacaaaatttctggccaaatttccaaatgcattgcaaaaggctcgtgattataacttttccctggcactcaaaggtactggttatttactcctgtaatactgtctgaaatgaaaatcaatcaatttttttatatgagctcgatcttatgctattcttatattggttttctctgttaagctcttattactttatctgtgctttaaattaatttttgcggcattgaggtgttgtctatgttcaagaggggtggaagagtaagccaaaataaaaagaaatcagctcgatactatatgacaagtgaaaaatacaagtgtattt

SEQ ID NO: 296886 - DNA, 5871 bp, Cannabis indica
aaaaaaaaaaaaaaagcacctagctattgctattagttagcatttttaaattatgataatccattcaagaaacattagaagatgaaaaaaaattattgaatttgtttctcttacgaaaatcacatgtttttattattaatcgaacctccattctcaaattcatatggccccctgtatttccatcatcacaatttcattacatgtggtcaaacgtttttcttttctttctttttttcacatccatttcttttacgattaaaattactcatgcaaaaatgtacatatttttttaatagaaaatataaagatttaaacacttaaaaacatgtttccagatgtaataagaacaaataaatgaaaactcaaaacaaaaattttcattcgagcaaaaggggggaaagaaaattgcagttgagaaaaaacacgaccacatatgaaaaaaaacaacaaaaaacgtttccatatataactcaatttcaatatgaattccttaagataaacaaaacttcataataacataactcaaaaaactcactcaacagacaaaattgattgcgactgcccttagtactacttgttgtatataagataggaaaatatacacgagttcatggagaatgtgaaatagggaaatataaccaagtgaatggcctactatcaccctacataagcaaacacttatgggtctgaaatctgaatgaagaactataaacaaataactgaaggagcagacgccaaggacagattcaaataccctttttcttctttcttttcaggatatataactatactacatagcctaaagcccaacacctaaacaaagtttaaaaataagaaaaagaagctagatttattagttcgatcccacaaagaaaaattaagatggaaagccaaaccagactgcacatattattagtcttgtattaacagtaacctgtagtgcttatcaccacttggctgatctacaatcctagttttagggatcacttccatttaaagtgcatggattgggctgccactagaattcatgtttgaactgctagagccaggatttgcatggaatgctgactgccgagaagagccatcaagcagcttcagagagagaggtgagggaccatcatcaccgatagactctcctaaactcagtttggacatgcctacaagctcatcaacattgattgggctctttgaatgaactgctgttggcttcagcacctcgtgagtctctttgtttacgtctgtgtcgttatcataatgtgaccaaactggaactggatatggaaaaaatggagaaatatatgcaggatatatcaccggatagcaagactgagggctattatcaagctttggaggtgcaggttctccatcatttgagttggttgaatccattgattcacattcttcatcaagagcagggggatcaggcaaggtgttatcgctttgaacttcttgttgtggatggtttacagacaagaagtctcgaggcaccatcgaagcatcagctgcctgtaaaaaagggcaatgatagcatattaatatatgtcatctttgaagatcaactaaaaaattagacataagaaaaaatgacatgaaagaaggtactgacttcatctgctataatatcaaacaagctcgatcgtctttttctcctggagacattagtttgcctaatgaaatatttctgggcatggcttgccacttgggtaggtgtccttgagataacatagttccgggcaattccacgccaatcacctttcccaagcttctgcaatccaagtagaaacatcctatgttcctcctcagtccaaggaacacctgaaaacttagaaattaatagatattccaaagacaaattgacgtgtatggtacagccaacaaaagtaattattagcactatctcctgttataatccttatcttcaaatttcttggcaaaaaaataaaacaatattatactacagctacaagaagcacaacataagacatttatacaagacaaaatcttcttccatacttacttttacccagttcaaggacatcttgtactaccagtaaaaaaaatccacttcactaaagagacaatatatacatttaaaatcacaactcaaagcacttgagctctacatttaacttcaacttgtattatccaaagaaaactgttcataaacaaatttactgttccagtcaaattattcataagaaaataacaacaaaatcccaggatttatgatatgacaaacaaaatccgattaaaactagttaaaaaaaaatattaacttggttgcttctactctaagttccaaagatgtaccaacacatagtcaaaatttccaaaatgaaaatctcaactaaacaactttactgaaagaacaataatttcagcctgtaagcgtgtgagtgtgtgtaaatacatatgaaccgaaccttttttcctttcacgacaactggaagacgacccgggaacgaaatcctcagaagcgtaaccatcggcagcagcaccgtggtccggtgtgtcaccgggagaacccggaacattaggtccaccctgtaaagcacccgaacccgacccagcatagtggctgagatttcccatactagcactctttcggatcgacccgtcagtcaatcggactccgaaaagcttaactccacgattcgggcacgtcctcgagttgtgtccattgtggcagcaataggagcaccgtcgagtcatggcttgggaactcaaatcagagttccaccaacaaattcaagattcagatcggcaaatgttagggtttggtttggtttggtttggtctggtcaggctttcttttttcctcctacaaatctttctttctaggttatggaaacaattcggatccggatccaaatatccgaattcacgtgatccgatacgattattcgggttagggctttagctaaagtatgattgtcgatctcctcagctttcgcagttgggaagagaaagaagaaatggaagatgaaactctatatccatataaggataaagggaaaatgattcgctacatctcatttcaccgtttccaatagtggacccttcaatcatcaccgttcagtattctgacacgtttaattataaagtctttctcgacgactacgcaattgtttttgtcattttccaaacattatcctaataaatcgtttaccttttcattaagacaaaatcgcttttttttttgttttttttttggtttttaagacactattttttttattaataatgatgtcttttttccaattcataaaatatattcatcctaatatatatattgttttttttatttgtttttcattatcaaattattagtactcgagatacataaattttatcaataatttataattttttaaaataaagtttcaagtaatatctaagtatatatagaagagtttatgaacttttaaaaaaaataaaacaagtgggcaaaaaaatatatagatttatattaatacttattttccatatattattaatttaatttattttgcatagtgtatattgtacttatattgaatatgctatgaaattttaaaaaattctaatgaacttatattataaaaaaaaattaaattatatttgaagcttgtaaaattgtatatgtgtaatgcacactatttaatacatgttttcgacttgctttaaaaaaaatacataatagattatttttaattacttaaaaaaaaattctaaatagctataatatataataatataatttattatttttttttttagaaaaatctagtataagatgttggtaaatcataaaataactcctttagactatcatcaatgggagatatattcattgtgttgtatttgatataaaaaataattttattatatattaaagtttttataaaaatattaaattttgagtaaaaatttacaattttactgtcacacggaattttttacaaaatattgtttttttataaaacaatcgtaaaacaacaaaaaagaacaattaaaaagtgaaacaactaaaaaataatcgaagaacaacagtgtaaacttaatgtagtacacagtataaaacttacacagtatttttttaaaaaaattactagaccccatattaaaaaaagtaaaaaaagtttgaaatttcagtggtgtaaaaattcctaatatatttacaacaatatttagcattttacttcaatgcacaattataaaattatacaaaaattaatatttgattgatactctttaaatattttattgaaaatataaaataataatgcttttttttttataaatataaaaagtttattattttatattatagctaaataattatagcataataaaaatgacataaaactaaatataaaagtaaactgtgtattgtgatgtaatttttgaattatgttatattatgtgtcaaatttgacacaagtacaatatttgacacattattggagcataatttttacaaaataaattatattttagcaatgcatcaccaatgctttactagggttgcacattgagcaggtaggtcgggttttgaattttttgggtttcgatcgggtttagtaggttctacccaatatacctaaattttaaaaaaatatatatttttttaaaataattataaatttagatctaatctcctcagcactcactcccatcatcagacaaaaaaaaaatagatctaacctcccctctctccctcatatatatataaatatatacacaacatataatatatatacgatacatacactgtaagaagaagcagaagagaagaagaagaagcaaaatagaagaataagaagaagaagttgcgtgaggagaggaagggggaacgggatgtcgtggatcgtgagtgttacatttagggttggatttagtttaacttatatatataataagaaaaaacataatgtatcgggtgaaggtttcacctgaaactcaatatttaaaaatgtcaatccaatacccgcctggaatatcattcgagtggcacccgaacctaattgttttaattatttttttagtaccgagtttaacgagttcaagccaggtgggtgcactgggtgtgggccgagattttgagcctaaatgttcaaccctagctcttactagacattctcttatgttttatatagcaattatatttttgcttatacttggaccacgattattaggtttgtaaatttgtaatgtattaattggttaacttctccctttctatattaggtagtttgggtagctaactgtttggtttttcttcttttcatagaaattatgcctaagaaaattcaacaagatgaggttgagatggcagaggagattctggagcagaaggatgctctgagattggttttgaatgatagtccatgggagatggaccaacacgtaaataaattcaaaatatataataatttaaggaagtacgagacccatcgagggcttcaaagtgttttgggattaaattctggaataggctttctattcatggagagaagcctagtaagcgcacagataggggcttcgacatttggagttaggctcacgtggaaatgggtgcgcaccttattttaaagtactattttgctaatttatgcgttgtagtcagagtggcgcccttctagttcatcctctaggtatatgaactcttgtcaggatagtatatcctttgtgctcatcacaacaaaactacgccaacattggaggagatcttgtatttttagaagattaaatcccaacccattaggggtcacaaggaaaaagtgagcttccatcgattggaacgtcatactaagattatagcttgtcccgtgagttccatgaagtacactcataatttttggtaggggtgtatgtcggtcggtttatgct

SEQ ID NO: 296887 - DNA, 1067 bp, Cannabis indica
cataatttctctgaatctagcacaactctccttagaagctttgaggaagaagaaactatcatcaacaaataacaactgagaaaccatcgggccccatctcccacaaggcaacccatgaagcctacccaaatgacaatcattttttataatagctgaaagtccttcaacactaataagaaacaaaaaaggagaaagtagaacaccttggcaaagatccccggaagggataatgtttcccaccaaattcccattgacattaatggactatcgtaccgaagagatatatgtactagattaacccataactcaagaaaacccagtcgcttcatcgttccttcaatgaaaccccactcaactttgtcataagccttagccatatcagctttgatagccacgaatccttttttgccccttttgtgtcttttaatgagattcaagcattcaaaaccaatcatggaattattagtgataagcctatctagaatgaaagcactttgctcctaaaaaattagatcaccctaaacatcacgaagttggttagtcatcatcttcataattattttgtaaatcatattacaaaggcttatgggaggaaaatcagcagttctgcatgtctccttcaattttagaatcaaacaaatagaagtatcattgatacaagccactgaccattaccattaaggaactcaagagccattttacaaatatttgggccaaccgtagcccaaaacttctagtagaaaccaactcccatattgttgattcttggacttttatggggattcatttgaaacaaagcaaacttaacatcaaaattagaaaaaaggaacaagaagtaagttagccatatccagtgaaaccttagaaggtacaaggtccaagattctctgcatatcactcagcgtaagggaatcagaagaaaaaagattaccaaagtactaaataaactccaattctatacccctgggcgaaagttacatttatttatttaatttattaaatttaggaaatggaaaacttgattaaataagagagaaaagaaagggaagacttcttctatcaatttt

SEQ ID NO: 296888 - DNA, 8084 bp, Cannabis indica
taaaaaaaattagtaaaaatatttaaaatttcgtgaaactgtatttattattttttttattattattattatgttttgtaaaataaataaataaatgtggatcgatatactcttacgagcttagttgaagtttttttttttttaaaaaaaaaaaaaaaaagtaaaaaaaattgtactttgacaaaagcgagtcagagcagccagaccggcttcagcttcagcttctaccattattttattatggtcttcattgaaagttcaaaacaaataaccaaaccatcaatctgccattactgatcatttttccttttctctcaaaaggaaaaaatgggtgagtctggaatctcttgttctggttggatcgataattgggatatggaatcgtacccagtagctcaagacttcatctttcttctctttttcgctgtgcttttcccttctgttcggcttttcctcgacagatttgtctttgaggttcactttctttttcttaaatcttttttctctttttttctctcttagaaaagaaatgaactttctattgtggttgtactggagttttagagcttataatagttctatgtattaaaataaaagtaaaaacttgagaaaaccttttttttgtttttctaataataactaaactttgaaccatgtaaagtaatgtaatagtttcaaaccactgaatagaagctttcaatgttaaatgtaaccgcttttgttgttgggaacatgggagtcatattttctctctccagcttggacttatgtgcccaacaacaaacaaatacattttaattttattttattgttaagttttatttgttatggccctgtttttttactggtttttagttctacaatttacatatatatatagtcgagaaatcccatgaaatatattatatatatttatatggaataggtaaatagggattgggtttgtttttattctgtatttatttgttgtgaagagtttctcaatattagttattttaaggatcaagtttctccaattacgggtatttcaacatggtttttttttttaacatatgaacaagttttttattctctatcttctcatttcgcgtttttcgtttagtgtacgagtaaatttatctacattatggatgacttgtaaaatggagaatggggtcccatttaaattgtcctgaatagtttaaaatcttcctgaatggggacgctatcttgtcattattcgtaagggtaaatttataaaacgtataaataagccttgtgcttagaacatatgcaaagaaaaactttaaaaagattttaattatgcaaaaccataccttagtttgctctataaatgattttaagcattgcgatgatcaaagtgtcttttacttatcatcttccataacaaacactcatttcaattttgggtatcgatgatttgaaacaataatgaaattttttttttttaagatgtttcttttctcctccagatggtactgttgtcttaatttgaatcaaatggggtgatgttttctgtagggaatagctaggcgcttgatttttggaaggaaacattatgagctgaacttggagaaacagtggaggagaaagaaaataaacaagttcaaagagtctgcatggaaatgtctatattacttttcatcagagcttttcgctctttatgtcacctataatgaaccctggttcactaataccagatacttttgggaaggtcctggaaatcagacttggccagacctgaaaatgaagttcgttccttgacatgttgaaccaaattttgttttacttatgtgacaaacaagtacttgaattacttgtgcttgtgattgtggttctttacaatcaatgactattcctcttaattttcttgattggcagaatgaaattgaaggggctgtatatgtatgctggtggattctacatttattctacctttgctctggtgttctgggaaacaaggcgatccgacttttacgtcacaatggctcatcacttggcatcagtcaccttaattttgttttcttacatgctaaggtatgttcgaggatgcttcagttcaacttgtagtttagattccattcattatgtcacacaaagaaacttgactgactccaagccatgctaaacaagatatgattgctctattttattgtctttcttcttaaggtttgctagagttggttcactcattttagctatccacgaaggaactgatgtgattttagagattgcaaagatggcaaagtatagtcactatgaagggtttgccagcgttttccttgttcttttcattctctcatttaccctactgcgcattatttactatccattctggatactttggagtacaaggtgagttcattttacaagaattgagttacatttgctaaattattcattgatttgaaattgcatgttacttatgttatgcttctatttcctagagatgatagaagactacagagatggtttatttattaaaaaatcaaatcaaatcaatttccttagtttcaacatcctgctctacattctagctgattttcttcatttttctttgtttactgtttgtctttttcatgtaatgtaaccgcattacgaaacagatgcacaacttaaattggcatgtaaaacttttacggtttttttttctctttagtcatgaaatgctaagattaaacatagatgtttgtttggtaggaaggatgtaaaaatgggtgggggatggattgggtgtgtacctcaaagttgtttggtataataggagggaaagaaaaagctttgaggtaaacacccaactcatacctccatatatagagggattgaaggagtgatgaatcaacagtttatttttgtatcaatccacccagatatagagggattgttttttgtgggcccaaaggattgacaatctatagccatttctttcttttgcctctcttctttcctaccaaacaaatagaactaaggatgaattacccaatttcacacacccctaatccatcccttcaatccaccctaccaaacacaaataccattgttttgaaatctgggaaagagcaaagctattccatattctttttctggtgcagtgtgttacatgatcagattgaaataacctttgcttcgattgttttgcggcagatatgaagttgtttcagtcttgggtgaggatattattatggtacatggtgtctattactacctatttaacaccctgctcttcggtttgctcctttgtcatatttattggtggctactcatgcttcggatgcttgtaaggaaaatcaagacaagtaagctggaagacgacgttcgatctggtaatgacctagtcctaatctgtctcacatttcattagctaaggacccaacataatatgcaataaagatagacatgtcgaataatgaaaagtaatttgatatgcgcctgtttttcaatgcagacaatgaagatgaagaacatgatgattgatgaccacaataattgaagtattatgatgctaagtgccagcctttgattctcggatgagttacttccctgcctttgtaccccattttccaggcaatttaactccttagctttactacatatgttattttgaatattgtatactctgtaatagaaactttttattacactgcaacctcagagagaatgtttaaacaaagtgtcaaatgtaaaatttcatggtaataaaaaaaaaagaggggttgatatcataattattgagtttatactattcaatcaaattgataaaacctatggatgccaagggaggatgaaactaataaattttacaagaatgaattcaaacagttgagactgaacaaattaacattaaccaatgcagaactgccaaaactacccaaaaaatagaaagaaataactgcaatggcctcaatatttttctattatattttaaagtacaaaaggaatgtaaaatgattgccggtagattgtttgctgctggaggtaaagacacgaacagctatactgagtagtactttctgtatatcaattagaaaacttcgagaccaacttgtccacgtgaattatgatatcatcaattcgagggcgaactgcaggttgaggctgaagcatccatgtcacaaactggtgcagggcttcaggatatgcctgtttaggaccacccggccactttacttgtgcattgacaatcgccagttgtaagcttcctccagaatcaagtgcatattcgaatggagacactccatacctgcatttattaatatgtaattagaaaattgtataaaaccaatctgtcaaactgtgcagctaagtttgtcagaagagccactcatcaaatgacaatgataccatcaaatattagtaataataagtagagagagcaagtataatataccaaacaacgctaataccatttaaaaaataacacaggtaaagttaaataccttctgtgattttcataacttatacatgtctgatataactaggttaaaagcaacatagaattggtgatcatagtagaatgccacgcctaaagatgtcatacagatgacagcaccaattctctgcgacttgtaatatattcaagggtataaaccttaatttacacaacaaagtatacaaaatgttactctaatagcatctaaggttttcattttgtccaaagtccagctggaataatatgaaataacagccaactctttattacaaaaatgaaaatccaccttgttctgagatcccaggtatcagacaaaaggatttaaattattatgaaaatatgttgttattttatcaatgtcaaattataaaatataaattataaaacagaaaatttactacagagtctgtaaatctgtataaccctgaggctacaacagggcaaaggggtaaagttggaagctctcggaaacaaataactagtttaaattcaccaagcttttaccaaaaggggtaaagttggaagcttttaaatcagttcactttcggtatctacatgaaacaaataactagtttttcatctagggtacgtacagaaacaaataactagtttcacaattcaagatacgtaaacaaatgtagggaaagaagacagagagatgaaaaacattataaacatggaaatacgaaaggatgatctcacattatcgcatataaagtgcatcctaatgaccaaatatcagttctctcatcgatatctgcattacttggacaatcccacaactccggagctcgaaaaggtgctgaacaatgctcagatgcccattcctacacagcaagcaatgagaatcaaccatcagtacaagtatgaaatattttatgagagatgaaatctgtgcccatttttgcactacttttgacatattctaataatgagaactttcaaattgtaaaaattaaaaactcaaacatttggtaatttgaaaagattttttaaacaacattatccaaacagtaactataaagttaagcatttgctagaaaacctaaaatataaaaacactatgaaattatgttcagtcttcacaaacatgccattagtttccagaatatctaaatattaattaaaaagcttccatagtttttaatttcattgcatgtgtgtgtgtgtgttttggggagcgaaaaaaaaacacctgcaattgcagtgcttcggaacgggattgaatcctcctccttgcaggccgagcactgccaaaatccatcaatatggctagtggtggttgtcctttcctatgagttatgaggacattaccaggcttgacatcattatgagcataaggtggatctaaactgtgcatatgcttgagtcctgcgcagagctgttaaatttaatttgatgttaaactttttgaaactttgaaactattttactatacatgcacatcattgcatatagatgaggaactgaaacaaatgtactagcatcactcagttgaaaaggtctaaagaaacatatctatgtacctgacggaatatatgaagaacatctgtggtcgagaataactcctttttagctttcatagtgttagcattgtccaacaatgttccatccaaatgaactggaaacaataagtatgcttcatgcttccaagatccttcttgtgaaggctgccaacatatataacaacgacttatttgagatcaatttcagaatttcttttgacagttccaatagtgtttaaaaaccttttgttaatcaaacattctgaagttaaaaactgatattgctactatagatcaccagataattgttgcttgaaaaacttagcatctaattcattacacacagaaagaactatcaagtatgcaaaccagaaaaaaattggcgcatacagggtggcatgctttactagaaagtatccacaagacctgcttttgttttaatattctctctcttattctcgttataggaaattgacacatacaaattggcaacaaaattccaatgacggaaaatgacagtactcagagtccaatatgttgcttgacagatatgaacaacatattgatatgtaattcactgccactgattctttcagtttagatatgaacaactacaccaaaagacttaaaaaatttatctattcttagcaagatatgaaattcagtttagagatacgaaccttgacagcaataatggcatgatcaagaagcggaagtagattaggatgactgaaaagtgatgaaacacgaatttcctctctcaccaactccaactgttcactattctgaatgagaacctttttcatagcataagtcccatcatctagaaagaaacaagaaccatattaatatcacaacctgacagccaaaagttaatgtagattggacactaaaattagagtaaaaccatcacgagatatttatacaaatgttcaaatatgaccaaaaccaatgctaaggaaaataattgtgcaccgtgggaaaacacaggagaagaaccagaacatgaatctgttgactaaaacacccacaaataacattcccctacaatgaatctgtctagattttggatcacttgttcagtctctagtagtgaatcaatacaattgtctcacttacacaatgaaaagtatcagaccataaattagagaggtccaaataagatcaaacatatgaaatccctatcgctaacccaaatacataaaagtaccacattgtgtaattattaaactattaccaaaaatttaatggaaaagtaagaacatcactgcacataaaagtgcaataattctttgctccacataaaagatcaaaataaaaacccaggtagctaaattggaaagagaatcaaattcaaccatttcagattcatgacgaaatgacccagatcacaaaatcccgacagcacatttttaaactgatatataaataatgaattaacaaaatcagattcaaacaaaacaacccagatcacaaaaaacagaaaaaagagggaaaatgaagaattagaagggggattgaaccagagagatgtgaggggtctttgactttcttggcgagaccaccaccggcagaggcagcggaattgtcggtgggtacctccttaaccaggaagacataggcgaagccaccttcaccgagctgcctgacgatcttgaagcgagtctcattgatccagacatctcctgcgccattaacggcgtcatacagagcattcaatccagaaaatgagcaacccatcttcttctttctctagaaatgcatataaatgttgtcaccaagtaggaaagaggtgaagagaaatcaggttttgaaagcagagagttgaagacctgatttcaaaagctgaaatctgatcaatcaagcttggttttgagtgtgattttgtcctctgtttattatttttcttccaaaatttaactctttcgcttcagatctaattttaggggaatttttgggtattttatattatttattttttaattatttttgtgggtttttgagtccctcaaatgtcaaactagaagtaacacgtggagactttatgacagaccactttttattcctccaatttgggaatgtaacgacaaaaacaagtaattatagggcaatcccttaattttttttttttatttttttttttagttaaa

SEQ ID NO: 296889 - DNA, 7785 bp, Cannabis indica
gtatagttgagattgcattatgagaggaccaactttttctgaaattctttaatacccaactcataatttttctttatattttcaactttcatgaagaaaaaataaaattaaaaaagaactgttgttaatctgtgataattctctcaaaggtaaaaagaaaaaaaaaatggaggatcaagtaaagaatgtggttatggtgggagttatttcatggtcaatatcatttatgttaataagaaatattttaccaaaccgttcttttggattctgcaatcgacttgtttcttcaatgcatgcaattctagctgtgattttagcttcactgtctgttgaagattggaactgccctgtttgtcctgtggcttcaaattcttcttctaaacaggtattaccttaaataatcaatgcccaaagcaatgatgtttcatggggttattgtaaactcaccaaaaatgtataaatttagatataaatatagctatacaaatatacagacatgtgtgtatattgggtggagaagaagagcttacatgtttgtagccatgaattaaacaggtgacaacattagctgtgaccctctcttatctcatatacgatctgatttgttgtcaatttgataaacaatttagtcttgataataccattcaccatttggttagcattgttggaatcggcgcaggtcttgcctatggaaaggtaaacaatggaaaatatgttataattttcttttatttacctcaaaatatgttacatttttttctttctttcttttcagagtggttcagaattggtggcagcactgtgggtatctgaactctctactccttttctacacttaagagaactcgttaaagaattaggttacaaagatactgacttaaacttggctgctgatgtacgtcctagtcgaatagacttgtcctattatattcctttgatatgaaaatcttctaacattgttgcgtgtctgttcctttgaattattgttattagatttcttttgcagtagtattttcagttgcaaggatggtactaggatcttatgtaacttgcgtaactgttgtggcaaacaatcctcttgtcatacaggtaaaagggtttcctaagacactgctactaaaagaattagaactaggagaagttactaattaattcatctggaatctaaataacataatgcttatgttatctattttatccaggccatggcagtgggattgctgctcctcagcgcattctggttcttcaagattgtaagaatggtcaaatataaactgaaaagaaggtcgtccacaaacacaaaacatgcctgaaagtacaagcatatataatcagtagaagagtagcttgagcaacaaataaattttatctggaatcaacttttattaatattactatgttgaactgaattctgctgttgttagtttgactacttcatgaagccatattctgggtagcattcaaaaattaaaatttaactttgtgtgttccttgctaaaaaaaggttgaccatcgagtatatgatttagttactacagtattattgcatacagaatcacaatgtggtaatacaaccaacatctccaaaatccagtgatccatttcttcaaagaacttagtaacactcctgtaaacatagactaaaatgctcttgcctaaaacatccatgaccgagaacaggacattactcttttccgaaatctgcattgtaatgtgaacttgattcgagtttcttcgcttcatttagcttccgtacagcctggtaatttgcagtgtatataatgaatttatgaataagtcttcaaaattatttcacatgggtataatttacataacaattggcacataaaggaataacccttttttttattcccagaacgtttattttctcaacagattcagcaaaatttctactgggaaaacttttaccttcatgaaatcttcatgaatgacatagtcccgctctacacggattgctgacattcccgcctcagtgcaaatatttcggagatcagccccattaaagccctatagaaaccacatagcatacatataaagatgtgacaataccaaaaatataaatataggtcgcacacatatatatgtattggacactaacctctgcaagctttaccacagcttcataatcaatttcaccatgtttggctataccagcagcatgaatcttaaggatttccattcttgattgctcatttggtaagggaatctctatcttcctatccagtcgacctgggcgaagaagggcaggatctagaacatctggtcgatttgttgccattattattttaacctgtacaagaaacaaaaagagaccatatgtattttattttatttactaaacaacaacttgttaaaaaaactttataataaagatatagtacacaaacctttcctaaaacagacatgaaaaggatctgcaaacatttctaaggtttctctctaagaaacgcatataatattgtaggtgacaattgacataaccaaaccaacagaatactcatccaccacattccatgactattgaacaatgttactggggcatgctgagtcatctatttgagccattagattcctatgattacaaatacaaaagtctcctgcctgaaatctaagctgtgagtaagtcacctgaagtttcttcaatcataactcaaattatggttcctaaaggttgggttaacaaaaaaccaaacttctattcaaaagattggctggggtgcttattccatatgtgtaagaagagccttggattccataagactcgatgttaaattcatacctttccaagctggtcaaatccgtcaagctgattaagtaactccatcagtgtcctctgaatctcacgatcagcacttgttccctcactaaaacgacgcccaccaatggcatcaatttcatccatgaatataatgcagggctttaatgaaagaagcaaataatgaaagttaaacaatgaaaagagctgtaaattaaaggaaaagaaatatagaaataacagcaagagatcttacctggtgatcacgggcatatccaaacatttcacgtatcaaacgagcactttctccaatgtacttatcaattatagcacttgaaacaacctattgttgataaaagcaacagtgaaactatgcattttagaccaaagccttaaaatactaaagcacattaagcacccaataattaaaaatatatttatacctttaaaaagttggcgtcaatgttacttgcaattgctcttgctagcaaagttttaccagtaccaggagggccatacaaaagaacaccctttgaaaagtaaacaatggaagaaagttgattagtatagaagaatcactttaacgaacagggtcaattcatatggtacagtattcatgtaaaccaacaagagggaataggataaaaccttgggaggtttgatcccaactctcaggaagagttctggattcatgagaggtaactcaatagattctctcaattctctaatttgatcagataaaccacccacagcagaataactaacattgccggggtcttcatgaagcatattataaacaactgggtcaacctgttaactcaagttttggaaagaaaggaaaaaaaaacattaggcatcagtttccacatgagaactaaaactgaagtggttgagtcatctataaaccattatgtgtacccttctaacttgaagtatgcatataatatatcaaagcttacttcgcgtggaagagctcgcattattgtgagtgttgtcatgtcaagaaccacccttgtgccagaagtaagcttttccttatctactttggtgcgacagccaacgacatacctaggtccactgcttgctttcacaatcactgaaattttacaaacaattacagagcagtatacaatgaaaaactaacattcatacatctattaaatgcgatcttgttttgattttgaaaattatggataaatttccagtcctagtttaaaggagaaatgtcaaagagcaattacatcgttcattgttgagaggcctgaggacttctccaataatctgcccaacactttgaagagacttcaaatcatcttctgttttgttaaactctttctttgaacttcttaaactatccctcactgtaagaaaccaattacaattttacatctattagaagctttctcagttcaaaattgatcaatgagcaatgagcataaagaattgagcactaaaaagaccttcacaaaataagtgataaactgtagataaaacaggcacaaatcaactcttaaactccaaatctttgcttctgtttcaagatgaaatgtgctaaggtactgtgagcttagtttttaacttcaggtttaaaccaaaaaaaaaaaaaaaacaagaaatgaaattctgaaaccctaacaatcagagatgaaaattatgattaggttaaagagtgggaagagaagaaaaaaaaaccgtgtcgaactctagactcgagctctctctgctgaaggagtttcttgcgatagtcggtaatgacagtacgacgtcggagtgcatcttctccatcgctcatggttgatatgatatcgtcagaagcaagtaaagaaattccttcttagtttctgctctgcctttccactgatctcgattttaaactcctctcttctctaacatttttcttttgggttaaatatttacaaacacactaaatactcaaaaatgaaaatgatgccattttttctaaaactattagaattattgtatttaaagacttgtgtttaatttcgttcacttttactaacgcggtgattgcctatattaaatcgtgctcttaaactttaatatctaccaaattcgtgtctctgaaatttgacatataccaaatcatactctctgaattttcaacaatattaggcttccgttaataaaattagacaaaaattcttaaatcaatagttttggagaatttttaacggcatgaaaagtttaagagcataatttggtacatgtcaagttaaaaatcttgattagtcctttttttaaccaaagtttattaatattatgagaaatttacagtcaaactccgtatatttttttttgaaagaaaaccttgtatgctttaatcgctatacatttaatattttattttattttattgggcaaaatctccttaacttaacttctgtttacaaatcttagacatctcttaaatttgactgttaaatgccaactgagactgtcactatgtatacatgtatacacgtagcgtattttcattgtatcagtgtgcttacttggcagacctgagtcattaccaacataaagacgttctaatccaccatattgaaaactattcatgatgttgtgatggtttacagtgcaatgatttttataccagaatcaggataccaacttccatctccaccttgactagtgtgagcaatgtgagcctgcatagtgttagaatttgaagttggcaagactcatgtaaagcttttatcaaatctatagaaataatcaagaacaatgtagctaatcttgtgacaaagttgagattgtggcctgtttagtgtagaggagaatctaccactacaattatgaatagaattttctcagctagcattgaatggtgataatccacctcctgacatattgccaaaattgccatggtaagatcctctggtatcattgaaagcagacaaattagaaaagggatgtaagtggtgatgagaaggaacctgacctcgagacactccataagtcttaaaattacaattgaaatgagccagattagcttcatgaatcaaatttgcttcaagactttaatatggttcatcaaccaccatgttagcactaggatcaacttctttatatgtcttttttaatttttgacccagatgcaacaaagagaccccccaatttcaacaataagatatccttcagtccttatattagatgatatgatgaaggtgtcacactcactagacagtcctttaaagattgcagctatgtcataacgagcaataagcatttcactagcagatgcaagaagaacaacatgttgtttcaccttaagaagatattcgtttagtgccattgatcccttccttagattttgaagtttggttcgaaactcaagaatcttggtagagacttgaaatatgaagtgcttctttaacgtactccatatctgacaagcagtattacatcccaccattcgcgttagcaagctctcattcatagattacaataacaagtgtttactaagattttcgggaacgagattaagtaagatcttacgaaattaaatagtgattaagtcaatgagatgtggttcgggcattaatccctagtccacgagtcagtgtattgaccttttaggctttaaaatgtattacaaattagctttacaataaggaaccctatataaagaaatagaaggaaatgaaaaaagctaatgtcacttcttcttctcattaattttcaaaaatcaaaagaaataactctctcaaaattgttccaaatttgtttgagtatcagcccacactattcaaggtgatactcagacctttgtagaagactatgatgaaacgaaggaggagaagatctaggttcagttcttggcaatactctactacagaaaggatcaagggtaagagaactgaacggaatgagtcaatactttctactacaacctaatgtaaggtttttttttaatctcttatgtgtttaatttattgtcttaggaaatccatattaggttgttagattagtttaatccaatatacatgagtagcaaataagatcctagtaaaataagttttccaacatgttctttctagtttggttgcacaaaataagggaggattcgtaaagggcgcttcattgtgcataacattatgaatggtcagaaccttgtgaagcactatggaagaaaatcaagtaaagaaaattgcatgatcaagttagacttacggaaagcttatgatacaaaagaatgtgactttataaaagaaatgcttgaaactttccacttcccgagcaagtttattaaacttatcatgtaatttgttcgcacacctaaattattctatcttatgattaatggtccaatgcatgaattttttgaatccaagagaggtttaaggcaaggtgatcctatgtctccattactttctgtattgggaatgtagtgcatatccagaattatgcaaaaaaatttgtcttatggacgattttaagttccatgaaaggtgtgatgatctaagattcaactacttgagttttgcggatgatgtcatatttttttgtcatggtgacttcaagtctatttattacatgcttcaaggtctcaaattgttttctagaacatcaagacttcatcctaatgaagcaaagccttccatttactattgtggtatgtcggagtcagaagtacaaagaatcttatattcctcagagttttttaaaagctcccttcctttcagttacttgggtattcttatatgctctaaaagaatttcagcaaaagattgtcaatttcttgtggaaaagatgacaacctgtattagaagttagagttctagattaatttcttttgtaggaagcgttacattgattaatttggtattattgtcatttcattcttactggaatcaaattagcattttaccaaagaaagagctagaggatatcatgggaatatgtagagcatacagttggactgactaagttggcttaattagttttggtatcattgcttgggagcattttgttgggttttgtgccct

SEQ ID NO: 296890 - DNA, 4579 bp, Cannabis indica
tatatttacataattaattaatatagctcaaatgactaaatttcccctcgaaaatagggaagctgttcatattttacctctatttttgtgggttgttaaggcccaatttgcagcttgacttgctatctgtcgatgaaggctgcgcatcaaaaacttgccaaccaaaagctggctggctatgcacctgccaaagtgcatgccggctagccacatggtgtttgaaagctagctggcgtatgctggccataaggccagccaggggtggctggctagccccttttgaggtgcctagtgcatcatgttgttgtccctcctaagtactcagacccctcattggttgaagtgttaagtagatggcttggccttcttgttggtgagctgtactatcacatggcattgatattggccacatggacatgccacgtcaagtgggcaaaaattgagataacagtaagtacataggaatcaagtcctacttcaagatgaaaacattttaggtgatttaagggccccttttggtgcgtataaattttagctagttaatttgtatgtagcataaaaggattgttagttggttcccagatcattaaggggatcgcggagcttgactcatttttgggtactttaagattaactgcttgattagattaataaattttcatgcgttaataaagcggctttctcacagaatattagacttctttgttctaggcatagctttatttattctgcatgaaatataatattaatccacttgcaccaacaaaatttaggcgaggtttcttaccaagaaacaaggatgaaagacgtcaaattcaagttatattttccttctgtaatttcaaaaagcaaagctaactttatttgtgatagaataataagctagcaatgcaacgaatttcaatcctatcagaaaaaaggctgaaaacgcattgaaggtcaggtaatattttctttttataacaattaggaaacttaaacaaggaaacatgatgaaaatgcaacaagattaaggtgatacttcctataagggaaaaggctgaatatgcattgaagttcagacaaagttttccttctcataaattaaaattttaaataaacttaattaacatgataatttggcattgtacattttttagggcacatagttgagtatattaccccctaagtgagctgggaattttaaacgtctacaaattcctaatcacttgtttaaaatgtagcttgaggctagagataaaaaaaatgcaattatccttgtaaaaatttcttctatttttattttattatgcctgcaggcgtacattaagaagagaaaatacaaaaagttacaattccatcaaagagacatctagacccggacacccctagttgactgatagtaacaacgtaggtggtctgtgttccaagcacgctggatttttgatccattcattctctttagttgagatgtcctactgcccactttgtgttgaatttcataggattccttgtaattaggtcctaaaacctcctctcctagttcttgcaaagctgggaacactcttcttaggatgagatttccaacctcaaatgtttagcttttaacttttgaattaaagtgtctggaaatttttccttgatacattttgagttggacttgcaattgttccttgtgctcttcaattaaatcgaaagaatcttagagcagagagtggttccaggttggatcgtaagtaactcatctgtgagaaggaatggtggtttccacttcgataactgcttcacacttgtaggccatcaaatatggtgtgtaccccgttgaagttttctctattgttatatacgcccaaagggctcgtagaagctcctctagccaatgggcttttcaagcttgaagttttttattcaatgttgttttcaaaatcttatttatggcttccacctattcgttagtttgtggtattgccacagctgagaagcttttgatgattccatatagaacacagaagtcaatgaagtgtacactttcaaactgcttcttgttatggagacaatcttgtgtggaactctgaagcaacacatgatattcttaatgaagaagtctgaggccttttggaggtaaccgtattcatgagttcagcttcaacccatttggttatgtagtcaacagtgtctattgcatattttactcctcattttcccattggttgtgatcccactaggtcaattccccaaactgcaaaaggccagggactaccttggcttacctttgatattgttcacatttctagacatactctacataatatttcttcatcgttggccaaaagaacccctgacaaagaattttctcagaaggactttgcctggaagtgtggtctcaataaaaacctcagtgaacgacgtggatgattgcacttacctcagttccggctatgcacctcaagcatggtactgataatcccctactataaagcttcccatatagaatcacgtatcagggagcttgatactagactttcttggctgcagctttgtcaaccagaagctctcccaaacttagaacttgatagatggggcccattcaggaatttgagtgatcaatgacgacattcaccccggtgtttctatactcatagccttaaaatggcctacggacactgctctgtatttcatgatctttgggtctattgcgagtttggccagcatatctggaaatgagttttggtcacttaggaatcagtgaatgttgtaagtcttgaacccttgcaatagcacctgagactgtgttacaaaggcatccatcttttcacctttagcttgatattcttcaaatatctggttcataacacgttaggaaccattgtgtacatcaatgctttaggcccctactccttagccacttataaccaatctaacatggctaatattctgctttgttgttggaggctggaaatccaaagtggagggaattttggagttaatatccttgtagagaaattaatacaattcttgctccaacaccttattcatttgatgccccgtcaacatagaccttctagactagcaactctaggactggctcatccaagaggtcattcattctagaacatttactatgaaatcagctagagcctgccccttgattgacacctaaggctgatattggatatcaaattggctaagttccatagcctattttaatatcctttcggatgactctactttttgaagcacttggcagagaaggtgattggttagtaccttgatggcatgggcttgaaagtaaggtctcaactttttggaggcaattagcaagcaaaaggtaaacttaactatcattgcaatcctagattttgtaccctgtaatcttctgcttatataatacaccagcaactagactcgtccttcttcctacactaaggcagcacttgtggcatgatcagacacttccaaataaaggcacaattcttctccttccaccggcttcaataggatgggagttttagttaggtgttcctttggcttctgaaaggcttccttgcattcttcgatccattcaaatttcttatttccacacaacacattaaaaaaagggatgcacttatctgtagactttgagataaattgaccaagggttgtggtccttcaagttacactacacatttttatgcttcttgggagaagccatgtcgataaaggctttaatattctatgggttagctttaattccttaggaactaacaataaaacctagtaatttcctagatgagactccaaacatgcatttctttggattgagtttcatgccataccttcggatgactgggaaggactcctaagggtcatcactatgcgttgcatttttttagattttacgagcatgtcatccacatatacatccatattttttccaagtttctccttgaacatcttgtttaccagccgctgataagtggctttaacattcttcaatccaaatgacatcaccttgtaacaatacacccctttatccgtttagaagctggcatgttcttgaaatgcgatatgcatcttgattttattgtagctggagtaggcatccatgaaacttaacaactcgtatccagaaatggcatccaccatttgatctattcgcaaaaggggaaaataatccttggggcaagccttgttaaggttcgtgaagtctatgcacattctccacgtgccattaggttttgggaccaaaatcgggtttcccaaccatagtgggtacaatgactctagagggaagtccttggaggttaatttataaacttctgccttcactgcctttccccttacggcgtccaatggcctcctcttgtataagacaggtgttgcatctttcatgatgttgaaagcatggcaaatagggttaggattgattcccatcatatcagaatggctccatgctagcacatcttgattttccttgactgtagtcacaatcttttctttttctatcggatgtatatttttacccactttaatagtcctagtggggtattctgttaggttttatgccctaaataaaactccatttcaatgtaatctattttattcaacatcaataaag

SEQ ID NO: 296891 - DNA, 2516 bp, Cannabis indica
atgttctggacttaacagattttgtacagattaaaccataaacatgaaaacaatatgtaaacataaatgatttctaatcttttattgataacaaatcagattagattgaaatgggttttatttagggcatataatcccaacatatcccacgtcaagttgttccctttaatgggaatgtccatcaaagcatgacacttaatcagctcagtagtgagagaaattggtctttcccttttgacccgacacgctcagagctactcaaaacaaaattcacatctcccaagataaccagggcccgacaaatttgctaccaacttccataatatttgactagaatttcttcttctcttggaagtaggtggcccgtaaacacaagacaataaccaaggatcatgctcaaggtcagagtacacaatgccaaaaatatggtttttagatatacaaatgctttcaaaaataaaacccgctttccaagctaaaataatatcccccgtactatcgacaataggcactataatattaaaataaaaatgtaagttcttaaaagaacgtaccaaaaaggtagcatcagttcggtaataaagataaagtgaggagagcacgaccgagtgagggcttttaatgccaaaactgtagagggtggtctaccccaatcctctacagttccaagcaacgcctctcatggctcctgtggaggagggacaccatcctcctccaaaagggtcaaaccaccaactgacacaccaatcgcggatccctcatcctcaatcacaatatcctccttgatatggattataatgtccataaaccgagctttggttttccatgctatcagtctagttgactgtcccaaagagatcggtttgtcaacttactgagaacatactgtattaacctcagtgtaattaatcttctccacttcatcactggccataggttcatctgaaaaaatcagtagaaacccgaataacattagcatcatcatctccatacaccagaccaactccacatgggaaatctttgaccacacgcttcactcttctaatgaacaggtttggctttctcccaggagaaaaagtttcaaaatccaaatttcgcttcttaataggtgtagttctctcattgatttcagaagatgcttggacaccaatatccacaaaggaggctttccgtttattttggctcgacgtcccaatagcatcaggttcttggatatatccctcttgggtctgaaaaaatttggacaatgatctcttttcatcaagatgggcaaagacatcttggccctttaaggagctattcgagtcctaacaaagtagaccattatccaaattaaaatgatggcccatagtagctctattctcatcgcacgacccctcaaataaaattcctttaattagcccagatgccttgcctgagatgttaagacatggactagtcatcacaccctccaattgatccacacggcccacatcatcaataaaagtcttttgaattggcctgaaagccttactcgagaaagagcttttgttaatatccacctccccatttgaaatgtacccacaaccgaaatcattctcaggcccacaaatatcacaaacaagtttaggttgagtagggtcaaccttactttgacctttcacattcagacagatagcaagactccccctaaaacttaaatcatcacctaccttcggcaaaattgtatagccattttcaaagtgcaataaaggctttgaggaaaacttaccaaattcagccaaaccctgcgttactctaaatggcacaatcaacgattccttgggccttcacactttgccaagtctaaaacttaatcaactcgttgctattaacctaggctcaaagctcaagctgtgtgtacgaatccttggtgcagcctcgacattcacgacttgaagctcttccaccgttgctggtggtgttggccccagacctctcaactttggcttagcacaacctctacctttgccaaaactagacccaccaattttccctgagaaagaactcgcatacagagacgatacattcatccatgatccaaacaatgggaaaggaatgttgggaatattttactaggatctagatttactaataagtatgttgaattaacatcctaaatatgaacaatgaaatcaaacacataagagtctagaaaaccttatattgattgcattgattgcagcaaaataatatgactccttccgctcagatctctaactcttgttcctttctgtcgtcgagtattatcaagatttgagtctggatctctttctctccttcgggttggtgaccaccgtctttcgctttatgattgagtacttgacttgctatgtgtgggcatggtactctatcactatgggcaaattggttgaagaacaatgaaggagggtttgaatcactataaaaggtgtctctcatctactagttgtcagagaatgaaaactaggtttaagtttggttaaagtgaatcgttggatgagatgagagcatcatat

SEQ ID NO: 296892 - DNA, 5515 bp, Cannabis indica
gacttccacaacttcatttttgaaaggacttatattatggaaacaaaaggcacagaagaagaacacgtcaagaacatacaatacaaattaagtgacggtagtatggaggacattaatgaatctgtgaacataacaatgacgagatttggaagaatcagaaattccagactattttgaggtgacagtagaaatgctagaacttgaactaaaaaacccaccttaaatataagcagaggaaatagtagaaataatagagattccttcagatgaagaatccaaagatgaggaaatgtcaaaagagtccaattagccagattactctccagtaccaaagagcaaggacttagatccatccacaacacccaatatcgatgaactagaagacgacatacctgattatcattttgaagtagaaattgatgagtcagactctgaatctgagaacacaacaccaccaattccagcatatgtagaaatggaaatagactcgaggaacacccaaaagaagaccctgaagaatccgaagccgagccatgcgttgaggacgaatagtagtctcttataacttgtcaaattttatccaaagaaaatatttttgttcctattccaataattagtgactatgtaactagagatctagtatgcttttaaataaataaatatctttcttcaatcaaattcttctcttatgaccgaagtaactccctacgaataaaaaaagtatgagaaagacaattcgcctctacttaggaacctacttttcactaaagtaatgttaattcataaactggaaataaatacttaaactagacaccaagaacgagaagtacaaaagaatgtgacatctaaagcagcacttaaaacaccagggtcactaagaatttggtgataccttcttaagttattcaatgcccagaggatggtgtgattgttcaaaaattaggtgaaggaattcattgtcaaactgtttatattttttcgtactccaactagtggaaggaagttaagacgtcctaaatatgacactaaactgagactcgattgaacctcaagattcggagatcaaaactattggttcaaagagctggctttcgaaaaatgcctatttcttaatacaaaacttgtgtttgatcctacaatcatgatagtattcaagagttattggcgcataaagacttaagagagactgaaagctttcatggcctaatatgtagtagcctacacctttacaaacctcaaggagagtatgaaacaaaagatatgaccaaaatttgtaaccaagaaagcaactatgttagtgttgctgcttggaggaaaggagaaaatgtactgcaatggaaacctaagatcaatagaatgacggaagaacaaactacaccacactagatgcatctcgagtcagttgtaaaatggtacaatgattaggtaagggatggataagtatgcagaaggtggcaattggattcatggttagacgtcctacatgccagcagttaagagcatatcattaaaaattaataaacatgacacgacccttgtattcacaaagaaggtgatctctatttgaagtttagtatattttcaagtgtaaggtcaaatacaaacctttagaaaatcggatgatgtcttgtacgaagcatataaactagtcgaagaattgtacatgttgcaggtaatgtaacgtacatgtatataagagctatcattctatgagtgtaaggacctaatggaggcttaaagcgagtacgttacaaatggtatactttcctggtaagttagagtaagtgtttattgtcgataacattctcttacgatgacaattggttggccacaatacgtaggcaccctatgagatgtttatgagtgttaaatttacttggagtgaggtaccacctataagtgggtaagaagtatcaagaatggtagacaagatacgatagagtatgcacactgctctaacggatggagaatgatgaggatttaacaatgataaaaggtgaccgtatgttcttaaaggccacttcaatatggaaattttatgtacctcaaaagaaagggcaagtaaagcatgacatatataggtccaccttcaatagcgaatatgcataataaattttacattttaatgtgaaaaagatgcgtatctgatcccacgcagatgcttaagtatgagaatttgaaactacattaggatatgggttgtacgacatgtcagtatgcatgataggaaaaaagggaaaacaaaaaagtaagagtttacccataaataaggtcatgtagagtgaaaattctaatagaaaagctgtgaatgggtaaggatataaggagatgataccccgagttttgctgggttcagttaattttgaggataaaatttctttaaggagggtagattgtaataacaaaaaaaaatgttattattatataattacgttatttattattattatttatttatttttaactaactcgatgtggagatagtaacttagaataattcattttctcgataaatagtatttttctatgttatgagaatgatgaaattttgataaattagactattataaattactatgagatctagacttagtccattaggtgtgggacttatagaattaagacgggattttattattagtacaagttaattttgagtaaatattaaagatagtagagtatcactttaaattgacaaggagtattataaaaggctattgaagaaccaaatgcggttacaaaggctttcttggagtattataaaaggctatttggaactcaaatgatgcaaaagaagaatttgttgtcaaacaggggccagtattatctccacagcaagcataatggctactggctaagtactcgaaagaggatattaaaaaagaaatgtttagtatccctggaatcaaagcagctggacttgacggatatagtagttatttcttccaagacaactaagagtaaattagtgacgaactttgtaaagcaatccagtaattccttaactaagaaaatctgctaaaagaaatcaactcgacaatatttacacttgtccccaaaattaagtgtccaaatactgtaagtaatttttgacccatagcatgttgtaatgtgatttataaagttactacaaagctcataccgtttgaagctaatattacctaagttagtagcatagaaccaaggaggtttcataaaaggcagactagtagctcacaatatcatgatttaccaggacttagtgagacactatggaaggaaatcatcaaagccaaactgtatgattaagctcaatctttagaaggcctatgatactatagaatggagattcattgaagaaatgttccaagctttcaattttccacaagattttataaagttgataatgacttgtgtacagacacccagattcacaattatgttcaatggaaccatgcatctttgaatctaaaagaggattaaggcaaggggatccaatgtcgcctctgatctttgtattgggatggagtacctgatcactagaatactacaaagagtgggaaggaagactgatttcgagtttcatgatagaagtgcatctttaaagcttaataatctaagctttgcagatgatgttctattattatgtagaggtgatttcaaaagcatatactatatgctacaaggcctgaagctattctcagacacctgtggattacaaccaaacaaatctaaatcagtcatatactgtagtggaatggatgacagggaatctcagagaatcattgatgtctctggattcagcaggagtgaggtaccttttaagtagcttggtgttccaatttgtctaaagaagatttcacctggggaatgtaagactcttacaaaaaagatgatagccagagtgagagcatagagtaccagaaacctttcttttgcaggtagagtagtcttagtcaactcagtattattggtaatacattcatagtggagccaaatcatgattttaccaaagaacattattgctgaagagagtatatgtcgagccttccttcgaaaaggtcaacctaatgcctcgggttcacgtgaagttgcatggaacactttgtgccaaactaaaaaggattggttttagagacatagcaacctggaacacagtaccaatgatcaaatatgtctagacaatcgcttcataaaagatagtttatggctcaaatgggtgaacaatgtctacatacaagaaggcgactggtggcaatacaaggctacaacccaaagtagttggtactggagaaagattgtggaaatcaaagataaagtatatctatgcatggacccgatccagttctcagctcaagaatatcatataagcatgggctacaagctgctcaggccgccaccagaaaaggtacgttgatataaagaagtatggtgtaggtatatccagcttaagcattgtttcattatgtggttgactgtccagaacaggttaaaaacaaaagaaagattacattgtttccatattattgataactccacttgcacactttacggaacacatgaggaaactattcaacatttatttttcgattttgttttcactcgggaatgccttgaccaaatgaggaaatagctgaactggaatgttttcacaaactctctaaacaggttgcgaagatggattgaatgagcaaagatagggaacttcaagaagcaagtattttcagcaacacttggttgtttgctataccaattatgggtgacaagaaatgagacattttgggcagccacagtccatacaacagatcaagtgagccataaagtcaaagtagcaacaaaggatagaataggttgaatgttatcaaaatagataaccaatgaggaaactaaatggcttgagaaaaagaaatttatatttgtatagatatatgtttgaggcttatttaatagtctcttttaggttgtaaaagtttgttgtgattatatattagttggtcaataaaaaaaatgacaaggagtagtaagaatagtagtggcaggattgtacaaaagcttagaattagagtggtatcaaatggaatgatatatgagagataaattttagttatataaacgtttgcatgagaaccattagtttatatgtagcaatattcttcctaactaagtattatgaatatatatgttatggagacaatttaaaatttgaatattatgaacgtttaccattaagataatggacctagcaaataaagtagttagagaaattagcaaatagattaatatagttgttccaatatatacattttctaagaatttaaaatttataagtaaagtaaaagaagataataataaatatgattagttgtgagactgattaagctataggtttgacctattctcttgagacaaatgaaggccaacgtggccaaacgctagtaatgggtcattattatataatataacttagtatagtgaggtattgtattaatggatattagtagtagtcacttgtagaataggccctgatcgtgtggca

SEQ ID NO: 296893 - DNA, 1922 bp, Cannabis indica
tttatctccatctagccttctgttaagttttcatgaagttcacttgtgaatcaaattattttggaaaattttagctgactgaatctttgtactaactccggttatttttcaagattatcaaaggaaaaaatagttctttttttacatcaagcactaatcttacaagtggtatgtcaggtggaagctgtcatacatttcgaggatgacacagaagaactgcagcgatgggatcaacaggtaatagttcatttttctctcatacatttcattgctgttttcttcttcgtcttcatgatttttgcatcttcatttggtttataagtttcttataccacaaatatctttacatatgaaccagatagctgggctgtgtcaagccgtcaatgatgtcttggacagcatggcaaagaagggattgccgattccagtttgatctgctgcatctccattcatgcttgaaaagtttcttgtcagccggttttggcactgtaaggatttttatgatcattgtcactgtatattatgttactggacactgcctagcaaagcagtgtttcctttaatttgaaagaatacttttggtaatcttttcttcttcaatcgatacatttttcatttgttctttgtcagcttccttatctggtggtagggtggtggtgttttccctatgcttgtcctttcatttagttattatcagtatattaattattaaatataatttgtataaactattttgttagtttgcaagccgattgagctactgagttggcggtgcttgtctttacaaagagcagggtcgcctagagctagggggtcttccattttctattgcttttacttctgctaattattaagctggccctgcataaatatatatatagctagtttatgatcgtaaatgtgttaacgtgatgatttaaaaacatccagtttcactcattcaaaaagctctgtatcttctttcttctactgtcaaggaaaaaatcccaatacacagtaatattgttatattttttaagcaaatccgatatattgtataaactccacttcttttcctagtgggaatggaagtttgattgattgtgaaaactcataaaataagttaataaccaataggtgtacggcgatggacgcaatcaatgttagagcaatagattttaagggtgaaaaaattgcaattaccagggaagtatgtcgtaatttaatatggggagcgaaaaagaaaatgacttcgttttcttgctctctagttgaaaaatgatattaacatggcaattttgttgatgacctgcagtaatatgatttttttttttccttgcacgcctagcagcccgaatctggcaacatgcgcattgtgcagtttttgagcttgctgctcgtgtatgtgagccaggcgtcgagcacctcaacatgatgcacgaacccgttgcttgcagtatgctgcttgcatttctactttatgttgcttgtgctgttcatggtcagcattgaccaccacaatcttcacattgctcatttaatagttttacatctgaactgcaacaatcttcaaaaaaacaaagcttttaggtcaacaggttaatgcgcacaaagttcttaggtcaattgcatggtcccaagagttgggggagcttattgtacaatataaaaacttaactagctcaacaattaataggacttttcttcatattgctcgtgtggatgaacttataatggcatgtttactaataagtaatgggaatcaatagtaaagtaatcattcccttacatacattattaaaattaggaaagggagaacttgattgaataaaggagaaaagaaagggagaacttctcctaccaattttataaggaatgccattaagggtaatgaattttaattattttttattttattttttaatattaaatatataatgaca

SEQ ID NO: 296894 - DNA, 5261 bp, Cannabis indica
aatagtttggtaaattgtaatctgaccatatatagaacatcaaccaattaattttaattcaatgaatataaaataggctaattagctaacttttttcccccgaactttgacatgtacttaatcgtgccccctgaactttttggtacgttaaaaattccccctaaactattaagattgttagatttaaggacttttatctaattttagtaaaaaaattctaacatagatgaaagtttaggaggcatgatttagtacatatcaaagtttgatgggcatgatttggtagatatcaaagtatggagagcatggtttagtacataaacaatcactgaaacagtaaaattgaatgaaattagacaaaagtccttaaatctaacaatctcaatagttcaagggtaatttttaacagtctaaaaaagttcaggggacataatttggtatatatcaaaggtttggggagaaaattgctaattagcctataaaatattcattgcattatatacacgtatataattatttaaatttatctcttaaacccaacgttcctcattacataataaccatatgaatcgtagcaataggtcctcgttatatgtcgagtattatcttctatgtattatgatatgtttattatataaccatgtactttgtatggcaatgtacttaagcgaataagccttaaaccttatgtttattatgatcctcttacgataattttctcaaataaaattaaggtgcacgtaaatgtgagaaaatattcaaaaataattttagttgtacaaccaaaaattacatagggataactgaatattttatcattacttgcaagtaatatattatttatatataaaataaatattactcttactgaatttctggtatataattatttccataatgctcttttcaaacttaaagaaaagataacgtaataaaaatatcatttgtaagatgtttattttaatctatagatatacttcttaagcttgcatatatgttcaccactattaatttgcaaaagatatttatattgtctgtatatcttctcttttagttcattgtttgaaaattataaatgcgccctgctagcttggcaagcaaagcttgattaaaaagatgaaggttatgaaaccccattcctccctcatttttatgtttacaaagatgaacctaagtgcaccaatgtatcttctaacatcagaaccaccccaccaaaaaatagcgcacgtcctatagatatcattgatgaaattctttttttaatagaaaattatcattttattaaccaccaaactcaactaccaaactgagtaacaaatcaattggaacaaactcgaatttaaaaatacaatcaggataaaataaggaagctctagcaaaattatgagtcaccttattagctgatcgtttaatagaaaagaccgaaatatttcttaattttcaataaagccgtacaaacattaaccatttgaccaaacatagaaattataacaactgaactatgcaaggcatgtatgacaaataaacaatcggtttcaaggatatcatggtgtggctgattcttctggatccaactcaaagttttcctgacctccaatgcttcaacaaattcaggtgtaacagaaccattaaaaagtttggtaccaccttctaaaagcataccttgtgcatttcgaaccacaaaacctaccccatattgatgaaattcttagataactatgtctaaatgtaaagaattttttggtcaatttagttttcaaaatattattaatttattttatatatttaatgaaaattatatattaattttcttgtgtgtaaatgctttttatggctgttgtgtattcttaggagctgtgtttcttaagagttaagagagaagaaattctcttaaatagaagatttgaataaatagtatttatatagtttaattgattctgattaatattttcagtattagcaaatttcgtgatcctttcatgataggaaataaaattaaatttatgaacttgattttatatggaaagtttggaagaacttgtcggtgttgtcactgcagattgtacttatgtcgttgcaaattatggtttaaaatgaaattcaaaatcctatttataccatacaattttggaaagtacaatgtttatttaatcatttaagaaaatattaatttaatcagtaacttttataaaattaaagatttaaaataatattaattattattactatgtaattggaagagggttggttgtcagtataaatgagactatttcctttacgagacctattaagttttttcttaatgaaaaattatatatatgtaatgtgtaacacactaatgtaatgttcatatacactaattttattttatattatacacgtgtaatttgtaatgattagatcaagtgatgtctggtacagattacagagtcatataaatatactgacaaaatagccaaataaaggaaaagggtgtgtaggtgaggtgaggtgtaaccatgcaagtcaataaaattatattaattaattattaattattcatattcttaagcccgcggattaatacgttggaccagaaaaacaaaattaatcgcgtgcagaaagtggaaggaaacttgtctcaaccgcaagctgtattattaaatactcatatactaactcctataaagttttgaccaaaacacacaacacaaccctatctatacctctctttcttcctctcatcctctctcatttccaaatttgaaatcatcacctcatcatatacatatacatatatataggggttaatatttgagagaccaaacaaacaaaaaaaagattttgtgtaagatggagaaacaagcaaaataccaagacaagatattgaagttcttgcccagagcagcttctgtgatcacttttcagaacccaccgtttagtccaaacagagataataggatgatgagatctgagaacgcaagtaagcagctaaagctggctcatggaagaggattttcaggcccaataatctccatgattcatgacgaggctcgaagaaagcccaagaatggtgatgagacccaagatcaagacccaacttcgcccaaaatctcgtgtatgggtcaaatcaagcagagcagtaagaagaagaagaagaacaagtgtgaaaaggttaataataatgttgttatgaacaacaacaaacgagtttcgtcggtggttcatcaggaagctaaaccggtcacgcggtcaccacgtgaggtgaagaagcaggcgtcggccattaagaggatctttatgagtagtagtagtagtagaaaatctaataatgcttctgttgatgataaatcaacgcttcctgatagagctccttctttgagtcaaatgaagcgattcgctagtgggcgaagtgatctgatcctttttcgaattttgattgggcggcggctcaggttacaccactggactcggatcaccggaatatttgctattccgatcacgaaggaggtagtgatcaagacgatgaagatgaagagataaggattccgttctcggcccctatggtggttggtgaaggagtggctttacagccaaggaaggaaattaatctatggaaaagaagaaccatggctcctcctaggcctcttgagatcagagcaaattaattaattaataaattcattttctttttcttctcattttggaagtctacttttgtctatatcatgaatttgttatgaaaatgtaataataggatttgttggcatgtaataatgcttacttaattatatacattttatataatatataatattatttttttttgataaatttaaaataatttataatatagaaaatagagtttaaataatttatttgaaagatatattaaataaaacaaatacaatttgaatattactttctacacaaattaaaaaaaaaaattaagccacgaggctttcctctatgctaggattttgcctcattctctcttagtttcttttagggtttctcatactcctatgggtgccattggccaaatcgggattcgtggtgcctgggtgccttgcctcatttcgttcttgtgcaaagtcgaaggtctcagtagacgggggatcatggttggaaggtgagtgttggtgtcgagtctcgctccttggagccaattttgtcatccttagcttttcaggcgagtggctgtcgttctcggtggttgagcgtctctggtgagatgtctatcatccttggccagaccgaccatttgagccgcgagacagcgacaatggtggacttttggcggccctctttctctcgtttttgggattggcattttgcgaaggtcttttttcaggtgtgtgcttcgggtgtggtggggtgctgctctttcttttatttagttcttgaaatactttcttgggttacttttcaagcgtctttgccccagcacacaatggctcgtaatgagctttcagagttttgtagatgtagaagggggattggggtttacccaaagggatgtgaattccttatcccatcaccttcaccatttgaaaccattataggaggccaagcatggatgtttcttgtcagaagatggcaatgctctggtgcttgtggtttgcctgtctcgcgtttgcgtttttcctcctgtgtgttagggggatggttgttgaaactgttctatctttattgttgtttgtatattttgagttttttagttagtttgagttgtttcaatgttaggcaccttttatccgtactgggccttttttagagtgtttgtccctttttatgctctagtgtgagccttgagcttaatgctcctttcgaatagttggccgacagttgttatcttttagtgacattgtggtttatccgttggacttgtaggacttttaccctttgatcaatcttaaatgaagcttccatttcaagaaaattaaaaatttacattcttaaatttctataatttgtgctatcatatatttatataagaaaattttcagttaggatcccaaaaaaatcccccacgtataagaccttttctttggcaaatcttaaattgtgacaccaactttcttaaataggcgcgaagcacctgattgttaaaattcagaatgaaagtggctaagatgaatctcaaaatcaattggttatgagaagagtagctcattcatcttatatatgacaatttatttgtacacattagcaatgtgtgactaactctaataaaccctcttcacatttgggcctgaaaagtgtgggtataacgaacgacc

SEQ ID NO: 296895 - DNA, 2145 bp, Cannabis indica
tagtgttatcaaaattcaatgtatacatgtgttgtgggaactattaattcaacttttatttgagttttttttttttttagatttataccaattacttagtcctttaatgtcatttcactttattatatgtaaaaagaataatttttatatttataactttattgaaaagaaaagtactgacaattaaaaaaaaagtttcaattactacaagagcactatatgtattgtgatcccttggtacgttgtgcatgatttgaagttatcttataaaatatttaaagtgtacttattctaatcaaacaccactatatatataaattgtgataattatttaattaaatattattttaattatatatatgtacatgttcaacaccgacattaattatctttgttatactttgatgagatgaagatgaataaatatattctggtaattaaatcatataaagatgaataacatataatatggtatatatgattgcagccttgaaaaatattaattgtattgttgaccttaaaataaatatatatggtcttgttgattagactaaatgacaagattttatttgtttatttacaagtttatattattttagactcatgtttaattagcttataaattagattttttgtttagttaatattcaatgataaaataattttttttatataaaatagtataaataggatactaatcttaatttttaatataaataacttgaaaatttttaaggagaaaaatatgaaaggaaactatttttttttcttcataaatttgagtaagagattcttttttttttcatatatatataaatttttttaatttttctaataaatttattagtagagaattctcaatcgattaattcaattcaaacaagaaaatggaatccaatgattttttttttttttttaatttccctttaaatctaaggtccaaacaaagcctaaaataattttaaattaattaagaaagtattggcatttggcatgatacccttttgatgagcatgattataatattcttttccaaaagatttggattcaatatttgtgcatatatattatattattaaatatgtaatcttgctaaaggttggtggaattaatagatgctagattaaactttttttttttctaataaaatataagaataaaataaaggataatagtgctcactaatttatatgtacaatatcaacaattacaagaaaactcacaaaatttaaaatagatcccatatatgtagggtggtgtgtttcccatttttcattttaattatttattttttaatttttggaaaaattctttattaattccattttgtatatttataataaatctaaaaactaaattaagcctccttaattttttatttttcttgagtaaaatttctagctctccctcactactataagacctaaaatcattaaaatcattgaagtattttatgtttgtaacatacacattccacacatagtggtagacctagatgaaaacaagtgggtttttcttttttttttttttaaaaattaataataataataataataagataatgatatgtctatgtttacaatttacactacaaaaagtttcatttagtcacaataaaatttgtgacttaaagtgaaaaagttgtgactaattataaatcataataaaaaattcgtagttaaaggtatatattaattagtcacaaaagttataatttattgtaatgactaaatgtatttttaatcacaatacttattgttactaaaactaaattagtgacaacttgacttgtatctaaatacttttacaagttattttttattgtgactaaaagtcacatttaatcacaaaaaatttatgtcgtgattaaaaattattactaaaggtagcgttgtattttgtagtgttagtctattttacgtaaatttttaaatttataatgttcctattttaatataaaaaaatttctagtcttttaaattttttaccttttcaccacacatacacatttttagtattttattcattcatttaacactttccattccatatgtatacaacctatataatacactttcttgttaagaaaaaaatttacaaatttaaactaatactcattatttctcttccatgaatcgtgggatc

SEQ ID NO: 296896 - DNA, 3308 bp, Cannabis indica
tgcctaaaacacataaatttaacacgaaacgaaaacttatctataagaaaagaaaaaatttaactaagtgggagttggttggtggtttaacttccacaacgaacaaaacgaaactggctgacctttccaccataaccccacaaacccatctttctcttccactctcatttcccaattactgtcgtactttctcagaagagctctacctccatcaatggcttcctctccaaaactctctcccataaaccccgctcctctcattctctcacaccatttctctttcccttcattcatctcacccctgtttgtcaaacccttcgcagcttctccttccattaatcttctctcctcgctctctcgccctttgaatgcgctgctggtcgactccagaaaccgccataagtactccactttccgagaaaacccgcaggcgaagtttccgcagttactgcagctacattccgtgttgttctcgcttagtataatccctttgggctccatttttcttaatgttttcaaaaactctgttctctcatttggggtgttgtggtttaggtggtggagtctgaattgggcacagatgattagagtctcgtcctctgaggagtttatgatctgggcatttagattctgtaatggttgattgtccaatcggttgatctctaaatttatgttgatggatttttgcataaatgagaagccgagttgagaaattgtcacctggtggacctttttgagaatgccgtgtcgttattttggtcagtgccggcgattattgtaatgcgaacaagcggaggaggaccacctaatcttcgggacaaggcttccagaagtattggccattgaatcccatgtgataccccaatatcaagaatgtgcagactacgtgttcgatcattttcctcattgagaagttggaggatacaagagtttgtaatgttgttagggaaggcaaaccaaggactaacctctgaaaatttgatcagagatttctgaaagaatcgcggttctgctgtagagaaggtaacacaccccgccgccggggctgagacagaaggggaggaggataagtggtgagtcagtgcccgcaggccgtgaaaggcgagcctatggttggcatctcctgtgagagaagcaagctcgtgtagaacataaagaaggtgttgtacgcgcatgcaatttccttcagtgattgcagtggcacaaggattgagcagctgctctgcccatctaccttccttgttattacagttattatttcccgcacccttacctgaattcctcttgttcccaactgttttccttactgcaaccacttcttcaacagctgtgtctccatcctcaacctggtttgtctgccggccttggttttttcgcggattatgatggttttgagacgttttaggaattgggccatcagctgtttttcgtttttttgaggaattgggaagaggaaggagattggaaatggtggaatcaggagggctagtggtggtggtgatgatagtggcagtggcagttacagttgcagtggtgggagggctataaacggaagtgtttatggtatgaagtagatcgtggccaataatatcttgtctttcatcccaccatggatagccactgatctcagcagattgatatggatcatctaagaaagagggaaggaatgaaactgaatcttcaagccagtccatgatttgatctgaggtgtggtttgtcttgggctcttcttaacttgtcatactacttaaggagaagaattagaatatctatttagggatgatgtatgaagaggaattagcaatggttgatgttgatggctaaagaggatagagaagaagaaacagacttggtcaagaaattattaaacaagtcgaaaagggacaaagaatggcattattccatatgttggtgtgctgttggtttggaggatgtgatgtttttatttaggaagtaaggaagagtgtcgtttccttgtttttggggttgtcaatagattcctttgtataccttgttaggttgagaattgagagagagaaagagatccaccaatgaggagtggacagagggaacttatctggaaattaaagattgtttagtaatgtaatgaatgggttgaagttaaattgtcaagagacggcagacaagctctctctctctctcatcatataatatatagggtactaaatagtggggcttgccaatctttccgtaccagtgaggaagttttgtgtacctttgatttaatatttgatggttgagaatgaatcgtgtgttagttgataatatgaaactcaccgcattgcataatttactaaatatataacaatgttttatttttactgaaaaatctcgacaatttttattatatttttaagacaaaaaaaaaaaaaaaaaactttgatgttaatattttagaaatttctttctaaagagtctttttggtagattttttttatcagtttcagcatagtttagtcaattacttatcacacatataagaattttttaaaaatttacaacgatgttaaacaactataacgtatacgatcataaaaaaaaataaattaaaattttttcctatataccgaaacaaatagaaaatttatcgaaatactcttttagcgggtgtactgtaaacatagccaaatatttttataacaatatagaattaaaaaaatttacattagtaactttcaacttatatctaaaaagatatattaaacttagaaattttttatagtagatccctataaaggatcgttttagtagattttttatctattttagtagcctgaaattttttttagtttaatcttttttatgatcgtgtatgttgtaactatttagaatcatttgtaaatttttagaaattctaagtattttatagtaccaaaaattaaatttaaacaactacttactagtttaagagaaaataattatgtgtacaacaaaatatataaatcttatattcgtcattgtaaattatttaaaatttttgaaaattcacaagggttcctaaataactattgtgtatacgattataaaaaaattgactattttttttatgtcgaaacagttagggagtctactgaaataccctgccagtgaggtgtactaaagacttaaccttaaacttattaacaatcttattaacaatatcaacagtgtgtacgcgtcttttcaagaaaaaaaaaattagtgtttatatttgctcaattatttaaataataatttataattaaatatttttctagtgttctaatatttaactattgggtatcagttttactcaaaaaaaaaaaaaa

SEQ ID NO: 296897 - DNA, 3723 bp, Cannabis indica
tcaagaggtactctatactctatactacaattattattactattttttataatcatttacttagttattatatataaataaatgatctattttttattaattataatatcttcgtttctttttttttgtcattactagaatcttggcgaacagacaatctgcacagagatcacgggtcagaaaagctacagtacatctcagagcttgaacgcagtgttacttccttgcaagtatgtttaattagtattattatcatgaccattaataattataattttaattatataaaattaacatcatatatattaacttgcgagcaaaattatacttttgttccgttcaaacatgttattaatttgtcgatcgagatttgagtgtatattcataatttgcatgataatgtaggctgaagtttcagtgctttcaccgcgagttgcgtttttggatcatcaacgcttgcttcttaatgttgacaacagtgctcttaagcaaagaatcgcggctttggctcaggataagattttcaaagatggttagtactgcttattataattccttaattaattataattaatttttaattaggattcatggtcatcactatcttattaattattcatttattcgatattgatctatacatgaaactaataataatttagctggtatttggtgaaaagttttattgatcttctcaattatttagttcaattttatatcattttttgctgaagtagtttatctccacatgaatcgatcatatagaattgcttctcatcaaattaaatttagttgaatatatgttagcatgaatcatttcatagatgcattgctctgtcttcgttagtgtattggttatgattagagatagagaaatattaacaataagaatttttgtttattggttatgactaataagagagagaaaaatatcaagtgactcaaacctcaaccaacccaaatgattaatctagctacccaatgaaatctaataaattttgggaccatattacactatctcccttgtcttttactgatgttgataccacaaagtttttagcttcaaaaacttcattttttctttatctaccaacattcaatgcactaaaggtcttataaggtcaatcacatggtagctcaagagtgtgaaactgaaaaaagagaaaggtttcatgtgagatcagctcttcttgtactctctatttatatatgtatgtgactacacactgttccttaattaatgaaaaatataaccattttgaagtggcatgggaaccccattacagcactactctgcaaaccaaataaatttctataaatggtatctaaactgtaacaaattaagctagctaggtatgtacatcgatggagatcgatcttgttaagctttgtacataatttacaatacttttattattggaagctaggaatcaaaagaaagttgataattgatgggatataaatgaatttaaacatgtcatacaaacatgtgtgtgcccatatgtgtccttgtttagacagtgtcacgtctgagacatgtgcacttatgaaaatgtgggttgtcacaatttttatatgttataaatatttatatatatatatatgatatcacgtttgtacatgtgttaattatatatacaatatattattttttttttctcttaataacacatttatatatgtttatgtaatgcagctcatcaagaagcactaaagagagaaatagagagattgaggcaagtatatcaccaacaaaatatgaacaagatggaaaataataatgttggtcaatcaccatcatcaatgggagacactactaaatcttcaattgataaaaatgatcagcagcttctcaatgtttcttcctaactgtattattattattattattatggtcaaaactcaaaagctgcgttatggataagttagaaaacttttatatactataaaagtggggttgggaaaagtggaagtaagtgatcatcaatttcgatgattttttagtaaaagtatatactactactactactactgcaacaaacaacaagtgtttgattcagaagaattgcttattattagccagtttttctgatctgatctatgtggagaaagagaaagagttgaaagtgtaccttacctaatcagacaccaagaagagacacatgaacttgggtgctcactgctgttgacctgtgccctcacgtgatgtgttttcaccttttatgaagggaccacttggtgattacatgattggcttgcaggaaagaacatgtgcatgtagtagtagtagtagttgtggttttttttttaattattaaagaaattattattaagaaaagaaaaaaaaagattgtctttgttagctagctacagctttaactgattaggggggaggggtgtggttgattcttttaatttatatatatttatttttctttcctttttctttgcacattgattctttaatttgtattttgtatgaattggcaaagggtataagagagtagtgggtttgtgttgggatgaacaaaaggaaaaagattgtcagtgaagtgatctttgctaatttgatatattcggatttattgtactttttccagtttattattgttccttgggtttagttgtaacttatttctttggcttgttattaattagagaaaaaaaaaaatcatgaatgtgaaagtgtaaatatacaagaatgatatttcaatgtatctggagaaaaagttgattttgtttagtgctatttgttttcaccaatttttaaacttaattttccttctttttgtttagtgctatttaattaaaatttcattcaagttaaaaaaatattccttctcccaagttcccaacaatatggcatctccaattaaagatcacatccacgaaaattaccaatacaacctactactattagtactacgtacaccaatatgataaaaagaaagcagcaaccaataattagaattgatgaaatagcaataaatgatgcagaagataagatcattgccaggggtataatttaaagtaaatttagcttaaaaaataaactaatactatatttggtctgaattttataatagtgtttcaatataaaattcagtattttaatagtataaatttaatatttaattatttaattaaatacgatataataaatttaatgtcgaaatatgtagctacaaattaaaaaatcagtaaaactacacaaaggtttatacggggtattaataatctttatagattgtattattagtttacgaggtcacgaggtcatgtttaaagataagactcattagtaatatctcaaaaatacaaagtttttgacttatacacataaatagacttctttgtatgttgcaagctcaatgtattccaccttcacaaatgaacctatctgaaccttcacgaactcaaactcctttcgatctgcttgaactgtgctttcttccaaggtaagacttaaaccatcttctcccaaaggcttgaaaaaccttcttgaagttgttcttttcatttgtagacttgtttgaacactcaatacaattaaaaagacataaagatagaggtagagttgaacacactcacctctacaaaataaatacacttttttatgaaaatatgaatgaaataccaaagagataaaagcgataacttagagcatgtttggtattgttttttattttttgttttaaaaaattgtttttagaaatgagaaca

SEQ ID NO: 296898 - DNA, 5266 bp, Cannabis indica
ctaatatcttcttttcttattgttgagtgggatacatggataactttctggacagtgttatacagtttttaacattaaggacaataatataaggcatactctttctcaacatggataactatgtgagtgacatttgtggttgtacagtgaaagtttttgagctagatttagtcacatatatacaattgttttataatacagcaccctttttatttgtcactaagtaatacagtcattaaacaatcctgaggataaataaaaataggaaaaccaggaaacttgaaatgggataaaaatattaccatagcaaaccaggaaaaccaggaaacatgaataagaggttcggttcaaaatttactttttgcaactcgtttctgcatgtaagatttaaagttctgttacgttatatgaactttcaaaccatgaattgcgaaagaaatatgcaatagtagtcaagctttccaaaaatcctgctgtcttctaaaatgtagatgtttagatttggaattatattatacgaagaaaaaattaggctgcaattaaataccatgaagtcttaaaagagatttaacgcataatgttgacagggaaaaagttatttatttatttttttcaagaaatgtagggaatgatatatttataatgaaaagcaatgacaaaaaaatggcaaggcatagccttttaaatataatgacaaccaaccaagtatcacaatggccaatgaaggctgaaataactaatttttgggatctttagtatcaatcttcccaagagcaacccaaatttaatccatccttaaagaatatcatataaagcttccattgtgccttaccagccacagaaacatcaacacaacgaataatacaaacacgccgaagtttttttcaagttctttaggtacttggggttttgggctttctttttactatggcagtgtctaaacctgtaatttgaaagaaaaaggaacttcttagtttttaccaattatgttgattggctctgagacttgtaacaggctaaattgctgtaaattttgtctatgtaattatttatataatttcacaatgatttttcatgggcatgtggaaattttgaatcacatgagttttgtgaatatattgctaatattggggatattttttgtatcatggagagagtttgattaaagaaaatggactgagttcatggatggaacatgcatataatagtcaataggatctggagggtgtcaaaagttttatggtgaacaattttcctgatattttcttgcattgaacaagcaggctgctgctgctgtggatttcaaagatcaagctggagaacaacaaacaatgcaacagaatctccataatatatgtctgaaaacaggagcacctatggagtctcatgctgcttcaatcctaactcctcatgccttttctaagctccaagaacaacttgttttggctgcccactatgcgtcttttcagatggaagatggctttcttgttagacatcatacaaaagctgatggaggacgcaaagtttattgggttccccgggaaggcatcataagttgcaggtgccatcattttgagttttctggaattctttgtcgacacgctcttcgagttctctcaaccggaaattgctttcagattcctgatagatatcttccggaccggtggcgccggatcagtacaccattaaaacttattcagaatgctccaagtgaccacggggaaaaagttcagtttttgcaaagtttggtatctactcttgtaacagaatcagccaagtctaaggagagattagacatggcaactgaacaagtgtcgattctcttgtctcaggtaagagaacagccagtttcattgcaaactacaagagagataccatcattccataggaatatttgatgtgatacgatatatatttcaagcaactagaatagtcacatatataattttttcttttgttgaaattagatcatgctatgatctggtaaaggaagcaactagaataggaacatgctaatgggacagaaaatgtgttagttctgggagctggcatgtggactgaagtttttgcatggcatttttgtagtttatatatgagaaaattcctagtctttttttttatccgataacataacatttaacttgtcatattcttatagttataggagattgctttaatgagaaattatacgaaagaaaatatagaaaggaaaggtttgtatgtactatgtatgtatatacgtctgtttttgttccttcttttttttaagtaaaaaaaaaataaaaaattctaaacagtttgttcatgtacccttagaataattaatagttgattaattacttaaaaatgttcttaaaacaaaaaatgatttcaatgaattttaaaataaataatttaatacaaattatttgttagctatatatttgtacataacatttttttttttgtacttggctatttagttaccataagtctaatttttcatttgtatagtttcctaagatagattcttaatttggtatatgtttgtacattacttttcaatgaaagtttaaatatcgttcttctcaatatatcattattctcatctcacataacatgtatcaaaagcaacccttgaaggttttgaaattagagttttgttacaatctttggtttgttttgggtttctgccatagtgtttggggtaaaaaattcatggattaatacttgtcaaatttggaagtgaatattcttcggttcactttgaatccctccaaatattttgctagcactttctttgtttcttccttcgactatctctgttttgattgacgggagccttgggggtttttcatgcaaaaaaattttcagtgctcaagtcagtatagattctggcttagagagataaaatataagaaatctagaatttgaattgagagagataaaatataagaaatctagaatttgaattgagagagagagttcagttgattcaatgaataaccaattgatcaatcaactctttgagcaattaatccttttgaattgagagagagattcagttgattcaatgaataaccaattgatcaatcaactctttgagcaattaatctttttcccataatatttcacgctctttatagtagagttttgttaaaggcagaaaaacgactgagctcgctaaatgtagttgacttagcaataatttgaattttggacccctaactttgcgcttatgccctaactgacttggatgcgtgaatggatgacatcaacatcacacatttttcgttttagaagattgatgatgttagtggaaatagatttccttattctgtcatgaccaggaaaacttagtatgagccaactctcctaggcgtacacggttgggctgtggtatttcgttgttaggctttgggccttttttatttagtaaggcagagttgacttgtctgattggggtggaagctaaagagccaaggacaaatattttatgccacgtgtcagcaccctataatcttgataatggtaaccgtcattcttttgcatgtttgccactcatgtgcattttgagcacgattatcgggatcgagaggaatgtgattaggcatgccatacatgttgagatttttcttttgatatcacgtttttagttaccttatttatattttgaggaaacatcaactttctgtttactgttaggaaaatttctatttcttgcttttcttccctttcttcctaaaatttcaagttgctatttttttctttcatttgcaaaggctccagacatgtttgcatcagcgagtcttgaggaatttaagcgagctcgactggagggtcacaaaccgttgtgccccaaatgagattatactcaaccctcatcacattgaatttatgagtttttttgattcaccccatagtgattcttgtcgccttcatcagtaatgtgcatatcgaccaactcactttcaattctatttgtgccattgttggaaccttcatcatgggagcctaaaagggctgtcaatatcttccatggacatattctcgtactttaggaagaatgtaaataatataagtgctagtcattcttggcactcatataatacttctaacaagcatgacttgaacataattgatggcttcaacaaaatgcaatagcaatgtggactcatcactttaaagtgaggggaactggtacctaagtcgccttcccaaggatttgttcccttgtctaacaaactttttctcaacgtaagtagttcttgaatatttcttgtagtgtttatcaaatttataacaatactcattctttgattattgcattggacatcgtcttgcctaatgtcaagcaacttgatgatcaccttcaacatcacatagtcagtagccttatttctaagaacaaagaggactcttggctatgtgtagtgttaacctgaaaacttttcttggtgatgtggacattaatgtttgacacatggcaataaagataacatctcaaagttgagtagtcccgagtcacagcggtcgacttgggaggggtccctagccctatgcctaagttgactctaggaactctatgatgggtgttcggattccgataagttgattctaactcattatctttcagtattatgtatcatgaagacataaaatatccaaaaccaggtcccgggagctgaaaatacacgaattagcacctcaaaaaccagtgcccaagttgacaaccccagctagggtttcagtttttggatcgtcctaatgaaaatgggtcaaactttgcattgagacatgagatagacatactgcgaacatatttgaggcatcataattaggttcaaagaactttcatttttgagcactcagagcatccgctgcccgggcacctagcgcccaagttgacaatctgtcaacctaggccacttccaagcatcatatcaaaaatatgactcatgcatcttcttcgtcatcataaaaaatgggaaaacaagtgatttcaaggaagaaacaacccaacatgggtgccacaataagggaccagcgcccatgttgacacctggagctggtccagcgcccacattgacattttgtcaatttgggccgattctgaggagtttttctaaaatttatttcagacatattctcagttttcatctcggttttcatcaaagattaagattcaaatatttccgaggaccaaacggaacttccaggtggcgtaaaattggacccagctccaaggttgacatattgtcaacctgggttgtttccaatcagtttt

SEQ ID NO: 296899 - DNA, 2236 bp, Cannabis indica
agagaaagatataagaggagtgctcttaattttttttctaaaatagagaaagagtgttaaaaacagtttgaaagtaaaagaatcatattttaataaaggttaaaagaaattaattaagattttttttataaaatttgattaattaaagaagaatagtataaaatagtttgagtgtgaatagtaagaaaatggaaaagagaaaaaaaaatataataagtatatgcttattatatgtacaatcatcaattgtacatatcaattctaagtaatgggtacttgttcttgatcgtcagcttgtcaatactcactaatcagtacacattcaaacggattcgtccttctttttcacaaacaaaattggagctctgttgccctgggtcgggtaaatcctagatccagcatcccctgaagttgcattttcatctccttgagttctgccagagccatctgatacagtgcctttgaaatttctccaggttccaagtcaatgacgaaatcaattgtctgctgcagcggtaatcctgataactccttggaaaatgcatctaagaattcttttactatactgacatatccattagcccaaatattttgagtttgctgaagtcaatcccaactgataggaaccctcaacctgcagtaggttcctaatcttcaataccaaaatgatcagtaatctaatccaaacctgattccacaaaacccaaaggttctctattatctaaccaagaagtcaactcattctcttctgattcaaagtaactgcgtacttaagcgagaaatccatctcaaaataataccacgctttgttaaactaactcatcaaaatcatcactccctttcctcttcccaacttttaatgagaacaggcctagtctactttttggagataactaattctccactaggtaatagggtctcaaacctaaattataataatcacaaggtctacccagtttattactcactctatctatcgtgtgcgaatgtgtagctccagagtcagataatactaaataagagaaatgtgtagctcctgagtaacgataacctcacaaactggagtgagtataacttctttttttttagttgaggacaagttttatttaaatgaccaataattccacactgaaaacatgacccttctatcactgatcatggacaatccctcttgtaatgtctcattacaccacatcagaaacatgcttttcctttacactcaccttgatgacgtttcttacaactgggacattttggaaaagtattaaggcctttatatccaactcgtaaagctccttaaacttgttttcctcaagactttctatatggtgacttcgtccagtcatcaacaacagaccgtcctaccaaaaatactaaggtagggacaatgggcaccgggaagaagaggtgcaacataagatccctgctgccatatcctctaaatttcctcacctttactttagactttagcttgcatttctacaaacttgcactcccaatcttacaaatttaatgttgaaataacataacttatgccaggagccctccaatagcatatacttctgttgccagggcaacaataattttaatcttccaaccgctactagccttgaccgcattgctctgactttctatattaggcaaggtatccattctataggacaaacctgtcaatttataagttagcctagttaacggtccaagttttaatcttactaccacatacatggaattttaggcaattcactattcagctaccatattactaacatacttcttgttaacgcagatttttattaactaaatatataaactttttttgtaataaatatattacagaattaattgaaataaataaaaaccagatgtttttacgtggctttgtagttaaaatctacatactccacgagtatatcttattatggataataatctagatacagagtacaattatgtcaatgaatataatatatatatatatatatatctttttttctcaaatttaccatccattttaccctaaattttgttcctatttataggtgtatagggtgacagttattttccttagaatctaatcattcataactgttcatgaaatgtggacattccgtacgttttttatgcacatgggataatatttcataaccacccaaccgctctttttctttctccttaaacggttgtgctgactaagtaggttgttcctcactaaatacgagttgtccttctttac

SEQ ID NO: 296900 - DNA, 2522 bp, Cannabis indica
tttaattttaacgtacttaactccactccctgtgggatcgacctcactcctggtgagtctaatacttgaaacgatacgtacacttgcgtgtgctaaatattgcaacaccaaccttccaatttgcccatgattttatcttttaagaacaaaaaatcattcctcttctttgccgagaaaaacaaagggtttcctatatatttctcctttgcctttagattgttgaagcccaaaatccctttgacttcttctctgcaagaactctttgtgttaggagagaaaactactccactcttggcactacttacccgttgtcccaaccaacttttgtatttctcaagacaattcagcaaagcatccgtgttttttgcattagcatgacaaaagaaaatggaatcatccgcataaaacagatgagtaatcggggaagaattccttgccacactaacacctttcaaatcaccattcttttcagctcgtagaataagtttggataaaacgtcactacaaagtatgaacagaaacggcgagagagggtcttcttgacggagaccacgcttgggattgaagggagccaagggcgcaccattaagaagaactgagtacttgaccgaagtgacacactccatcaacaatcacaaaccttgctattaaaaccattcgctttcaaaacccacaagagaaatttccattcaattcggtcaaaagctttattcatatccgtcttaaccgccattaccccatctttacctctctttcctttcatagaatggagaacttcctaggccaccagggaacactccgcaataaatcggccagggatgaaagccgattggaagggagacacaagtcgatcaatgcaccctttgagactatccgtcagaatacgagaaatcactttgtatccatagttgcagagacttataggtctaaattgatcaaaggtatttgcactagcagtcttgggtataaggctaataaacgtctcattgactctctccatcatccgcccagtaaggaagaattgttgcaccatagagcaaaccgattccccaactgtgtcccaatatttcctgaagaagattcttgggaaaccatcaggccccggggctttgagagtgcatcttgaataccacttctttaatctctccaacctcgggcatccgacaaatagcttcattttcactttcagagactttctcaaaaaacaaagtttccaattcatcttctatcacaggattggaagataggaacatttcctgaaaatgatcctgaaagtatttcccaatgttatccctacctcgaatcccttgtcccatatcgccccacacagcgcctacataattacgtcttctcctgatcaaagtggatgcgtgaaagaactttgtattcccatcgccgaatcgaagccaattctcacgggacttttggcgccatatcctgctcatcttctcctccaaatcaattatttccatttgaattgctgcctcttcagaaaccgaagactgatcaataggcctcctttgaattttctccagctgatctcgaaggagtcttagctttttatcacagaaaccaaaaacattttggttccaaaccttcaaatctcttttggttatgtttagctttcgagggagccccaccactctcccgaagtcactatctttcttccaagcatcttcaactactagtctgcaatcttctctcgtagtccagacctcaaagaatcggaatggatagttcagcttcaagttatccccccaaatgtccagcaatataggagcaaggtccgagccaacaatcggataattacgcacacgggcattagaaaaagcagtacaccagtttccatcagcaataactcggtcaaggcgttttcgaattcgtttaccagctagccttgagttttgccaagtgaacattccaccatcactacccaagtctactccaccacagttaaacagaaagttactcaaaagctcgccttccctagcatcgaattggcggccactaaccttctctgtatggttgataattgcattgagatctcccataagagcccaaggctccttacaatcaattactttctccgtgagccaattccgaaattcgcgtttagaagcaccataaggagtaccataaatacaaaatagcttcaattctggacatcccataacagcttgaaacgagacaagaaatcctgtctcataagtattcaccacattacatagcaccccgactctccaagctatacaaaagcccccagctaagccattggccgggatacaccactgattcaaaaaccccaggcgattcatcacattaaccatggtgtccacatccactttagtttctgaaagaaagatgaaatctacatttgaatcacggattaatccccaaagggtcctttctgtcgtggatcgtcgtaatccacgacagttctaagataagcaccacatgaggacggtggtgttggaattattttactagaatctagatttactaccaagtatgtttcattaaca

SEQ ID NO: 296901 - DNA, 1662 bp, Cannabis indica
gaagtagtggggcaggaagcatggaaaaataaaccttgcccaggagtaagctttagatatattgtaagattcgatttgcagcatgcatatgaggttgccgtggggcttggaggaattggcttaatttgttgacagcaaagcttatatcaggtctagtgattgtgagatataagagtttgcctattaaacttctgtattgagtgggattagttaagagaataccatcatcattgctgagctttatgttaggttccataggagtggtggctggtttggaaccaagacagccggagtcttgtagtaattgaagggtaaagggcctttgagtaacggatatgcctttggggcatctagcaatttcaaggccaagaaagaagtggaggttgccgaggtccttcagtttgaactgtgcatctagtgatgaaatgaaggtgttcatggctgtgatgttgtttgtagcaactatgatatcatctacatagatgagtaatgcaaggaaggtgtcattgtgatgtctaatgaacaatgaatgatcagtttgggattgttggaaaccttgttgaaggagggtagtgcttagtttggcataccattgtctagatgcttggtttaagccatatagacttttctttaacttgcaaactgcatttttagggagatctcctttgggagtatatccttgtggtaatttcgtataaatttcttcatgtaattctccatgaaaaaaggcattatttatgtccatatggtgtaaatgccaatttttcattgcagcaagagcaaggagtaattttagagtattgaatttggccacaggggcacaggttttaaagtaatcgataccaggttgttggttgtatcctttggcgacaagtctggctttacatctttgtaatgagccatcggggtttaatttctttttgtaaacccatttatttccaatggcatgatggccatcaggtaagggaacaacaatccatgagtcattagtttccaaagcatctatttcatcatccatagctctattccaaattgcaagaagtttggcttcagcataggttcgtggttcaggaaactgtgctgcagtgagaatggcagcaataaatttggagctgaaccgatgataagagagaaatttagagagagggtgatctgtggttgatgaagtagtagtgatgactcccggacaaggtgttccttatgataatttgccaagaacacaaggaagaggatctggccgcggttcatcatcgaactcaaggctcatctgtcaagtttgcatgaaatcaggccattcagtagctgtttgtcactataggtttgacaaaaattgggttacacccaaaccaactttcccaaatccaagagcctatctcactgaatgtgacactgaatcagaccctcataatcccactgttcttcccgattttggtgatgatttgtcttggtttgctgatacaggggcaacaaattatatcaccaacacactcgacactcttgatgctgctgtagcctatgcaggaccagaaactttagcagttgcagatggtaagaaaatctgtatctcacacaggttctgctactttaaattccctcaataacttgaccctactaaaacttgaattctgttcttcaaattccatctattaaaagaacttggtt

SEQ ID NO: 296902 - DNA, 1223 bp, Cannabis indica
cggacttccttactgccgaattgggtaacaatcctagcttcgtttggcgaagcatttggagttctcaagagttgttgcgttctggaattcgaagaactattggttctggtacgagtgttaacattcttcatcatccgtggctccccaatttgaagaatccttatgtatcgatgcaccatcctgggttagtaaataaatatgttgattctctctttctaaccgatactcgagcaggggatgcagatattgttagagatatgtttaatgtctcagatgttgctgcaattctaggaattcctctcagtcaaaatgcaagccgtgactcttggtcctagatgtatgagaacactgatgagttttcggtaaagagtgcatataatcttctccaacagtagaaaaaatctcagctacctaatgttgtttcaagtttatgggaccatctttggggcctgcgtataccacctaaagttaaaaatttcttgtggagggctgccacaaacaatatccccacttgtgtgaaccttgttattaaacatgttgaagtgtctactgtatgccctgtgtgtaaaactcagcctgaaataacagctcatgcactcattttctacaattttgttctcgccttttggaggaaggtcagagtttcaattgtcttcgatcctggaggccatttttgcagctggttggagcttctttttgccacggccattgcagaacaagtaaataaagttgctatggtctgctggacactttggaaagctaggaacaatacggtttggaaagaaaaaaagacctctatttcgaaagttattgtatcagccatggttgcacttgatcattggaggaaagctcaggacaaaatctcactatcatcgttatgtcttaacaacaaggatgatggggctgagcgttggtctaaacctgatatgaataaaatcaagttaaatgtggatgcagcactttttgaaagagatgagcaatatggctttggtattgtggctcaagatcattttggcaattgcttagaggcacgggcaggctcttttggaggagttcattctgctgcagtcataaaagctttgggtatcaaagaggcacttagttggatcaaagctaaaaattggaaccatgttgtgattgagacagatagtttagtcacggtccaagcgattcgaagcactcaatcaatggggtctacttttggtttgattattcaggactgt

SEQ ID NO: 296903 - DNA, 3430 bp, Cannabis indica
tactcatttaaactaaatgaaaaattaattagctcgattgggttgtaatttgattgatcaattattattttgattaaatcgatttatgtacattttattgctatcacaatatactacatcgtgttaaacaccttaaaataattaatagcaatgctcgaattaaaatgagacaaaatttaaagggcaaaatcaaaataatagcaaaattttacaaaagggcaaaatcgtaatttcacataccatcatcatcttctataaacctcaatttttcgacgaccttcagatcgtgccatttccatctctctactttctctctctaaaaaacctctctttctctctctaacctcttcgccggagaaatggatcccgtcaacgagtggggaaacactcctctcaatgtcgtcgacccacaaatccacgacctaatcgagaaagagaagaggcgtcaatgcagaggaatcgagctaatcgcatcagagaatttcacctcattcgccgtaatcgaagctctcggaagtgccctaaccaacaaatactccgaaggaatgcccggaaaccgttactacggtggaaacgagttcattgacgagatcgagaatctttgccgaagcagagcccttgaagctttccatctcgatgcagcgaaatggggtgtcaatgtccagccttattccggttctccggctaatttcgctgcttacacggctgttcttcagcctcacgatcgtatcatgggtttggatctaccttccggtggtcatcttactcatgggtattatacctctggtggtaagaagatctctgctacttcgatttatttcgagagtttgccttataaggtgaatcagagtactgggtatatcgattacgataggttggaggagaaagctttggactttaggcctaaattgattatctgtggtggtagtgcttaccctagggattgggattacgccagatttagggctgttgctgataagtgtggtgcccttttgctttgtgatatggctcacattagtggacttgttgctgctcaggtaattttgtttatatatatattagatcagatctgtgtgtttatcgaatttggtgatttttgtgttcatggatctgagatttactattgttgcatggagtatttgtttattgaatttgtgatttatatatttaatttattcaaattgggattgctagctactgtttaagtgtagatctgttgttgtagaaatggtatctaattatcaattgagttaagtatgtattagaaatggggttaattgtaagtgttaaataatttataagtaaaacattttagatgctttgtgtaaaaatcctaatttatgttttcatggatctgtgatttaccattgttgcatgcagtagtttttattgaatttgtgatttatttatttaatttaaagattgggattgttaggtacatatggttgtcttgtttaagtgtagatctgttcttgtgtttcatatatgttaatttatgaacctatttgatccttgctgacatgtagaaatggggttaatttataagtgttgaataattatgaggaggaattgactatcttagctagtaatttggatctaatgagtggaccggttcagatttagtcttttgaatctttgataccttgttaacatgaattattggctccatttgattttaccctgttttaaatttttaatctttttatattcaaacgtgtgtttcaagtttcaatttttataaattatgttggactaatactcctacctaatcttgtttgtttgtttgttaggaatctttgacttagtggggttcttttcgaatctaataattgtattttttttgttatggtattaggaagctgcaaatccattcgagtactgtgatattgtcacaactacaacccacaagagtctaaggggtccaagggctggtatgatcttctataggaagggtcctaaaccagccaaaaagggccaacccgaggatgccgtttatgactttgaagacaagattaactttgctgttttcccttctcttcaaggtggtcctcacaaccaccagatcggtgctttggctgttgctttgaagcaggctgcaaccccggccttcaaggcttatgctaaacaagtgaaagctaatgcagttgctctcggaaacttccttatggccaagggatacaagcttgtcaccggaggaactgagaaccatcttgttctgtgggatctcaggcctctcggtttgactggtaaaaactagatttttctctctcgatctcgtttgtacatagtaaaatattaccattgtttgggcttgacattctttcccattactttttcaggtaacaaggtagagaagctatgcgatctttgcaacattactgttaacaagaatgcagttttcggtgacagcagtgccttggctcccggtggtgttagaattggtaagcatgagaaaatatcgaccctttatatttcttcactatgtcatgaactttttaactcactgtgattaaactggcaggtactccggccatgacctcaagaggtttactcgagaaggacttcgagcagatcggagacttccttcaccgggccgtgaccatcaccctaaacatccagaaacagtatggaaaattattgaaagacttcaacaagggtcttgtgaacaacaaggacatcgaagagctcaaggttgatgtcgagaaattctcagcatcattcgacatgcccggattcaaggtttccgaaatgaagtaccaggattaagtcttcaacaaagtcttataatatgacttgttgcacttgttataaatatataaaatgcctttggaggctcataaagtttctcttctataattcgaacctcttcttaatgcccttttgaaaaggttaaagagagtgaaaagaaaaagaaaaagaagtaaagaatcttctggtttttttcaagtgttttcttaggttatagatgtcttgcaatttgtttggttggtatgggttatgagaatttgatattaccattttctcgataactatttgtaattttttttttttgtatctcatgtttcttttatcattgcaataaacacaactaatgatgaattctataaaattttgaatgagtaaagaactatagaatggaacaattttttatttttattttgagtaatttgcggcaaaacccccttaactatcaatttacttacaaaaaaccatccaacctcatattttggtgggaaaaccttccaaagtactgtttcgtttacatttttaaggtgccgtctattcagcctcattaagtcataattttacccacgtggcaatgacacgtcactaaaaaattatcctacgtggccatattttacaaaataaaaattaaaataaaaataaaaaatttaagagtaatttgcggcaaaactcccccaactatcaa

SEQ ID NO: 296904 - DNA, 2295 bp, Cannabis indica
aacgagccacaataccatagccatgcttaccttcacttacagaaatagctttgtcaacattaactttgatattagaaaaataaagtatattccaatgttcattaacctccccctcactcgttgtttagtttgaggaaggaacctaatattttttctgagcattactctattcttgaaagttcagttttgctaacgtaattatctcctcaatcgaagaaactttggcttcccaaataagatcattgcagtgcttcataatcgaccaaaaaagaatggatacttctcttgctttgacagcataccacacctttaaacctgcaactaaccatgcaacaaaagtcatctcagtagctcttactgaattgactcacgagcatttccagcagtcctgagcaaacgaacactgaaccagtaagttcagcgaggtttcccaccattgttgcaaaaagagtaccgtgtatcaagggccacatgtttgagactaagttgaaattaagtaggcaagcattgagaacacactctccataaaaaattcaatacttttggagggattttcagctaccaaggttatcaccaaaactagaagtaacatctcaagaccaattacatttgacttcttgtaacaacttataagcacttttagtagaaaataaaccagatttttcttccatccaataccaatgatcctaatgaacagtagaactaagaggaaaatgacccaatgcttgatgagaagaagtgatataaggattctcctcatcaagcaactaagggagtgctaaaatactaacactactacctgaccccatactgcacataacacccatctgaaaaacaatcctagcctctaaaatacttcgccaaatataacttaaattttcgccaacctccactgtaaaaaaaccctcgagaataataacaagctctataaatttaccaactaatccttcaagatttatcaacaaacaccatccttatttatcaagtagcgctaagttaaaatcacgcatgtctctaaaccccattcccccattactttcttgtctacttagacgcttccaacttatccaatgaatacttttcttttgcgaagcattagaattctaccaaaacatgctcataagtttttcaatatctcaacacatatccataggaagtaagaacacattcatagcataaggtggcaaagcttgcacaacagatttaaccaagacatccttgcctgcacgagacaataatttaccatctcaaatttgaattcttctatgcaccttatctttaagatagccaagaattgtatttctattttttccccaataagctaggcaacccaagatgtttgctattattggtagcttctacaattcctaacaaagtacaaatatgagcacgatctaagccaagtgtatttttactaaagaaagtagaggatttagtaaaattcaccttttaattcaaagccttctcaaagatagcaagaagtcgctgaacataataaacctccttatcagtagccttacaaaaaaacatgtagatatcatcaacagatagcatatgatagactactagtgccccatttgccactttacaactgtttaaccattcatttgctcgtacttccaataggagctaaaaattcctccgtacacaccaaaaaatataaaaagaaataggatccccttgacgaataccacgagtaggaacaattggacccaatgcatgatgcccactcaacactgtatactggtgagaagccaaactttagaaaattagatgaacccatttatcatcaaacttagaaagcatagcatagagatacaaccattcaaccttatcatatgctttactcaaatcaagcttcaaagccatgaatccatctttgccgacttgtttacgatttaaatagtgaagaacttcaaaagaaatcatgatgtttgttgacctcgcttttagctaacgatagtgagtcaattaaagcgattaaaaatgattaataataataaataagcaaatagaacacatagattgttatagaggttcaaccttttattttatatatatatattgacttttgagaagagagcaaggaatccttgatcttctttgaaagctcttacaatagttttatcagcttaagtgctatcttgaatgtatcaaatactgttgttttaatgatctaatatatttattcgtttttgttacaacataataatatgcaatactaaaaaaattatataacatgatttaattattatatatatatttttatttaaaaaagagttattatattttttt

SEQ ID NO: 296905 - DNA, 3456 bp, Cannabis indica
acaaaaatacgatcaccagacttacagaaacatgtcaccagaggacaagaccttatattatacatttagttaataattattctatattaaaataaaaacaaacgtcatttcaatggaaaagtggcaccatttgttgtcaccttgaactttgaattttaagtttagttgaaaatttcttttaagcaaacaaataagtatcattgggatatatatgtgagagtctgcccctgttagtgctctgtggcagttgaagtcccttatgggtttttaccggtttcttccaatattttcccaggaaattgcagttttcttagcagtttattcagcagttatagccgacctcccacattaaactactttctggatcacctttctcgtgttcttcttctaatctctccagtttttcccatttatacttccgtttctctttgattttcattcatcatggatcccctcactagcaagatgaaggccaaaattactttaactgaagacgaggaatctgtttttgaatttcatgactctgaagctatttcaccatcggtctcaattgacacagtcctatatgcaaggatcctcactaaaaagaaagtgtggctgtccactttgcaaaaccaaatgtccgatcactgggatggaaggtaccctgttaaagtctctgaatcatctgatatgttcatgttaactttcggttgtgaaggagacaaaattcgtgtgctacaccgtgaaccttaccatttccaaaaccaccacattgttttgcattctcctgaaattgggaagaattttgtctctgaagatcttaagtttactccattttgggtgcaagtttttcgtcttccattcctcagcaagaccaaatctttggcaattgctcttggtaatattattggagagtatattgatgtgtttgaagattccctaaatgaaggatgggggccgttttcgcgtatccgagtcaaaattgatgtttctaagcctttaaagagaggtcgaatgatttctttgacttcatgttcgtgataaattttgggtggattttcgatacgagcgcttgcctgaatattgtatggagtgtggcaaaattggtcatccatacaacaaatgtcaagtttatctagaacaattagataatggagaagaacccgcccttgagtatcagcctttcatcaaaggttctcccttaccacactcaagttatgatcgttaccgaacggatttctctaagggagatgcatggcctttattgactcgacttgctaaaaaaggactcactgctgctattcctcagttacaaactcgtggtctgcctctgccacaacaattattggaaggtgaatcatctatgcaaactgctactaaagatgctgctatcaatgtgaatatgaatgccactgttgggaaagttgctccatcaactaccattccctcttcaaactcagttgcttttaagccttctattctcaaccatcattataccatttcccagaattctaaagggaacattactgaccgtggaaaagcaccacttctggatgaggacaccaacaatttcactgacctttcctccatttttatccctgcaatatcagcatcattatcaggcaacactttcgcaacttatccaccacccagccatatggtttctgtcattagtaagcctggtgtgactacttttcctactgttagtactatgactgaggccattccttctattcccgatgcccctgctgtcatgttggataaggaaaatactcatccaaatgtgcaaattaaacgacaaagtgatggtctctcactgagacaaactttaaaaagatgcagaggtaatatctcgaatgacttcaccccagccttgtcagttgaaggtgatgaacaacatcaagtttctgccgattttatggattctggtgatgttaaagacaatacagcggcgactgttttgcagtcccgccgacagccatgaaaatagttagttggaacgctcgtggtttggggaacccgagtgctgtccggaaactccgtttgcttgtcaaagagcaaaacccctctgtgttgtttgtaatggaaactaaattagcttgtaattcaatttctcattttcgtaatcttttacattttagcaatgggttagaagtccctagagttggtcttagtggtggtttaatgttgttatggaaagatgatgttgttgtaattttgaatcattttaatactaatgtatttgactgctacatgggtttttctaatggtctaagttggcattttactggtttttatggggctcccgctactcaaaatcgcatacatacatggactctccttaaaaggcttaaagatgtggctcctttgcttccttggttggttattggagactttaatgaaattctttataatcataataagcaagggggaaatctgcgatgtgaacaacaaatggaggagtttcgtgaagtgttagaccattgccatttacatgaattaccatttactggagatcctttcacctggattaagggtcgtcataaagtggataccatcaaggaacgattggattggtgcttcaccaatgattcctggaacaatagctttcaatgtttatctactgctcatttggactttttttcttcggaccatagagctatcgctgtagatgtcttggctgttaactctatcaatgaaaaatctgccaaaaagtcaaggtttcgttttgaaaaaatatggcttaaggaagaggaagcagctgttattattcgtgataactggacagtggacattcattgtgatattgatcattttcaacaaaatcttgcttcctgtactgatgcacttcagcaatggcactcacataaatttggtaagatgagaaaggatatttctatgatgcagaaatcggttgctaacttgaataatgctgctgttcgcacacctgctggtgtgaatcaacttcaaaaatctgaggaaattcttgatgaacttttagctaaggaggaggagtattggcatcaaaggtcaagagtggactggttacaatgtggagatcaaaataccaaattttttcatgctcatgcttcttcaagaaaggccaagaactccatcaagtcgcttaaaaataatcttggtgtggctgtaagtagtaaagatgatttgactgaggttatttgttcttattattcaagtttatttgctactgaaggggtacattcagactctcttgaacatgtattaaatgccatccctacaacaataaccacgcagatgaatcagtcgcttgttgaacctttctcgagtgctgaagtttttgcagcattacagtccatgagccccgataaaagccctgggagtgatggtatgtctgctatgttttatcaaaactattggaacatagttggcaattctgttactcaggttgtacttggcatacttaatgatggtaatgatatgactcagttgaat

SEQ ID NO: 296906 - DNA, 4478 bp, Cannabis indica
tatccaacactaaaacttgtttagctaatccatgagcggcttgatttgaattatgccgaacatgaaaaacacaaactataaagagataggataaatgacttttaacatccacaaataaatctttaaacaaagaatggtgtggtcttaaagcattaagggatttagcaagaattatagaatctatttccactgaagatacactcaaattaaaatttctcgcccattacaaaccatgatacagtgctttcgcttccatctcttgtggttcataacaccctagaacctgttttgaaagagcagccttaacatatccaaataatctcgaatgataacacccaaactaattttattccttagagaatcaaaagcaacatcaacattcatttttaggctattgagaggaggaggttgccatggaaacagatttgtgtcgaagattctaccataatatatatgtgtcatcatttttctaaatacgcaattgtagaaggtaaaatctatgaagaagatgctaagcaagaacaagaagagagaaaacagagagaacagagcagaaattatgagctaaaagcttccctagaaaaaggactaagtccctttatttatcaaccaagaattacaaagaaatactaacagaaaagtagttattctaataacaactaacaacaaataattaaccactaaatgttaaaaaatagcttcagtaattagttggttaacatccctcctcaaacgaaaaggtatgtcaaacatcttgagtttagactgtagatagagcattcgatcagttgaaagaggctttgttaaagcatcagcaacttggtctataactagaacggatcgaattgataatttttttaacattatgagatcccttacaaaatttaaatcaatctcaatatgtattgatcgagaatgaaacactaggtttacaacaatagcagcaacattttgattgtctacctaagagattggacattgttgagaagaaatgtgaagcttagataagagggcaactaaccatttcattttggcactagcattagccaaaagccctgaactcactttcactactagatcatgcaacaacctgctgcttctttacagaccatgacaccagattacctctaaaaaatatcacatagccttttgtacttcatctgtcattaatgcaggaagctcaatcaacattcgagtaaccttctaaagtcaatgttgaggttggtgtgagatgtaatccatgatggacaatacctttgagatatctcatgagtcgcttgcaagcttcccaatgtatggatgtagaggcatgaatgaattgactcaatttatttataatgatagccacatccagtcttatgagtttgagatattgcaaagcgcccaatatacttctgtaaagagtgtgatcatgaaatgactctctttttgtaagagatagtttagtagatgaactttttggatgggcatatgctttggctccttccatgttaagtcaaacaagtaaatttgtattatatttgatttgtgagagatccatgccagttgaatatcgatatatctccactctaagaaaataatgaaccagacctaaatcttttagagaaaaagatttgttaagatcagaaataagtcgagtaatgagaagatcatttggtcctgttaccaaaaagtcctcaacgtggactaatagaatgatgaggttgttgcccgagccataaatgaataatgaagtgtaaaattttgatgcaaagaacccctattctagtagtttatcttttaatgtttgatcccaggcacggaaagcctatttcagcccataaagagctttgtggagttgacaaacatgtgaaggtttcgttagatccacaaatcattcaggttgactcataaacatagtctcatataatttttcattgagaaaaacattgcttacatccaattgagagaaatggctaaagtgagaatgatcctcactgtggcaagtttaagaacaggaaaaaaagttccctcataatctatccctagtgtttgcaaatatcctttagcaaccagtcttgatttgagcctttgaagagtgtcatttgcattgagctttaatttatgtatccacttattgccaatcactgaaatctctagtgaataaggaacaagtgtctaagttcccacattcttgagggcaacgaattctttgttcatagacttaagccactgaggatttttaagggttgtagctgtacttttgggttctgatggaattagtgattcgagtaagggatattttgttgcattgtaagctttaggttttcttatcccacttagagatctagtctgtattttctgagttcttgtcaaagcttgtatggctaggatagagataccagtcatcttgagtacttattgcaggaatgggaattgggatagggttattgtaatgttgaggatcaaccatagagatactatttttagcaacaagtatgggattggtgtgatttgtgtttggggttctggtggctgcaacaactatgtcattggtgtgtgtttcaatgtttaaggtgctggtttctataacaggtataggattggtgcgcgtttcagtgtttgaggttctagtttttctaacaggtatgggattggtgtgtgttttagtgtcagaggttctggttggtgcaacaggtattggacaggtatttgtgtcattgtgtatggtgtttgtagcagtaaaagttatgggaattagatgatggggattttgtggttcatttgtgggataatgttggtgtgttggaggaatttgatgtggtattatgttgggtggattttcctcaatagaaaatgtaggatttgttggatcagaagccacaaaacccgagttagtgcattgaggaacatcaatagtttgaaagctaaaagtaagagcttgagatgagtaaggtacctgttgttgtgaggagatactgttgttggagagtgcaggaaagtgtctctcatttaatgtaacatgtctcgatatatagatcattccatcttgatgttcacacaaataacctttgtgatgggaggaataccctaagaacaagcactgttgagaccttagttcaagtttgtgttcattatagggtcttagatgaagaaacagttgcaaccaatggtttcaaaatgttgtaatctgatttcttgccaaacatatattcatagggactaatattgtcaagaactggtgtgggaagtctgtttatagtaaaaacaacacatgacatggcataccatcagtaatccatgcttaaaccagagtgagccaataaagtgagaccaaattctgtaatgtgtatgtgtttgcgctcagcacggccattttgttcacttgttgttggacaaggatgctgaaagtggataccttggtcagctaagaattgagcaaaatgtctgtattcagcttcccgatcagtttgaacgctttagattagtaaaccaatttatttttctgcaagaatcttaaactttatgaacaagtctaaggcttgttttttaagtgttaaatggaatatccgccagtatctactataatcatctaaaaaatgaacatagtatttgaagccatctttagacacaatatgggaaggaccccataaattagtattgataagtgctaaacattaagtggccctattattggaggtggaaaataggaacttgtgactttttccttgacgacaagcagtacaaaactgtaataccttgattgagccagtgtgtggaatgtgtggtaacaatttagctaaggtatttttagcaggatgaccaagtttgcaatgccaatggttgatatcattgaatttagaaatagaaaatacttgtagggaattatcaaagaaacaagaaatccttttatttattccttgaggggtacaagattctgttattacactagactgacaattacaaaatgaattggactctttagaagaggtagtaaagtgacactataaggcagaactggatgcattcccaggctgatataagtcatctttagcctttcctttaagaagcactctccctattagcttgtccttaacaaaacaacacaacttatgaaattcaagaaagacatcattgtcagtggtgagctaagaaacactaacaagatacttttgaattgaaggcacttgtaaattattgttgagttgtgaaggacatgaatctgtagaggagggaatagtggactggccaatgtaagaaataagtaatttcttaccattacccacggcaagagtttcagttccatggtagggtatggtagaatccaaattgttttaaccaaaactgacatggtttgttgcgccaatgtccacataccagagatcatcatcaccaatctcaagaatcatagtagttttcagtgcctgcggatcatgaggagtgtgaagttcagttaagaaggcttgagaggaagaagaactaccatacttgggagtgac

SEQ ID NO: 296907 - DNA, 3642 bp, Cannabis indica
aaaacgcagattaaagctttggaaaacagtgatcttagcaacaatctgggccgtatggttagaaagaaatgccagaatctttgaagggactactaaatcagaagcggatgtgtgggagcaagttaaattttggacagctacttgggtctttagaaccaaacattttgaggatttatcatttttagatttatgtagagaatggaagacaattatttaggggctgtaggttgttttgtttagcttttcccttttctgaggcaaagcaggggagtactattgccttagaatttctgttttgttattaattgtaaccatggttttcctccaccacaagtgaggcttttaatatatatcggggaggatcctgtctaagacaagaggatctcttctctttttcaaaaaacaaggagttctgaagattcccaaaaaaagttggataggaagggccaaataaatcactgtaatttctttcctcatgaatctccagcatggagcccaaaaactaatgtgaataggacaacggtaaccaaattaagtaacccaaccagcctcacatactctcatttgagcttttaatctcatcaagttaatcttcaaacctgaaatagctgatgataatcaaactctgcaacatgtttaaaatcttatcttggcctttgcatacatagtatattctatatcacattcttgaaagactagctctaacttagatgtgcatgtgtctgcattatcattgtcctcaattagcttcaatatcaaactcctgttttaccttgtccatcaatcctcacaaaatcccatccttagtcacaggaaacttacagaggcattccattcactgtatgtaaatgggttgttgaagtgagacagcccctaatccaacttatccttttttcaagaagaccgcaatctaaaacatacagttagggtccatgatcagttaattgttgccatatttaatctcagaatgcgcaattgataagaagcttgaggtcatattttgattgttcatgatatatgtagaccatactttatcctccaactgatatgccccattaaaagaaagtctccaggaagtttattctccttgtatatttgacgattacagaaatggaagattttactgcattcatgttcttccagtatcattgttttcaatgaagagggcgcaagagaattagtttttcttttaaaaattttcaaattcaaagtttattctactggctcaggaaggtgatggcaacatatatcgatgtaaaaaattgaacaacacttttactaatcaagtaaatattacgaagtctgttactctgacatggcattactgctactgcaggactgggcagatttatggcggcctgaacttcaaggaaggatagcaatggttaattctccaagagaggttgttggtgcagttctgaagtatatgggagcttcatataacataaacaacatcaatttggatgttgatggtggcacagatgctgtccagcaaaatctagcatttcttgcaaatcaggtatagatgacatttaagccataaaagttgtgctatattgataatgtagacaatacaacaggggttaccatatcttaatatgtaactctttagatcagtaaaaattgattatgaaaaagaaagaaaatggaagacagccaagtaaacagatcacttgctcaaggcctcttggggcttaaatgcagccacttaacatatgggagactaatatattcacaacatgggccactaaattttgtgcaccttttgttttattttcaattatgtttcgcctaatttaatacattaaactatttataagtactaacctataggtgtacttttccaaagaggaaaaacacaatagaatgggaggtcttgatgtaatatgtagttgtgttaccttcctgtattttgtgaaaagctgttgtctatgtgtgactttattttattaatattataagaaaatattctgatatcatgtgaaaaagatagatatggcaaagaggagaagtttgaaattcttctctatttttcgtatatcttcttgtacgttttatgtaaaagataaatgcaaacccacagatcagtgctataaatgtgatcctataaacttagcgcaatacataaacgtgaaatacatacaaataagaattaactaaaatatatacccaaatttatcttattatagatataaatctgatatatttacagctgtaaactaatatttccacgttgttcgtacaatttgtttgagtagactcaggcatgtcagctccatctgtaagttcttaagtttaatacagttatgattcactatgctcattcaaattttaaacatatatttgaaaagtgatgtatctattggtgacaatattttacacacttctgggtatccaactagtataaggctccaaaatggtgcttaagtgaactcaattctgtttttactttgtattgtttcatctccattggctatatgcaggttcggttatttgataatacacactacctaaaagcatttggagttggagatgtttgggtggctgttgggtggagcagtgatgtcattccatttgcaaagcggatgtctaatgttgcagtagttgttcccaagtctggatctagtctctgggcagatctttgggtatgccttgtttcaaatttttacactaaatttcctttctttttactacaacttcaaatgaaatagcgttatttaattttacgtttaagcagtaacagaaaatatatatttttttcttagttaccattcatattgcccccggacatatgacgtatgcattattatgtccttaaatttttcaacgcgttgaaatagtccttgaactattcatgttttgtcacatatgacaaacaaaatgatgatttggctacttaaactattatcacatcattaatttaaaatgttataatttattttttacttaatttttttaaatcattaattgatttttagtttaatgattaattaaaaatacacatttttttaattttaaattacacgtgtagtgtgtgatgtggcaatggtataaacatttacgccatcattaggtacaaaacctgatagaaaggattaattttcagcactttgaataattcggggacactttataacgggttgaaaaatttaagggcacaataatgcatatttcaggggcaaactaaatagccttatttaatcatgatatctgtcaatgttttgaaaggcgaaaacgggttacgaggtgttttgccatagtaccgcgaggcataagcctcgaggccctccaaggcgtaagcctcaacaataagaataaaaaattcatacacatgatatatatcataaaattcataacaaaaaacacataattcataataaagtcatgaaattcattgcagtcttaagtttcaaacataaagattaaaagatatattccatgttccaagggagagaggagagcctcgtgttggtgttgctgctgtatgcatgaagagaagggagagaggagagccttgtgttggtgttactgttgtgtgcgtgaagggaagggagaggaggagagtacaaggcaagttgtggaggatgaaggaaagtgatgaatttttagggttttttatttagttttgggcttttaaaattt

SEQ ID NO: 296908 - DNA, 1595 bp, Cannabis indica
aattattaatatttataataattattttgttaatagaattaatacggtgctttagtggtatgcatgtcacacaatattaaaaaaaataaaatatatttttttgaaatctatatatatttttaaaagcttaaatattgaatattagtggtgtctaacacttctagacatattgtattgtgattgacggctaatactccttaaaaattaatacattaaattatatgagacacaatatttagttgaaccaatagtaatattcacacacaaaaaatactaaatatactttttaatatttctcatttttatattttttttaattatcgccaatttaaccataaatcactcaagaaattgtcaatatgtgaaataaataatacaaacatgtaagttcaataattaaattctaagtggtgttgctttactcatcgttctatgcgacttgcatgtcaaggtattattaccttttttttcaacggtattagattattattattattttaactgaaatctgggtttttgatatcagttattatgataatatgattatataaattcttattattaattttaagtttgttgtctaagattactttgattaccttattcaaatttaaaagttaaacttgcatacaaagggtcttccacactttctaattaaaacttgcacatgacatttaaattaatgagaaaattatgttgatggttagtagcttcacatgataatagaaaggaaaataacaaaattaaaatgaatttcttataacatattgctctttgactttggtatcacacatcataatgggtttatagacgataaaacaatgggccaaccaaatgggctcaaatgtgatgatttacttcattaaacaatagattagtccttttttattattattattatttcacaaatatacaaaaataattacaaaaatacggttatataaaattttaaatattttaacaatttttataattttatttatagaaaatatagtcttttagtgtattgttatcttgtgatcttgttcatgtattgttgattttttgttatttgtttgttgttattttaatgttggttaaaaagtaatttttttgttacttatatataattttattgtttttttacgtcgacagttttatattaagatacatatttcgagcaataatatttttatgaattgagtaatattgcgaacgtcttaaagagagtgacttacttcgtgactcaacctagattttcattaagtaactttattcctttctattttctagagcaatttttcttacaattttcagatgttacgtttctgccatgactaccgacggaagagagaggagtcacacaaagactcacttgaacatcacatgcgcctcgctgccatccgactgagccaagttggttggttagtaaaaactaaataaaagcaattttatgtattcttttcccatagaaaaaaattataaacagttttatattatgatacgtatttcgagcaatgatatttttgaaaattgggtagtactgcaaacgtcttgtaacgtccccgcttcaagcctccattgggcccttacacccacggaatgaatggctctta

SEQ ID NO: 296909 - DNA, 10038 bp, Cannabis indica
aaaaaaaaaaaaccttaaaaaatcaagtattaaaactcataaatatttaatgcttagacaaaacaaaattcaatgctatacaattagatgcttcaaagtgaaaatactgaaaatattgatgaagtgaaaatatattaaagctatcatgacatgagtctacaaatcttgataaaataatagtaacggccccaagcaaaactttccttcaattccaacattaaccagcatcatcctccaaattattgcttcctagttaaaatttgtttgaataattgataaacaactcacaaaacacaccaagaaaaagagaattggaataaagattaaacatttttaagaaataaatacaattgtaaagagtaaaattttaatatgctaattgaaaggaagaaaacttatcttatataatgtttagttcacatgaatagagggggccatttaattgtttggtttctttagattatgtttggtcatggagttgaggaaggatggagagtattttagtaatcctttcaagttgtttgagaagaaagagatacattagtaatatttataattatttttttgataattttttatggtgatgtatatgtaatttttaaaataaattagatataagagtctaacactatttaattattaaagtagaaataatgcataaattttgaacttcaaatccgatttgtgttaaaatacttgattgtgaccatatcacgctgatttgtcgaaaattacttacaataagtcaaaacaaacatattatataataatatactccattagcacattatataataaaattataattttttctttatggggccaaaattaaaaaaatactactaactcatatatgagtcttcaatgcgtaaaattattaattttatataatttaatgacataattattcatttattcttaattaatttaattagggtcgttaatctatttactaatctcgaaataatacaactactgccacccaacttctttactaaaaaatatgtgtttttttttttaatttttttttgatattctaatctactaggcatgttaaaaaaaattcaaatttatttttgaaaattcaaaatatgaaattatatagagtgtaagacggattaagattttatttttcagttctaaaaaaaaggagtaaaatataattagtagagtgagacgaggatatttatgaaagaaatgtaaattacaagggtagtttatgtaatttcacaactttattatttaccttttgtgccccaaaagagagggtttttccttacaaaaaaataacagaagaaagaagagaagcaaagaagtgggaagccatggttgaagttgaagaagctccagtgtctgaatcctctataacggaggtagacaatactccacccattaatgtccttaaaactcagccttctaacgaggccaccattgaatctatcactcaaggaggagccgagtctacttgcaacaacggtgccgccgcagttcacgacactcctggcgttaactccggcgaaggatcaaagaattcactccagttggccgatgaatttatggagaagggttccaacgccctcaaagattctgattacagcgaagctgccgagtgcttcagccgtgccctagaaatcaggttccattttttttttcttcttagttattaaaaataggaacatttcacgtaatttcatgaactttgctcattttattttattaagtatttgagctgatttttttttttcaccgatttatgtatatgaggtttagaaactgtgtttcgatctttatgtattacattttctattgagcaaatacattatgaaaaatcaggttacatttgttttttcacattttttctgtttagttatttaaacattatgagctgatgcttgtttcatatgttgtagtgggtttttgtttttaaacccaatttgtgctcaatctcatcctgtatgaaaaatgcttaagtgggttttgtgtttaaatttggtgacatatatatgactttatttctgctttcatatgaactaatttctttaggaaactatttttttactgtttggttatctagcagtaatgggtgctgagctttgatttatctctgagctgatgatgcttgtttcatatgctgtagtgggtttgtttttaaacccaatctgtgctcaatcttatcctgtatgaaaaatgcttcagtgggtttttgtggttaaatttggtgacatatatatgactttaatttctgctttcatatgacttaatttccttacgaaactatttattttactgtttggttatctaaacatttaaaaaattgtttcatatctcatagtaggtttgttttaaacccaatctgttctcaatctcatcatgtatgaaaatgcttctgtgggtttttgtgtttaaatttggtgatatatatatgacttaatttctttaggaaactttatattttacttcctgtcatatatcccatcattttttaggacttaggagtacttgttggtgataattttgcaaaaactcagggttggacgctttggtgagctttctcctgagtgtatcaaaacttactataaatatggatgtgctttgctttacaaagctcaagaggaggctgatcccctgggttctgtacccaagaaaggagttgaatctcaacaagagtctgctaaagatgaatctgctaagaatgtctcaaatggggaatcttcagtggcttctgcttcaagtaatggagaagattctgcgccagcagataatctagaaggagaagcagctaaagaaggtgggtgtatgcttgatcgtttgttgttggttacatctgttgatattttatcttacaaactcccatttcagatgtttttgcacctgcctaaggttgcaattatgctttaaatgttcacattttcttacttttttcattgttatcttatgagccagtttccaatgaaaataatgaggagggcgctgatgggggcagtgatgccgaggacctggctgaagccgaagccgaagcagatgaagatgaatcagaccttgatttggcctggaagatgttagatgttgctagagcaattgctgagaaacagtccggtgacacgatgctgaaagttgacatattatcaactttggcagaagttgcacttgaaagaggtgtgcctttatgcttattcatatttttttctttttaacttaaatatttgacttgctgaatacttaattaattttttgggtgatctcttccagagcctttaattgttttaaacatgaattatttgtgttctctttgtagaggacattgaaacatctcttagtgactaccagaaagcactatccatgttgaacgcttggttgaacctgacagccgacatatagctgaattgtatcctttccatgataggacactgttactcaaaatactatgtttttataggcctttgatcagctattgctgacattccattctaagtctatttagctatattcttttaatgatgctgtacacatgatttcaattttcaacttaaatccctaactggggtaatttagaaattttcggatatgtttgtgtttggagattggttctcagcctcaagaagccatgcaatactgccaaaaggctatatctgtttgccaggcccggacacagcggctgaaaaaccaagcaaatagtgtatctgaatcaacatcctcatcatccacttctgatacagacaaacaggcagagattgaaacactaaccggtcttgctggtgatctagaaaagaaggtatagctctaaattgaattagaaaataaatatttattgttgaaagttttcaaattaatcatttaatgtttttttttgcagctcgaagatttgcaacaactggtatcaaacccgaaatcgattctttctgaaattctaggaatcgcagctgccaattctaaagcaggcgagaagaatgcatcttcatctgtgctgccagactcttccaccatgagcttctctaagaacaatgggaatttcgactctccaactatttctactactcaagctagtgggtcttctactggggtcacacatcttggagtggtaggaagaggagtaaagcgaatggtgatcacagcagacccgaacccaaccaagaaaccagcattagattctgaagaagataaaaagtaatgacagcttctcttcaaggtctaggattctatattgtgtgcgaatgaagaaacctgagtataaaggttctgattctgttaaatttctttactaacttttatgcggtggtacaacttttaacatttctaatattgaggtaatggatttacaaatgcatgcttatatatatatatattttatttgtttatttacagtttatttttacctgctcttaagaaaactgtaggggagattaatagattgatatgagtgggaatgattcttagtagaaaaaagatttggtgtgaatattatgaaattttaatatagaattatgctggtagagttgttctatattcgtttcttttctactcttgttttttattctagcgtgggtatttaaataaattgtaaaataggctgtaaagtaaagcgttccttgtttagcaaagttaggtgttagtgttacttattctaaaacaggttgttacaaccttagataatttgcctggctttgtggaatcatcgatcttcacaaacagccctttaaataaaagctaaggaaaatagcactaattcttcttcaaataattatttaaaatcgttcttagtgctttacatttctcatatattaatataatgacttggttaggcgttggagtctagacgagatggtgcataacatgattattaatattatatattttctatatcaattattgttctttatcattttcatgcattttacatagaattggtgaacttcaataggaaatatatatacaatatatgagaagtaattggatattttgatcaagacatgtggcgaaagagcattggatgaggtgatgattctcacgaagtgtataaatacaaatagaatggagtcttgtcactatagctcaataaaattatgtcaccaaatttggtgtggaattcttgtgtcaatattcaaacatgtagtgacaaggatacttacaatttacatacaaacaatcaattgtacccgttaagattttttttttccttttgcattgtatggttagcattactctaccaaaaagtaaaaaaccaaatctcttctttctacgttggaatagcttacaaagaattgaaagtgagtatcatttaatgaagaaaactcttattaaattaaacatttgtcttcttcatttcattaggttccactacaagccgaccatgacgttttatctttatttatttattttgcaaaaagaagcgttattcaagaggaaatattttataagagttggtattggtagtactcgattggatccaaaccaaattagttacattctcaatttataaacaatgaacttgaactcaactcctagttcctagttacttttttcattctttcttttatctccaaataaacaatacatgacaaaaggttcacgttgcttttaaataaagaattttcctttctctattttattcttgttccagaagatccaatcaagaaactatagcacaagggttaagacacaaattcatgaagtgtcattttctgataacaatttcatgaagtgaaaaactaagctaatcgattcctttgacagactctaggacagtacagtactaggtgttaataaacacaaagattagacgattatatcaatgtgggaaattgctttataactaaaccaaaccaaaccaagcagaggtaattcataataagtcaattgtaagtaaaaaaaatgtgctacaaagttgaatgccaaaggtgcaaaaaatacagctggggtgggtgtggtcagcaccttccttctgtgtacaaacaaattgaaaagggaaaacattgtcaatgcagggcttggccaggagttgttgtagccactgatggctcaccttctacaaagacatctactaccaccactactactactgctactactacttccaaatgacccctccattttggtaataaaaaatgaaaattcactcatgatatatgtgattaattaagatgcaaatgctagttgttacatgttcaattcttacaaactattctttatcttgagttatacttatggaagtaatgattggaatacatttaaattgtgcacactatttatcttgagttatgctagttttttcatgtgtttttcaattaaatttatgtatgtgaaattatgtttttggtttagagtgaaaaaaaaatgtagcgtaggaatgaaataaaattgaatgacataaattggaataaatcaaaggaacttgaatgagtataatctattttgctttgcgagcattattttgttgtaatagattatgtattctattgaccaactgatagatattttatttatctctaaaaaaatgatattacaaagaaatcagtttattataaggaaaacaaaatttgcaataaatatttatttttatgattggaatgaagttttatcctagaagtagaaaacttcaaatcaaagcatatatacagttcttgaattttgggaggttgtttattattgaagatagatgattgatgtttgtttgtgcaggtaggggtggcatcccttggatgcttgttaagagttgttatcttaagactgatggtgggactggaagggaagacctatccataaaataattaagagagggatgtttttagttgaatactactttcattattaattatgcctttaatcatgtctagaagattagtcatattttaataatgtaaatgcaggcttatggtcaacacccattgaccaaaccaaacttgcatttgccactgtacggattcattaattgttaattaaaagaatcaaattcctctctaaatattgtgctagcttggtaagggctcacttaagtcagtcatgggttatttttgtacttttggatgattccttttcaatttgctatggtttttgtgctctctttcttttcaaacccacttgtaatattatttataaaaggggctatagtttttgatgttaagagccagagagggaaaattcgaaattagatggagttgtgttaaatggaatctgataaagtttgattttgtgatttggggagctccctaagagattgctaaacatgggttttaaccaaataaacaatgtaacccactctaccatattgtagccaatatcaagttctgactttaagaaatgttttggattcatactgtttggcattggcattttgttgtctcagcagttgtgccaacgaaacctgcccatccttgcctttaattttatataatgatagaatatgtagtatatacactactgtctaatgattagtcaccaaaccaaatatgaatggcagtaaacttttcttttacgaaaaagggatttgagttacaacttacaacaattagtaccttgctagaatgatttcccttcttccaaattcatctcaagtcaatatttaatagatcagaaaattcagtttcgaggcaaagtggggtttgtttgttttctgttagcctttgtgtatggcatttaccaacaacactgctatactagtactatatctaaccaatatctttttccttttcaatataatatagtcttataatttgataacatattgtatcctttaaaattttagatttgaacagttcaaagttctcaagtctgaatttgaatttgtacgaaatggtgggtgtgcgtaacctgccatactctgtcaaccattaaatcagcccataaataaatgcaagttaataatggggcgagggtagatagatgcacgcattaaagttgcataggaattccatacctttgtcactactgaatttgaatgtgtgtgtgaaaaacataactcaagaaattcctaagctcctaatcctatggtagatgaacatgagcattaatttccacacagctctataagtatgaaccatgttggccgaagtaatgataaaccttctaagtttaaagactacaaaattgacatttaaataaataaataaataaataaaagactacaaaattgactggttggtcatgtgggcctgtggcaaaaattaccaattcttaatgctttaggacctaccctaacctatagctttttctcctctagactttcagatgtttcctaaaggtaatggtaggcaattatttataatcaaatcgtaattattagtcttaaatgtgtaagattcatcatattcttattattatgaaccttagtctaatgtaatgcattatgtggggggggtagggactaggacacatttcccccccaaataaatgtacatttatgtattaagcagagccaagagttttgactaaagcaaatgatttttcttttctttttgaaggagaaaatcaaacaatattgaataatagtagaattatgaaacgcaaatgctcattcaaaaaaaaaaaaaatgaaacgcaaatgcaattataaaattcaattattttaactctcaaaaaagcaatgagaccccagttggcatacaatgcgtttttggttaataatgggtgatatatggatgattgtgatggtgggttttaataatatttaaaagcaaaaatttaaaattattctttgagtaacacaccctctttatgatgatagtcccaatttcctttctttgaggcaagaagagaaaagagggagagagagaatgtgtgtgtcattgctggagtgggttagatactgaatcggtttcaaaaggaaaaaaatggaaaaataataaaaagaaacatgatcatatgatctcctttttcgatatttgttcaagctctatttgtcttctctcaaatattttggattcctaccctctctttcaaaacccttacactttctttttttcacctagttttcttctactaaaccacaataaaaacaattttcatgtactgtctttgttaatgtgatgttggagtgagagaagggaaattcatacattcattcattctacctaccttacactcactcacactcaaacaagcctccatcctaatattcttggttttccctactctactctcctatctaaaatttacataagacagagaaagaaaaacaaagaaagaaacagagagagagagaaagagatagaacactcaccagtcaccactgggtatttcatggatctggttgtctagttttctgaaaagggttttcttcagtagtagaaagtctagaacttgaagaagcttattcccgagaaaatggcagcacctgagaaatcgggcaccaccaaaggccaagcatggtaacaccaagactctttgcactttcttcttctccttctgctctatacccacccataatcatatttggtttttttttacaggttttgcactactgggttgccaagtgacgttgtagttgaagtcaatgaaatgacatttcatctccacaaggttagtttcctccattgaaaccatactgcaatttcttaaaaaacggttgaactaagtgttatctttttttatggttcagtttccattaatgtcgaaaagtcgaaggcttcacgacctgattaccgagcaagagaagaatcctattgctttttcttctactaaagaccaaacttctacctccgccgccgccgccgaaccaggagatgaggacgaagaagaagtcggcgccggtggtgtcgacgaaatcgaggaagtccattgccacatagtcctctccgacttccccggcggttcggagacttttgagttagcagcgaagttctcttatggcgtcaagattgacttgaccgctttcaatgttgctcctcttcgctgcgccggtgaatttctggatatgacggaggagtattctgaggacaatctcatttcgaagacagagaggttcttctcccaatccgtgctcaaaagtttgaagtgttagataaattaacaattaacccaagatctatttgtatataacatagaaca

SEQ ID NO: 296910 - DNA, 4211 bp, Cannabis indica
tctactaccttaaccatacactttcgcattctaatagtgtgaattattaatcttatcatcactatttatttattgattaaatttttagttgatttaattgtgcactttagttataattttcccacatacatacacatttttttggtactaaaacactacaaacacttatgtgttattactttttaactaaattcatcacaattatatataaattaacataaacagggcaaaagatacaaaccaaacatttgacctttaataactaattcacactaaaacaaggggcatatatgaccataaccaaggtctattatttcccatttcttttaattcctaattaattagctaatcacactactcaaattgccaattatcatctactataggcccttgaggagaagtagaattatcactacaaccaatagtactaacaacaacactattggtttgagtagtcttattattattattattattattattattattattattattattattattattattcatctcttcatcatcacattccgatttctctcctttaagtaatttgagaaattcactaagagctaaatcagcatcctcatacttcaaaaactcctcagcaacttgggctggagtgacttgtttttcaccaagcaacactttgatgtgttcatagaattggtggtcaccaatgactcccaagtaatttgaggctaattgtttaaatgcctcataagtacaatagcccatgtaaataggcatgtccattcgaccaggtctcaacagagctgggtcaagcctgtccttgtggtttgtggtgcatatgatgatcctttcatctccacaacttgaccataatccatctatgaagtttaacaatccagataatgtcaactgcattgattgaaaaaaaaaaagttaattcatttggtgttatagaaaaatattaattcaacaactttctgtttaatttctcctcaagtcaaattctcaaaagaaaaagtaggaaagaaaaaagaatttaagaaattgtgattgtggatctactactttacacatagaccaatttctttatgcaaatctaagagctagttttaaataggtttatttgtggggcaaatctttaaactctaagttggtccttcatttttcttttaagttactctacaaactttatatataaaatttatggatgcaaatattataattttctaaatattgaagagatgtctactataattaaaatttagtaccaaaaaaatatttttgttttaaaagtaatcatatcttttagtagtttttaaaaataccatatttttttaataaaaggtccaacaatttttattctttccccaagtccactcaatcttaaagctgaaggaaaattcttatttttatagattttagagtataagtttgtaaaaatatagtgttttttcaaaaaaaaaaattatattttatgggaaaaaaaaagttaagaaaatatggaaagaaacagtaaggtatctggttacccacttatagtaattggttatatctctagttactataagagtacctggttactatacttgagtttctcatattttttaactttttctttaattttctcataaaatatatatatttttaaaaaaagccatattattacacaaaaagtataaaccccataaattttataatttcttctattataaaaagtctccaactgttaaaaaaacaaacaaaaataaagtactaaaataagagaagtgagtagaataactagagttttttgttgtggtaatttgactgtgaaatgaattgtttagtggggaaaggttggtggtggggctaatttggtgcttttttccttttaatgaaatgagaagtgatgataatccatgttaggcacttatggtttttttatggccaaccagattccaaggcacccaaattttttgtcctaattggtaaagtgtgatgaaaaaaaaaaaaccaactttattattataggactgaagagacaaaaactgtgcacatagctcactactcaactcaactccacaaaggccacttatatgaaagaaaattaagattacccaaatcaaaaagaaaataaaaagaacattttttttccatcacaaattataggagcacaagttaattaataaaacaaacaacattatattaatggcctaaggatctaagaagcattgggcaaaataataaaaataggccttctgaagagtgtttttgttgtttttttatttcttttcttttcttaaaaaaaaaaatatacacatataatatcaaaaatttaaaattggtttttttttctcaataaaattttaattttttttgtaagaatttttttgacaaaattttgacatcttaggccgccatgtcagctgcctcaccctctaagaggcacatctagcatatcacagttatgctaaaaggtaccaaccaattaacattactgtaaggtttcgcattactattagtataatttaatataaaaaataaaatcaatattcggtggtgccaaatagtattagtgcccaataataatgttctttcgaaacaaaaagttgaagacttaccgatgggccaggattcttgtcattttggtcaccacatttgttgtcaccatctttttctcctcctcctccattgagacgattaggaagatcaacactacaatcaatgtcttcaatgagaagtatagacctattagccgttgtaagaagcaaccttctaagatcacagtcacgctgtacattaccaagttgtaaatcataaatatcaaacttaagatgattagccatggcagcaaccaagctcgatttaccagtcccaggtggtccatacaacaagtacccacgtttccatgctctcccaactttcttataaaaagcttttctcttcacaaacctattaagatcctcaatgatatcactcttcttttttgggtccatagccaaagtatcaaaagttgcagggtgttctaaattaatcgattcccatctcattcccgggtcgaaagtgttactcaaagtatgcatcttcaacacccttttctcatctctcatgattttggcttttttcaaaatgaaaggaatataagagttcaaaatcaaatctctatgcttgttgtgaaaactcaactcatagaatcttttctcagagctttgagaaccaaatctgtggccagagttgttattcacttgttctgataacacaaacttccaatgaagctcaattccttcgaaaaagtcctttagcttttccccattttcaagcctaatggttaggcctttctctttagtactctttcgaacattaagccttcgggttttcgggctacgaagggtgtctaagtaaaccccggccgcgtcgtagacttggttgcccgagtaatctcggccgccatcgaaaaccaaggtgagattttggtcatttgctctgaacaatctttgagccaatgagataaggtagtcacgaacttgtttaggcaagaattggtttagtagtgactgaaacaacattatggaggctgtgattgaagtaaaggctgtgaaaagtgaggatagagatgggaattcgatatgggaaacatgattattttttagctcttaactaagttcagagtttgagatttttgaaagagaaaatattgaaaaaaacggaggaatttgagagagtattttgataacactaaggaaaagtgttatggtttaatgctatatatataacaagagtcgagacttttggggcgtgacagaataggctgtgaaactcatatatagcattaaacaaatcactttattgcgtgttgagtttctcttcttttgttaactttagatccattaaatcgaaagtgggtttttttatttttatctttttgttatttgctatagtggtgatatgctctacttcttcgtatgtatatataatatatttaggagaattactccagtttttttaatttttttttttaaatttacggtttaagtttttaaagtggctgtagcgctagttgcaataggattttttatacgattttttgttacaatttaagttgcagcactagttgcaattagggtcgtacattggtcagtttgggcggtttatcttatatattttctaacacaatctaaagttcgaattgctaaaatttaagtgcaacctgctcaatttaaaaaaaaaaaaaaatttataaaccgatcatcggtttg

SEQ ID NO: 296911 - DNA, 8360 bp, Cannabis indica
ttttttaaaaaaaaattatctctaattaaaaactcaacaaaaaatacagactgggcttagttagtggacctacatagctaagcccgaaagttaaaactcaaagtttttcttcttcatcaagtagaagattcgaggctgttcaatcaagtatcggcgaccagagagaaacgacagttgagatactaaaatggaattcgtcgttgaagaagacaaacacctcgataaagattgttccactctaattatggtctgtacgattcttagtagggtttcacatgtttaacaatgtttttttcatttcttttggtttaaattaagcggaagtttaggcgcaagttcttaagctttgtgtatcactaatacaatattggacagttatggaaatggcaaattttaaatttcttgatggtctatgttttcttggtggccaaactagtgtcgatttaatcttaatttagtttttatttttgttaagccggcattgtcaattggaaatgtggggcaattggctatggatcttttagtttcaaccatgaaaccagagagagttggatatttggatactccttttgttcttccttgtgtgggaaatgatgcatatgtgcctgtgcctcaaggccagctcgctctaccacttgaaggtgattacttgtcttatttttgtaacccttttttagggttcgttcatcaattgctgcaatttgattagcttgtttccattatttgatgtttattgtaaatgcttgggttttcagtttatgaatcacccgctaatggagtcactcttctccaacaaaggtccccagttgtcaaggtaaacttgttcataaatttttatttggcactgtcatgctctccatttccattattatggtctttgtggttataccttaaatttttattgttcagaacatggtttacgatttttgacatggccattaaattaggggatgatgattgaatttgctaaaaacttggctgagtttgctgctgctagtggaaagacacatgttattgtgctgtctagcttagatttcgggaggtggcagaaaattgatatgtcaaggtataaaagccagtgttgtcaatttgctttgagctttgaagttatttgttatttgttcatttgctttgagctttcatttactccactgggattttgcgtttgagtgtagctaaaatgatttgtttccagaaggtcaactctctcctggttccagaacatgttataaatccagagactaaataaaatcaacatgtttggtttctgaaacgttctaagtcttaagcaataatcaagtatattttgtgtaaagccaagaacaaatttaaccacaaaactcagaacttaatgattagaaaccaatcttttcttttttgccttacaaaattcactaaaaggaacacacgatgtaatgggaaagaacatctgatgtaagcataaaataagcactgaaataatttgaattttaagaatgtgttaaaacaattaaaatgtcaaaattggttgaaattcctaaagatggaggcagaataggggtggggatacaaaaattatgtctggttgcttggtcttgtggtaaactaataaccctagtaagagaacttgaaagcacctgccttttaatcggtcacaaagtcccagaatgagggtttcttctctttggcctttttctcttctactttcctcatcaattgatcaataatttcaagaaaggaagcctcaaaagtgttcttaaacttctcatacaaattcacccgatattttgtctcagaaaaccagttcactagcatttggcctctgaagaaaatccaacacattcaacaagttgctcatgctaacataattctgagtaacggcaactgattcctcaaggttaatcaccaaatgccaccatccattaggcacaaaaatcacctccccaactttacaaacacactatgggtttctttttccatgtcttggttgcaccataaaaaatcataaaccactcaattatcgaaacagggcatgctacctcagcaccatcaaggctggggtgcactcctggaggagtcacatcaggaggaaacataacccatttcttggacccttttatcacagcattccatgctgatgttgaattaggatcaatgtggaatgatgaaccagaaccagcaggtccaattattatccatctgtaatctggtctctcattgcccaacagaccaaacaaatcttcccggaagtacaccgaaacttcatactccgaactcaatctcggaaccttttctacgaatttcgggtcaaataaatacaatggcctctcttccctcaatagatatgaatacctagagtagttctcaagcttcatctcaactggccctactgaaaaatgtaaatcaccagagagcttaaccaaatagtctctatcccatttttgaagagcaacccagttatctatacacccttctaacaacacaggcttattcggttcctcaaaatttgacacaaattcttctactgatatgcccttcttccgaattatgttatctctttcaagccactcaggtttcatttcaagattggcacagagctaactctgaaaaagataatcagaataaaagtcccccactctcaaacatgacaatccaatatttatggcatcaaaagaagggtaacaagtagtaatgtaagtgagcatccatgaccctttaaagatgaacccatcactaagattttccaacacgagattcctttaaaggggttcatagttagtgaatacatagaaagatttcctaccagtcgctaaaacccctaaatgggtagcacccaaaagccctagaatatcaataacaagctcatttgttaggttttggagattgcccaaacctgtgtttctagagttgacagaagatgagttgaggtagaaattttccagtggtcgaatcccatgagtgtgtgaaggagtagaggctttgaggctgaaaccttcattaatttcttcatcttcatcttctgattgatatttttctaaaatgagattttgctttatgccactggttttgctcctaagctcgttgttggttttgtttttggtcctttttcttttccataacaagctcttgcagctcaacatggcggacaaggttccaacactaacaatgattagaaatcaatctcaccgccgagaacaaatttaaacaaatatgagaaaacaaaataataaaaaatacacacatgatttgcatggttagaattagagccaatttgactataacctaaatccacgggcagccacttttattcaaacaacttctcttatctttgagtacaaatctctcttcctcaccgttacagcgtctgtcaagttttcaagaggaaaaatacaatgaaattctagagcatttaatacctattcaacataagctatttatagcactaacaaacaaacatacacgcaagattaacttggttcgaattagagccaatttgactctaacctaaatccatgggcaggcacttttattcaaacaacttctcttatctttgagtaaaaatctctcttcctcgcagttacaaaatctgtcaagtttttaagaggaaaaatgaatggaaattatagaacctttaaaagctatacaacataagctatttatatatcactaacaaccaaacatgactaaaggccaacagtcataactgattgcattttaaagaacggttgttataatggaatattgactggaccaacaagctaacaaatctccaccatagtagtgattgtacttatagccctgaggagcttggtctcctgtttgctggttcagttccaagcagtggaagaacttactgcttggaagtactttagttatcatgtcagaagaattgcgcttagtggaaaccttcttaattataattgatccttgagcgcacttctttaacaaattgcaacttagagtcctcatgctttttcctctcatgatacatttggttcttggataggtgaattcacaatttgattatcacaatgaatgttgataacttggtcttgaagctttagctcactaacaattccttccaaacatataacttcttttacgactttggttaatgcaatatacttgaatctttcaggttgtgtcatcaaaatagtttcatttatcaagctttccatgcaagaatgctgtcgtagcatccatcagctccaactcatgatcaaacttcgctatcattgtcaagaaagttcatttttacttgtgtttaggtataggtgaaatacatagttgaaatcaattcactcattttgagggaagcctcgaggaacaagtcttgcctgaaatttggctggttcaacttttggagtctctttttccttttaaaaatttatttacagctgactgctcttaaaccagcaggtcgcttgattaactcccacgtatggttatcatgaaaagacttcatctcttcattcataaccttgagccattcattcttctccttactaactacgacagttttagaactttttgcctcttcttccacaagtgaccaacttctagtttaatcttcttcagatttttccttagactccacctcaaaattgatattctccaaatcagaatttgctttctaatttacatggactttgtcccactagccttggtcaaataagtgataggaatatcatagtagcaaaatagaggaaaatagctaatatactgatagtgaaaattgaagtaaacaagttactgggtattcgagagacccattgctaagctaagagcagtagctctcttacaaattcatatccccccccaacccccccaaaaaactctttccaatacactcttatatatactacattgagcatttattcctagagtgttcttacactcaaaaaatctggtcttctttctacattgaattcaaggtgttgtgggtgatgcctcggttaatctttctttttcaaaaaaaaaaagaaaaactcattcttagacaacaactttcttgtcacagaagctgctgaaccgtactatgtcaccttccaaagagtacatgccattcttgttaatccctctcatgactatcgtggaaccttttataacattcaatattcctttctcacctttcaacacattccctttcttgtgtacctcaccaagaaaagtcagatgtctcttaagattaggttcaagtttgtcttacattccaagaagcctctcaactttattatgaaatctgaatcctacagatccaattcttgtaagataattctcgtaatcttacaaggttgattatatttacaagaagcacaatttctctttgttcatgaaattctccaaaccaagatctgtttagggtcatatggtaatagaagcttgagtccatcatccacgatgtttctggatttgtactggacaccatcaaatcctcagaagattcataaccatattgcacaatagctgcatttcctgagtcattggatctctcattatggcctttgtctttcaggacacaacctcctggaatgcttctgttgatcccacattaaccaactatgggattggttagtagagtatataactagtcggacaccctcttttcttaggctagtttttggaagtgagttctgtccaagtggttgtatcgcctttctttctataatggcagcacttgatatttggacattcccttcaacatttcttccaccatgtttgttctgtaacttagatcttttcctgtcatgtttattgtcctttcttgatgttcttcctcttactattaattctttaccttacaaaatactttttttcaattctttcaaattcagagcagcctgcacttcataaagagataaagattctcttccaaacagcagggtttctttgaaatgagcacgagtctttggcaaagaacataacagtaataaagcctaattttcataatgttctttcacaacttatcttcctacatcttaaatgaatattaaatttgtttgagatagagacggtttactagaggtttggtcatagaggcttcaagcttagtccaaaacatgcaacaatctcttgcttggagacgtgtctaagcactgtatccccaaggctcaagataattgcattgtgagcttttttactcaacaatactttcttatgtttttcagccattgacttctcccgtttagcttccccttcaagtgcttcaactagaccctattgaaccagaagggctcttatcttcatccaccctaacccaaaatcatttgacacgattttccatgggcagccacttttattcaaacaacctctcttatccttgagtacaaatctctcttcctcacagttgcagattctctcaaattttcaagagaaaaaaaaaatacaattctaggacctttaaatgctatacaacataagctatttatagcactaacaaccaaacaggactaaaggccaacagtcataactgattgccttttaaagaaaggttggtatcacagaatgtttactggatcaacataacatattgcgatattaattgtaatctttgccacatccttagtggttcgcaggtccattacctatcaaacaccaagaaggatggaaaagatgatcactgtgagaaaattgggtggaaaatactagaagaatataaccctgaccagaggagatggaaatatctgagtgatatagcagagggcagttctgtgcatgtagatgatttgtcttttgaagacgagcaagaaaatgatgaagattactacccaagcttgccttttgctgcactttattcatgtttcaaggtactctttgcatgtcataccatatatatgttgaaagatttgcatattccattttgacttggagtgactgtgagggaggggttaacatttagatttcattgttttgcccccttataatcaatcatttgttgaatgataaatgactacaagtgacggagatacgcaatttaaataacgaaagattggatataatttgttcattatgtcattgcaattttacaatgtagtgctaaaattatactttgaaagtaccataataattttcttggaagagaacttacctgattagtgatgcttaatatctattaggaaaaaggtttgaaggtcacctgcttattatgctactgctcagagggagacaacatccccgatgctttcaatttggctgaggcagcatgcaaacttctgggattttgtcccaataatcttaatagtaagtttcttgttaaattgatatgtatttcatatcctcaaggatcccgacctccaggtcagtcattatatattgctaattttttaagtccttttccctgaaattcaattgcacttgatttcaagaatcttatcatatctgagatgaggtgtttataatctgtttaattttataccttttctgttgcctaacaacatctccatttattctcaatcaatgttttagaatcttattgtgtgagaagaacctcaagttggtgcattcaagtttccaacagcttgttcctaacaatatgtgattgagctttgtagcacattctaatgatgatagcatctttaaagctcagaactattttgtatgaactaatatttgctacatattttactaacagaatagttatcatgttgaatcactaatgttatttgttgtagctttcatctgattttctgtctcagtatatatcctttttcttaatggaccagattataaatagctttttacaaaccttttttctccgtacacatttataaattatatatgcgtgttaggtacacatttatatgcatgttaggttgcaacattctaatcaatttgtgccaatggttttttgtagactacgcggacggcaaatggctcatcccattttcatggggaacactctatggaccagctccagacatgtccatcttttaaggaagttacaggttagatgttaggaagaaagtactgtgtttgttttcagctcgcaggcttataattcaagtctcattatcactgaggattagttagctggacatctgtgacactttgctctgtattcagtatcatatatttgtttagcaattattttaatctgaagaaaaggtatttacaccaaaattaagaaaacgtattacaccaaaattatgatcaatatcttctcttttttgaaattaaattgatctacctccgatgctttgaagctttatagggaagtataagaataattagtatttttgctgccctctatattataacacttgttattaatatctctagaaatataacttttatggtaatgtagtgtttttttttacgttaatcaataatagaataaaatatatatatatatatatttttctaataagatatatttttatttt

SEQ ID NO: 296912 - DNA, 2280 bp, Cannabis indica
agagacatatattccgactgcaattcagtgttagatttctgatactctttatgttgtttaattttcattatcgtttttagaagtttcatatttaggtgttaaatcaacatacttgtgagtagatctaagatcctgtaaaatacttcaacagactcttcatctcctcttggaacctacagcctaaggtctccatctccaaaattttttgcttcattttgatgatccaaccttcccacaagcatcctcaacggacttcattagtgggtaagctttcaaattccattttctagttgttttcttgaatttggcattattgagttgaatcttttccaagttttttattttttgattctcacgttagattttaatccttttcacattatgatccacatgatatctttatgatgcataatgtatgatttcttgatgaaaaagatttgattttgtgctttgttttgattcttgactctttgagtcacgaagaacataaagaacacgtttgagttttcaaattatatagtttttgatttgtaggataccttggtcggcctatagggtttgtttgtgaccctggccagcacatggtgccaatttggggacctggacagttctaggcttcaacctagaaccctggctgattcttgcgttgattaaggaccgtggatggtacatgctaattctttgggaccctagccgacacatggcttcggtcctacggtaatggccaattttggccctcttttgactcttacaaggactttattttggccttttaagcctgcttaatccttgtccaatactttagtcccttaggaactttgtatggcacttcttagggcgagtctatcttagtcaattaacaacttaagacgcaatttccattcaggttcttgcacttggaacttgtactttgctgattttcatcttttactatagaactgttgggctagtacccttaggtttagttaactagtatttcttctacgtcttttcattttgtttggttgctcacctcccattgacttctatatgttgtgaaccagcgtgacttttgtggaggtgaccactgaatcgatgaagacctacttagtcttctatttgaagaccaccgtccagcttcttcagctggttcttcgggcagttcctcgagtgatctcaagaataacggcggttcctcaaaacctgtagtctagtatcactactattcagagcaaataggtagtgagttttacgaccatttttctaggagttgaactaggggtggaggcagttcctctctagtttgtggacttacattgttcaggaaggtgtgcccgatacattgcccactggttggggaactccatcagttagagatcttcttattgtagagactacgattacttttgctagacactctgagcttgtcatagcaaggaccaaacaggcctgtcgtatggcacatcgagtagggataaattaccttttatccttcaatatattttatccttaaaacacttagctctttataaataatatttcaataaactattattattactgagataagagctcttccatttatattgtttagtcaagctctaagaaaaccatcatttcactagattacatatctatgattaacgctccaactcaattacactaccgagctcccaatatgtaagtatgagctagtcctacgggtaagctggtaacgaacaagtctaagaactcgtatagtacaattaagctaaagcttagccatttcaagattgagatcaattgatcgaagatcaactaaatcacattgaattagaaaaaaataacggtaagtttatgatatctttacagctatcgaaatcggtcatgtccgatgtatagtcgagacatccattataagtttactttgctatgccctaaaaatgacattccacttctctaaatgtaagtaaatcacatcgatgattatcacatcagtgtaaatccagtgcattgatagatgtaggggtgttcgcggtgctggtggtgtggttttcgaccattttttcaaaccaacccgcacatgcagtttttccaattttccaaaccacacttgcactgtgaaactaaaaaacctcaaaaactgaaaaaatggtgcaatgtggtgtggtttttgtagtttctacggtttagactatcaccaaataattaaactatcacaaatacaacaatgtttgagaaacacttgttaaaaatatcgtaggcttgaaaataaatatgaaaaaaaaattaagtttcaaaaatacaataattagtgggctt

SEQ ID NO: 296913 - DNA, 2644 bp, Cannabis indica
cgatacacaatgatatgcaattttcggctatcatgaacatcacaagatcactaaacatatatactttgcccatatgtacacatatatatatatatatagatttaataaaataaagaggataataatccaaaatcaaattcttgtgtgtgtattaattcctttagtaattaatggaagctagtatgcattattattattatgacaagagccgaataatatataaatcttttatacaatattaatatctttgcttcttctttctggcagcttccttgtgtcaacacaaagtgcataattatcttcataatttcataaacatatatacaaatataataatattctacacatgtttacattgtatatgttttcctctataaatatttaaaggaaattatttttgtacatatatatcttttactttttgggctgtattctatatatggtttttgaaaaaaaaaatgaattatattataatatgtatatataggtataaatgatgagatagagttggattttgggaaataaatatataaataatttatttatttatttagaaaaagttgaagatgctttgtagttcatgtcgagttggaaagaatgggaagatgatgggagaaaggattctgatcacatgctgcctccaaaaaagagaggaacaagcaatcatccctcccaagtgtcttagattccaaatctaatgcactttccttaaactaatccataattaattaattaattcaaacaaaggttaccacatccaatttttaattaattaaacaaatcctttgacttaacccaaaaagtccaatatatattaattagagatatgtgttcaatttttataattaatgttcactactagctagtatctcatatatattttcagattgatccacacagtaattttttactgtaaaaattttacttttacttaaaataaaacttgtgactaaaaattaaaaaatgtaactaattataaattattatttttatattataaaaatatctgtagctaaatgtattaatcacaaatttataatttattgtgactaaatgtgtctttagtcacaatataaactaaattagtgataacttatatttaaatactatgttttagtcacaagtaattttttgttgtgattaaaagtcacatttagttacaaaaaaataatttagtgactaaaaggttgtcactaaaagtaacttttttgtagtattatttcattttgttggattggtatctcactttaattcccacatataatatgatatcgtccgttttgagcgtgagtaattctcacgttttttgttgagcaccttcctaaaagataaatttatattaataaaataagtagaacacttatattaaattttatgttgatatatacccaatatatatacactaaaaaaatattaccactcctcttaattagctagctacaccattattattggcaatggggtttcactattattataatatatgttcctgttttttggcttaaaaagtatacaaaggaagaatctttctttaatttttaatcatattttaaccaatattaagggaatatataacatatctattctatatatgcttaaaacagttaatagatattaatcaccgtaattctcatgcattttaataatttatataaaaaaaaattccatgcataagaaaaacattcttcaataaaactcatgacttttaatatattttaacaatttttttaattattaaaagaaatggaagtctatattgaaaatattatcactcaaggaaatatattggcaaacactcatgatatcttgaatactgtgggttgtaatcctaattatatattttacaatactatatttatttaaaacattgaaaaaaaaagatagaaattatgaaattaatcttaattttacaaaatcattccatataatttaacagtatccaattaataatatccctgcagatttattataacaatttatggtaactaattacaaatgtggtttcaaaacagaaacacttaaattttgttagttaatttcattatgtacacaatcaatatgggatattaattgtttatgttcctttttgttgagaatcttatttggacatttctattattaatgaaaaatacataaaataaataaaaattgtttatgttatataattattattaacttaaaaagaaaaccttcaaacataacaaaaatatgatatgaaaatttaccactaaaatacaattattatatatatgttgatgaatgcaagcacattttgactaccttattaattagtttagtagtttatatagtataatatttttcatgctattgctatatataggtagtcttgtcttatatatgagaagagaagtgtattctctgatccaataatacctatcgttgaaacctatccaataaagacagcttgtaagcaataataataataaaataaataaataaatcactacacaaacatttacttttaatttaaaaaaaaattgtaattaattataaattagtattcttatgttgtgattaaaaaattcgtggctaaaagtatattaattacaaaaattacagtttgttatgactaaatgtgtttttaaatatcacaataaaactaatttagtgacaaattgtatct

SEQ ID NO: 296914 - DNA, 3089 bp, Cannabis indica
cagatcataatctgactgaaccactataattctctgtcttactgttattttccagtttttgttgattgttttcccattcccagtcgagtactcgccattctaggttgaatactcgcacttgtcattacccataaaattctctttcatattaataaaataatataatttggtgttgcgaaattcactcgacaacacctatatatagtgttataaataaatcctttaatcctatatttaaaaaaatataaatatctaatttgatctgaattcaaaattcaaattcaaatataaatatttaataatcgaatatcaaaatatcagtagatattttatttttttaataattaaccttttaattaaataatcatcaaataatatatttaattaataattaaaagatgattaatttaatttaatttaaattattttagcttaataaaataattaaatcaaattaatcaaggttctttatatgttaccctacacgtgtagaatgggcctacacatgttggccatattttaaggtcaaaaatatattctcaattttgctacaaataaaatttattatttattcaaccaataaataataattgattaattctcattaatctcttatttcacaaggattaaaattaatattattttctctaaatttatgtttagggctgagtttatatttcgaacctattttctgcagaatttttgatcaatcggtttaagttacttttttgtttggattctttttttttttaggttgcgattgggtagaattaatgttgtcttggtcaacataattaatggcgtcttagtcgccggagttgtttcattattgctgaactcctatcatcgctagtttcattcgtttctctggtgcaatcctggtgttgctaggattttagagaaaaaattatttctgtaatatttattggttgggctgtatagatgtttaatatgtcgattgactgtatttttgtaatattattacctttttaagctatatgaaaaaattcccctttgtattacctaaacattaataattacttgttaacttttctagttatttttctctttgtgtatgaagtataattgataattatgttaggtcaaatatacactaggttccataatcatcgtgataaaatttcttaaaaattaataaaataacacacacacaaaattccttgttgaatcctacaacatgctttgttaaggtataaagtttaccaacgtgatgtagtaccaagccagatattggatgagatttaaatccttaaagtattgatcaatgctatctagcccaattctagaaaaaccatctaaatgcggagtatgagacatatacataaaagatttatcttgtcgaaaagtactcgctttgagagtccctttgttggactgcctcttgtcgagcatcttgtctatttcttaagaattagcccttgcctcttggatcttacgctcttttgctatcaaggcggtatctattgtgagagctttctccatctttttggcagagatattgacaagttcctcctagaggcgatgatccttctcaaaggaaattcaacaaaggttgggttctttgaaggattgatggttcatgattaacctaataaccccaagttatttttttctggtgacaatgttctggacttccaagtcatcatccttaaatttgacatatttaatcttgattttttggatgaacttagtcatcctagttgggtgtaaggacctattcagtacaccaaattaaaacgagatttagctaaaaactcttgaaaagacaagtgagaaatgaagtactcgtttgaagtccacaactagatagtgatgttgctccactaagaactcagtcgtgaagaactagtaatgtttgatgtttgaaggtgttgaacctcacaaagtagtcatggagcaggagatgagcttcgatagcgatgtgaccaaggctaaagggtcgcaaagccatccttgcaaatgtggaccttctcgttcttataggccaatgtattgaaaaaaagatctgatgcgtttgaagccaagggcttcttcaaccttattgagcatcaagtagtataaaattttttggggatgccatctatctcccacatattcccttcggatgggggtgtctctctaggacaacaggttcctcattcacctcatcttcaaggtggatggtgattgttagattgtttttagtattatttttaagttaatttttagtgtgtttttaatttagttctactcttgtttggagaaattttacgctttttatcttttctttttgcagatttaaaatagaaaaagatcagagaatatcaaaggaataagatagaaaaaggataaaaagatctcagaaaaagatatactataaaatagagaaaattatgcaaaaaattaaagttgaaacttcaagcttgaattcgactatgttctaattagagtttagaaaaagtcaaacataaaaattctggatctctcttttatctttctgaatcatcttgaattgtccaattctgagtaatattgagagagttatggccaaaatacaacatgtcgatgcagcaaaaaactcactgcccttctaatcctaagcaaaataggtttttttagcgtctttatctttttttttaccattttttggctatataagaagtgacttcaatagtttttaacaagcaatcaaggaggaagaaaattggagataaaagttaatcgcgaagaattttttaacggggttttcagcattcttttcttctctattttcttctcttttcttaagttaatatgtgtgattttactacaatgaacatgagtagctaaacatttaattagggtctagatggatattgtttgacattgttttatggttctaatatgattttattttccctcaatttttatgtattctatttcattcgtacttaattacttttatttgtctgatcaccaattaactgtgtataattttgatgtgagatctgagaagtgagtatcaattatgctatagtgaaatataactgaatttcaatttaggaagagagtacctgtatgatttagatagcttataggatttctgtgtt

SEQ ID NO: 296915 - DNA, 2901 bp, Cannabis indica
gttttgatatagtatagtatagtatatgtagcaatacaacatttacttatctcatattcgaagcaaaagcccgccatatacactcatcacgttttcttttcttccattactattactgttactacctactataacaactactctactacaacctgtaaccaaattttaaatctctctctttttcagttttgttttcacaaagcttttcacatctttttctctcaatttgaactaatattcctttctctttttcttttttttttttttcttaaccatatcttattaaaaagttgaaagacaaaagtattgaacttaacaaaatacaaaaagcccaattctttctctctcttttctttcacttcactacttgagagatttctgtctcagtaataatgaagctattcttatcatcatcttcttcttccccttcattatcatcctcatcatccacttctttcgacactagaatttacaattcaaaaaccgccgccaccgccggatgcatagctggaattttgcgcagaattctctgctccggcactcttcccacgcacccttctgatcaaaccacagaagaaactaactttcttgagtttgattcaaaagctattacgactccgggaacacctgggctcgtggcgaggctgatgggtttggactcgttgccagagctcggttcggactggacccagcagagaccccaaaattcgatttcccgtagccggtcgatgaattcagccgaacgggtttcgggtttggacgattcaaagcaccggagggtaaagtccacgacgtcatttcgtgagatgccggagtttcttgagctcgaaagtgaagaattttttatactcagcttcgagaatgtaaacgagagaaaaggaactagaccgaaggaggccaaacgcaaaaagggttttggagaattgaagcagagaaaggaaaagaaaagcgaaggagtcgaaaatggcgaagaagaaggaagaaaagttttgcgtgacttgaatggaaaagagttgcaaaatagtaatataagaagaagaagaagaagtactaaagataattctaataataacgtgaaacgacaagtcgtttcagatcaaaacaagaagaaggaaaatattaaaaaaattcaaggtgttaggacagtagaagaacagcctgatcatcagcggtgtacctcggaagatgcaagccctgtttcagttctagattgtgggcagttccatattgatcccaaaattcctatatcaggtaataaatccactacacatttttctaagttcaagtttgaatttagcttatggttaagtatgtcctttactattggttaaacttctctctagtagaaaatactagcaaattcctctaatggggttggtgcattttctttttcagtaacagaagtggactactgtagttcgacaacttcaagctcaaggaggaaactatcaatggagattaaaaaccgcaagaaattgtgtccacgtagagacaataatttgattagtgaggagagacagacggagagaaaacatctttggtcaaggaaggaacagagccatgatgatacccaagagtgttcggatattttggatgagatttgcaggatgagtgagactgagttggtcaagtcgaattgggtacaaagatggagtttgaaccaagaagattttaagagcattggtgaagagttggagtcaaagatttttgggcagttggtagaagaaatggtggatcagatttgaatttgtaagatttcttactaactcttgtaaatcaacccattatagctgtgtaactccacttaactcaacacaaataataagttgtgagcctgattaattgaccacagttcatcaccatgaaatttttgttatgtatagaagtagagcatcgctattttgcatctcatctccaataggagttaccccttatagtgattatgtcacatgtatacgaccatgtcatcaatcccttaatttttctttttcttttttttttttaactttccaacaaaaaaaaaaaaaagaaaataaatgtgtacttttggtaatagttactagccggcaacatccaattcaataaaatggaacatatccaatccaatccaattacaaaaacttggatattcaattactattggattggattggatgctaaaagttagattctaattggattgaatcggtaattggatgtcaatttcaaaatccaattaaaaattatccaatctaattacatttatatatattaaaaaaaatatttatatttatttatataataaaaaatatattatataattaattatatttttattaaattttatttttgtgtcaaatgtgtaactattggttgttttttgtatttattttcatggtattttgttctattttattaattagaaatgttattttttttttaattatttgaaatgtttagttgcattacattgtaatgatggtatatttatggagtattaaacttaaataaaatgtgatatttaatttttgcgtatttttcttcatatttttatgttaatattaaaatttaggtctgtaattagatatccaattacaaaaccgatccaattggattggattggatcgaatgatgattttccaaatccaattactaattgatggattggatgagaaaaaaaagattggattagatcggatgtccacccctagtagttagagttgtataccattagaatatttttatgagagacactatatatatatatgggtgactatttaatggttacatttttattgtaaccatatggttacatttttctttaacctgtaatagcaggttactaataggtaaactttccttttttagatttaattaattataattaattattttcttaaaataattaattaaatagacatt

SEQ ID NO: 296916 - DNA, 2632 bp, Cannabis indica
tataattaacttttgtcatgaacacaaaccattttctttgttgtggttttaccttgtaaacggatccaaatccaccttctccaagtttgttttcatcggaaaagtcacaggttgctttcatcatggtgtctaagttgaattgcaaagaatcatcccagctgatgtcctcttcaacttcagcttcagcttcaacttcaataagtataaaataaaatttaatattcaatggcacagagtgacacttgaagtgagtccaaaataaaacaagccagagtatatattccttatggtttagctatattacactgtatttctatttgagtacaaatgttctccagacacaaaaagtagggataacaacaactcaattatgaagaaaaaaaccattttcactcccacacccacacatatttatacattaaagtatgaaataagtactcttgtatccattttgtcaaagtttaccgagtcataactaaaatgccactgtaaatattttatcaccaaattttactataattaaaaattatagtaatatatactggttttataaataactaagttaagcatcaccctatataaagcatatgcatcaagcagcaaagcaaatgttaattatatatattaaaaccatgtaaattaaacttacttttaagattttcactcggcttcttctttaacttcagaaaagtgcatatcataatgataattatcacaactgcaacagacggaataacaacagctatagcaacaattcgtgctgtagtattttttcctgaagaaaaaaaaaagaatccattactcttctttctaaattttactaatcatatagcataaactttaatttgatgacaaaattatttagaaacactttaccttcagataaattaggagacagtactggatcagccgtagcactaaagaatggcttcacttcgaaccttaagttacaacttggtttaagaattctgccaccttgcttcccatcaaactgttgaggaatgaaattggcagcatcgtctaagcagccgtaacactcatctttgtccaaatcaggagtacactgcgcggctgcatatatggtttcgtatcctggaacagtggcttgtccagaatcgtacttctttaaagaatcacccatagaagctttgctagttatcttatccaacaacggtttaagggtaagcctaaacagattggattcccaaacgttgtttggattcgggatatacatcctaggctcatcatttctcgcagagaatattgagttgttggagtaccttaccatacaaagctcgtcccataggatagcctcccacctatttggacagttgtccaagatatttttactagagctactcacacagctccggcaactttctggggaaaggtctcctctacaaagtgcaatagcgtaggctttatttgagttttctcctatggaagaattgaaaaacccgtaagcacttcgagttttatcagaagagaaagaagacaggagttctttgacatttgtcatgaacatgttgatactagtgtcgttttcactggctaaacacttccagcaatattcagcgttgtctgtacacacaccattttgttgaggtgccgtagtgctgtaaaagggaccgttctcgaacctgagatgacagctgggtttaagtattcttgctccatctacttcagcgcaacaacctggaagcctggaacttgagtcttgcaagcaagctttacactccttctcggtcaagtctggtgtgcattgggcaagggcgtatattggcttagcgtcagcgactttagcgtttcctgttccgtacagtctttcattagaactagtttcgttaattaacttgtcaagcagaggctttaatacgtttttaaacacttcagggtcaggtacaggattcgggcttggcaacattccactggggtcttcctctaacacttgatatatagacctgttcgagtaacgtaccatacatctctcgccccataagattgcttccatctgatttggacactgatccaaaatcatacgactagtggtgtttaagcaagataggcaattggtcgaatcaaggtctcctctgcatagagcgattacgtttactttgtttaatacttgtggcgatgacaggttgtaaaatctgatggtctttggtgctagtgctacagaaggaaaagagagcaagagattgttgaggtttctttggtacaagctattagcagagtagtttccaccgttggaactgcaattccagcaatattcagcgcttgatgtacaatctatgagttgggcatggttgggaattggaagatgaatcaatctgaaaagaaagaaaagaagtagagttagaggactcatatttaacgtcccgaatgaaatcatgctgcaggccttgcaatggttttattttatagatgaaaatcaggagttatcatcaactacggtcaatacgggtcaacatcattagtcaatctgctatgcatgtctataggcactaaagaaatttcatctgaacatattgttaaattagatctcactgtaatagttattattactgtgttacaagatgaagtgaaaaattacagataaaatacaaacagaatacaacagaaaacagatcct

SEQ ID NO: 296917 - DNA, 2839 bp, Cannabis indica
cggtggttgctcttggtgctggtgccgcaaagctggtctctttgccagttgagagctataggaaggataagagagtaattaaaggaatacaaagaggtaaatttacttgaccaacattgtctacttctgtgttgttaagcttacattttgacagacagttacaataagtgtatatttgaactgatcaacaacattgtccattttgcgttgtttagtttcctattgattcgttgtgttatgggtcctctgctttattattattattttaaaaagaaatagtaaaaaagaaggtacattgacaggacttgagccagaaacagaaccatttatacgcactaaacctcccacaactgcttacacgactggagttatctatattggtcgttcagcattgttttagggcttgttcacgttataaataattattttatggatcttccggtcaagtactaaatctagttattttccaggtataacagcattcattagaagtatatcagttgaagctgttggacttggagtccatttagcagccggggctcatgacattttgctccaagcagaatataggcttacaaacagtgatcctagcataccaagggcggtatcaagtaaaatgaaggaaaatgttagatctaatcagcccaaagatgcccaacaaggaattcaacaggtgagtattctgcatatcttgattgccataccaagttatgtcaattttttgtcagtgctctcagtattgtgtaacaaacatttgtgtatttcaagatagagctgatatttctggaactgtgtttcatcatggagagatatccatttttccctaacaaaccttgactattcactgtttcaataagagccatctgctgagaagaaatgtgtctgttatttactaatttcttttcccttatctgaattacatgttacatattacaggcttacgagagcctaagcaatggcttggaaaaatctgcttctgccttagttgggaccccttttaaaaagtatctgcggggagctggcgcaggctctgctttggcagctgctgttcgagcagttcctgcagctgctattgcaccagcatctgcatgtgcaggcgctgtacattatacttttcttggctttagaaataggttcgttgtgaatctctttccctttcgtataaaggtttgttagtgttaaaatatttcgaattctctaacaaaaagtaacaatgctgttttatgtgcgcagccttgatcccgagcgtaaaaaagagtccattgagaaatatctaggaccgaatcaaccatgggaacaaaactgaattgatggtatagttgtaagacacttgccatggtaactatgttttggtcactgcaagcaatttatttactcttttatgttataatcttatgtaggcagggaacatgggtgttcctcaaaagaaatactgttattcccaatcccaaccatgggcagatcttactgagctctacccgtcagtcaatcggtcgacacgttaaatcaattgtatcctgtgagtataactgttagtagctcataatctactacaatagtttgtattattcatgattttaggtcttatggcttgtttcagaagcgcattagctggatcatggctgagctttcgagtgattctttttccatggaggcaaaacggtaactttgtacataattgtagatattagttagagggtgcttatcaaaattcttattgtattattattacactgacagttgacgagccttttaggtataggtatcagattgggcattatttgtatatttgttaccttttctcacaaccattcttttgattcgaagccttcaatttaaattgtaaattgctttttagttattgtaaatagcttttgatttgttcattggtttaatgagaagtgcttcttttagaagaaaagaaaaataagagtgttgtaatatggtaatttctcaagtttgatgttcttctagtttttacattgctattaaagagtattgttattgggtattaatagtatttagcactttaagtgatatgttgactggcgatactccttaaaagttattatttgatataataacacataagaaggtgttaggcaccacgggtacttaatattactcaagtgcttcatgctccaagataatgaaaatcaattttagacttctagtgggattggatttaaataattttttattttttaatttttatttctaatcataaagggtgtgttaggacattattgtgtaattattaggtgtgtagtaattgcattgattgtttgtttgatcaaaataattaaaatataagtcatttcattaaaactaaataaataaataagacatttaatcattatttggactttaaagtaattctaagtggaaatataatgtagtgtcactttttgtttttcttcataaaatagctatttcattttaaattaattatatggaaaaaaatcttaaaattagtatattttaagtttgtgttttgtaatcgtactgctgataatgacattgttcataaatttgctaatttagctctttctttagatgttgccaaattttggtggtcaaatttatctgactatgtgtaagtcttcttgactattttgactagtccctaataaagtggtttctctatttaaaaaaaaaattataaattaatttataatttataaacaataataaaattgcctgaaattcagtagctcatgagtgaaaaaagaagaagccatatccaatatcaatatgaaataggaaagaagctaaaattagctagatacattaacatgatgaataatatatagtaccaccccaactcatacaagtcttc

SEQ ID NO: 296918 - DNA, 7760 bp, Cannabis indica
ttgaaagtggtgagttagaatcgtcttgtggtgaggctaatgtggtattgatcccgaaaaagaaatgcacagataccatgaaagatcttaggccaatcgctctttgtaatgttttgtataaggtaatcacaaaagtgatggctaatcgaatgaagccattcatggatataattatctcagactctcaaagtgcattcatacttgagagattgatctcaggcaatggtctcctttaaagttcttcattacctcaaaaggaagagaaaggggaagacagggttcatggtgttgaaactcgatatgagtaagtcgtatgattacatagcatggccttttttggaggctatgctgaagaaaatgggttttttgcctagatggattcgtttaattatgacatgtgttacttcagctaattataaagttattcatggctgccatgatatgagccctatcattccattaagaggtatccgacagggggatcctctctctccgtatttgtttattctttgtgcggagggactgtcatctcttatgcgtatgtatgaaaatcatggttggattcatggttgtaaagtggctaatagagcgccaagagtctcatatatgatggcttatggaaaacatgttaattttgttaagtcctcaattttttttagtgttaatactgaagctaatttgaggagccacatatgttcttttctccacatgaatgaggcggtaaaaggaagcttttatttgggtctccctcgtacaatgtctctgaataagaatgtggtcttgggatatcttaaagataaagtccgtagacgcatacaaggatgggaaggaaagtttctgtcaagggtagggaaagaaattttggtgaaaacaattcttcaagccttacctacctatgcaatgagtgcatccttactttctttggaaatagtagagacatttagcgtatcatgactaaattttggcggcaaacttcaaaggatgcgctgaaaggtatacactagattgtcatgggataaactcggtaaaaataagaaagggggtggtttaggctttcgtgacttgcggatttcaatctggtaatgttgggtaagcattgttggagactccttaccagacccgagtcattggcatcaatagtttttgaggcaaggtatttctttgatggtaactttctctcttctcaactcggttctaacccaagcttcgtttggcaaagcattcttgaatcaaaagagctagttcttactagcacaagatggtgtgtggggaatggccaatctatatcagttttggacgagccttgtacctgatgcaactaatcccaatatcattttaactcacccgactctttctagtgctactgtggcaaacttaatggctatggatggttctagttgggacgaggagattattatggatctatatgaggaaagagaccgacggttgattaaaagtatccctttgcaagcttcaacagcctcggatcaactgttttggataaaggaggtgttaggtatgtacacggtaaagagtgcttatggtttattgcaacttcaaaagggcttctggtatgaagacactatatcaaatttttggcacaagctttggagcctgaaggtgccaccgaattagctaacttgctatggcgtgcttactccgagtgcctcctcacgttgttacagcttcgtgttaagagagtggtggtttgtaccttgtgctcgttatgctgtgaatcagaggaaataaccctgcatttcttggtcacctgtagatcgattcaagtatgctggaatcgtgtagggatcggcacaattccacacctggtgcataatttcttgattggtgcatcactacttttcaagcagtaagtttagagaagaaaggtaatgtcattgctgtttactgggctatatggggagcccaaaattatatcttttggcaaaataatgaatttaacccaggtgacgctgttgtgtttgctaatttttatcttgatcaatggaagaatgctacaaaatctaacatggatgcatcatggtctgaatatcagacaggtgatgggagagagcattggacaccaccaaatgtcaatagtattaagattaacatggacgcaacattgttcaagggcagtcgtagttatggcattggtcttgtggccagagattataatgtaatgcttattgagggtagaaattccttttcccatagcatggttgaaccatctcttgctgaagctataggcatgaaagaggctctcggctggatcaaaaaaaggcaatggcagaatgtttgtttggagtctaattgtctatgcgtgattcaagctttacagagctttaaaaataatttctttgtttggtttagttatttaggactgtaaatctttgtttaatactattggtactgtgtctttctcttttgttaaacaatctgctaatgtagtggcccataactttgctaaggctgctattttatttcctaatcgtcattttagtttggaggatgttccaactgatttgctaccttgtttggtggttgatgtaattagttaataaagaaattccctattcaaaagaaaattaaattacttaatttaacattattttttttatattgattttattttataattatgaggtaaataaaattttattttagaatatggaccctattatttaatcttggcctcatccttgattctaaggggtattattatcaggacgtatactacaaaagatacaatttgatagggttccaagccaaactctatattactcgaacaggggttccccttggggtcttagaatatgcctttccacgtgtcacttatcactctattcgagtatgccccagtttcatattttgttgcgttatgtcacatagtcaaagctttttatgttgactcttttctatttccaaaagttaggtacaagaagttctaatctataaacgacaatataacataactctaatacatattaagtaatgttttgtttagtgtaatataatggtaacattagtgataatagattataatagaaatagtaatgagaatgatattatgatgtttaatttatttttgaaatggtaatgagtagtgtattcataaaattatatatactttttaaattttttaaatgaagggtataaatataattttattttaatatgttttgtaatggtaatttttttattattgaaacatttaataaatatatttttgagtatacaagttgagattcgatcccatgatcctcacatacgcatcccaatgacccatattgccacttttatagttttgtgttacatttttgattaaagtgtgatggtgattacatatgtatagaagtgtaattttatttctataaatagtgtaatagtgattacattataaaagtattataagttttttaaaaaaataaacaattaaataaatggttattttattatgattacgattatactataaattaaatctggcttagttcaagtgaagaaatagatacaataataagatcaacaatgggtgaattaataaaatatggtacttattttttgggtttgtgtaagttaagttttctttttaactatattctggttttcaactagttttttttgttttattttgaaatttcttcatgttaattgttccctccatcacaatttgccatgtttcccttctcgctggtgcctactcccttactcttgtgtctttcttctcctactttcatggatcctctaatgaacaacttgcattcaatgctctctcttactgatgaggagagttctattattcacttcctgatgttgcacttcctaaaccaatggctcgaccttcctttgttctcttagccaaaattctcatcacttaaaatatctacaaaccaagcttttttgatcaaatgtttggccattagcagggtcagtttccagtcacaattatagaatacatgggtgatgatggtttatttcatatattttttggttgtgagggagacagacatcacgttcttaataaagaaccttagcacttccaaaactatctcatcatatttttggcaccagatgctttataaaatatctcaaagaaaaatatgacatacactcctttttgggtacaaatatatcgacgacctttcttaagcaaatcaagtttgttggctgaagcacttagtaatatcattggtaagtttatagaggtatttgatgactctactaatgaagattgaggtccttttttacgtgtcggagttaaactttgtgttaccaagccactaatgcggggtcaaatgatccgactgccaaatatcaaggatgaatttcgtgtacatttccgctacgagcgacttcctaaattttgctttgattatggtcacttaggtcatccctttgaacattgtatcatttttatggaatgaatggatagtggcaatgataatgattttcaatatggatcgtggatgaagggtgcaagactccctattcatggttatgatagatatcgtttagacttctcaaaataaaatacttagccacttcataatagattggcccaccactccctctgccgacattatgttctcgtagtttgcctcaactgcaagttcttcatgacggagagtcttccaaccaacttcttctacatagtgcccataataaccatgacaatgcctctccccaaatcattccaatctcaaaccaactacgccctttactgcctcgcatcagtcaaatgaacatgcctcctttttctacatttcctacaactgccactacctctacttaggagtttccaaacactacttccactaccaccactaatacaaatcctaaacctattatacctgatttcctacatctatatacctgatcttggtcatgggacaacatcccatacttctccacacaatcttttttccacctacccgcccttgaccccattacaaccatctggtccactaccttacctaaatcacacaaccataccagtaacttctaccttcaccaccacatcgcccattgccactacatcaagggattaagaaaatatctcaccgaacagtaattctaagagaccaaatgactccttgcctgtgcggaaaatgcttaaacgatcttgggttattggtggagcaacatcttcttcttcattaggggaagatggttttgtgcctttcatttctattactgcatatttaaaggacatcactgacataacagtgaaggttgcaatgcaacctcgcatttttccatgaaaatacttagttggaatgctcggggtttggggaacccgagtgcattcagacaccttcaattgcttgtccaacaacaatcgccccatattttgtttcttatggaaaccaatcttagtattaattatgttttctattgttgtcaatttataaattttaagaacggtctagaggctcccaaaattagtctcagcagttgattactacttttatggaagaataatgttgatgttacgcttttaaactatggtcattctttttttgattgttttatgatttttgaagaagactcgagcttccatttcactagcttttatggtgctccaacatcacataataagaacgactattggacccttttacgaaggctggctgatgtctcacctcttcaaccatagcttgtaattggtgatttcaatgagatcttatcaaataacaataaacagggtggatctttacgtaatgaatctcaaatggcagcctttcatggtttagaccactattttctgcatgaaaattcctataatggtgatgtgttctcttggattaagaatcagactaaagttcacacaataaaagagtgtcttaattggtattttgtcaataattaataggataatatttttgtggtttcacagatatcccactgggattatttccactctgatgatcgtgtttttactgctacatttactcccaatattaaatgaccttaacaaggaaaatgaaggagtcactttcgctttgaaaagctctggctatctgatctagagagctaagaaataatctctcaatgctggcataaccaatctacatattaccctataactaatgttctcaacaacctagagtcttgcgctacaaatttacaaatatggcatattaggaaatatgattgtatgaagaaaaatattgtagaagcccactccaaagtaacaaaccttaacaactctttgtctcgaaccagcaatgtgatgaaggagcttaagtttttggaatttattctcgatgacttattagaacaagaagaggtctattggaaacaatgctcacatgtcaattggatgaatttagggaataaaaatacaaagttttttcacgcaaaagctacagcaaggaattccaataacaaaattaaatttcttttcaatgaatcaagccacaaagttcaatcataagctgatatgccagctgtaattcaagattattttcagaatattttttaggcctccaatatcgacgaagcgaccttgttcatggtcattgacaccattccttcaatggttactactgagatgaaacatggtctgatcaaactgtttgttagagctgaagtggaagacgcactacaacaaatgggtctggatgaaagctcgaaaattgatggtatatctgtaatattttaccaaccaaattggaatattattgataatttggtcaccaaggcagtgttggggattctcaatgaaggtgttgatcccactagtttgaaaaaaaaaccatcatcacgctcatcccaaaaattaaaaaaccacaaaatatgaaagacttatcgacccattagcctttgtaatgtgatctcaaagatagttactaaggtccttgttaccagatttcaggtcgtcctttcgctggtcatttcgaagacgcaaagtgcctttgaaccaattaattatagacaacattttcgtggcttttgagcttgttaatgctattaaaaatagaaccactaatcgcaatggaattgtctctttgaaattagatatgagtaaagcctttggctgagtggaatggtgttttcttcaggaagttatgagaaaaatgggcttcgccgaccaattgttaacacttatcatgacctgcttatctacaaataacttttttttaattaatggagaagttacaggttctttgattccctttcgtggtctttgccacgggtttcctttatctccatatatgttctttatttgtttggaaagcttgttaagattactaaaacatgaggaacgagttggttgtctccatggttataagctcactagacatgctactcttatttttcacttgctcttcgctgatgatagcctctttttttatcatgtgaatgaaagctcttgccttgcaataaagtaagtgttagacatttaccatcacgcttctggtcaagtcctgactccgttgaatcgattatgtctttctcttctaataccaccttggttgcccaagtttttttttccatcgataactctctatgccaatttgtgaatgtgatgaaaaatatctgggcctaccatcatatttcggaagagataaacaacaacttttcagcaatataaaggagaaaatttggagactcatgcacagtacgagtgaaaatatttttttagagggggtcatgaagtgctttttaaggctgtagttcaagctattcccacatactctatgagctatttcggactgcctataacaccctaactagcataggcgtattacgtgatt

SEQ ID NO: 296919 - DNA, 4536 bp, Cannabis indica
tgttaagatagattaattaatgtaatcagattatcccttttgctaatactggtttaggcatagaactttcctagtttgttatgctattttgtcatcatccattctgttatttgcttttcctctgtattcctacttttcgaatattctctgccacctgtcctagggccattgtaatcattgacagtatatatacaatcattgctctcagcctctgattttgagctgagtttatctttttcatatcttctctgcattctcacttggtatcagagcaccacgctctcaccatgtcgacaggagacagtcagacccctcgtggtggaggtcgtcgaactggtactgaacagcagggccagaactccggtcatctcggctccccacagattacaaatggagcatctctgtcgagctcttcctttggatctggaggctatagcagtgcaccctttggtaacactctcactcaccctttttctattaaattagatagaaataactataccttgtggagaaatcttgttaccaccattatcagaggtcatcgccttgaaggttttgtcaatggcacacgtgtgtgtccccctgagtttattccagccatcggggaacctggagaaaataccccaggatttggagttcaacctaacccagactattatcagtggattatgtgtgaccaacttctcatgggttggttatatgggtccatgacagagatcattgctactgaagtaatgggttgtacctcagctagatctctctgggtagctcttgaaaatttgtatggagcacattcacgtgctaaaatggatgatacgcgaacgaaaattcagacaactcgaaagagcagcacatccatggctgattatcttcgccaaaaacgtgcttgggctgacaacttggctctcgcaggtgatccttatccagaggcacatttggtgtcaaatgtgttgagtggtttagatgctgaatacctcaccatcgtgtgtcaattggaagctcaagccaaggtcagtctcacttggcaagaaatgcaagagaccctgctgagctttgatagtaagctcgaaagacttcacctcttaactggtacaggaaaaaatgcagcagctacaactggtactggtccttcagctgcactggcaaacaaacaaccacatcacagttctagtggtcgtggatacagcaattataaccagaacaattctggcagaggcaatggccgtgggtccagtggtggtaacaactcaaatcgtggtggtagaggccgtggaggaagaaattctaaacctacttgtcaagtatgtgggcgctatgggcactcggcggctcattgttataaccgatatgatgaatcctacatgggctttacaccaggcagcaacaacaacaattcctctcagaataagaaagatccaagtgcttttgtggctacacctgaagttgttgatcatgatggttggtacgctgactccggagcgagcaatcatcttacatctgaccaagagaacatgactaacaagtcaacatacagtggtaaggacaaactaactgtaggtgatgggaatcaacttcatatatctcatgttggttcaggttatctaagatctcataagggtcacaatttaaagctaaatgatgttttgcttgtgcctaaaattgcaaaaaatttgattagcatttctaaacttactgctgacaacaaagtgtttgttgaattcttttctgatgtgtgttttgtgaaggacatggcaacaaagacggtggtgctgcgggggaaacttaaagatggtctatatcatttggagggatctacagtcaagtccattgagtcatctacacctcagttatccaatttcgagtctgctggtttttattttctggtttagtcgagtctaacaagcagtctgttgcttcaagtagtcaaagtagtgtgtctaaaaggatgtgtggcataggaagttaggtcatccctcatccaaagtgttaaatcaagttctaagcttgtccaatgtaaaagttcctattaatgaaaatcctagcttttgtgaggcatgtcaatttgggaaatctcatgcattaccttttaaaaactcaacaagtagagctgctagtgttcttgatttgattcacacggacctttggggacccgctcccattatgtctaacaccaatttaagatactatatccattttgttgatgactttagtcgttatacttggctctaccccctcaaagccaaatcggatgccttaggtgccttcattcactttaaagctgggaaaatcaatttgacaagaaaataaaggaactacacacggattggggggggagaatatcagtcctttggcaatcttgttgctgaaaatggtattctcttcaaccactcatgtcctcacacatccgaacaaaatggtcgtgctgaacgaaagcatcgacacattgttgaaatgggactaacactccttgctcaagcaaacatgccattaaaattctggtgtgatgcattccaaacttcagtctacttaattaatagactacctactcctactctcaagggaaaatcaccctatgagactctcttcaacaaaaaaccagattatgcattcctaaaggtttttgggtcagcctgttatccatgtttgagaccctaccaaagtcacaagttccaattccattctaccaaatgtgtcaaccttggctatagtgagtctcataagggatataagtgcctaagttcaaatggtagactttatatctctaggcatgttgtctttaatgaaaatgagtttccctttaagagtggttttctaaataactatcaaagagagtctgaggttactgtcacaactcctgagtcatggttttatctccctgtacagccacctagttgtccaaattctgatgtttttaagcaaaatctagatcctgacctgtcttgtgttaatgtccctaaccttgagtcacaaaccagtagtccttcgactgatatacaccatcaagagctatcttctgcaacaccacagtcccaactgccgagttcatcaccacaacatcagttagatttgaccaacaatttgtttgtggaggcagaacttggcacatcatctggagaaaaccagccatgtacaaaccagcaatctgcttctgtcatagcagaacaagtccaacaatcgctgaaagcttcacagcctactcatcctatggtgacccgctcaaaggttggcacctttaaacccaaagtttatacagctcaatctccatggtcaggtaacaatgctgaaccgagaactcttcaagaagctcttgctcacaagggctggaacaaggccatgtccgatgaaaatttggccttaaagaacaacaagacttgggtcttagtaccaaggaagaagggaatgaatgttgttgggaacaagtgggttaaagcaagcccctcgggcatggtatgatcagctgaagcaaactttaatcaagtggaatttcatcaactctcgtgccgacacttctctcttcttgctcaagacttcaaagtttgtaatcatggtcctcatttacgtggatgatattgttgttacaggtaacaatactcaggaactcaatcaatttataaaaaggctgaatatgacttttgctttaaaggacttgggagctctaaatttctttcttggtattgaggtttttcgagatgctactggtatatatctttctcaaggaaaatatgtcatggaaattctcacacgacttgatatggctagtgttaagccatgctcaacgccaataacaggtggtagacctatgtccttgatggatggagaagagttaaccgatgcaacacaatacaggagtgtcataggggcacttcagtatcttactcatactcggccagacattgcctttgctgtcaacaagctcagccaattcttgaagtgtcccactaccattcattggactgctgcaaaaagagtccttcgatacctgaagggaactgtccatcatggaattcatctaaaatacagtgagaaattagctattacagggtactgcgatgccgattgggcatgctgccctgacgatagaaaatcaatagcaggtcattgtgtctactttggtgattctcttgttacctggtcatctaagaagcagaccgtagttgctcgatctagcacggagtccgagtaccgatctttagctcaagttgctgcagaaatctgttggatcgagtcactccttgaagaaatacagttcaaactgccgtctattcctgtatttggtgtgacaacatgagtgacaaggccttggcgtctaatcctgtgttccatgcccgtacgaaacacatcgaacttgatgtccattttgttcgagatcgagtgctgcagaagagagttgaagtgcgttacattccctcacaagagcagattgcagattgcttcacaaagggattaactcacactaagttcaagatgttcatcgacaaacttggggtgacaaattcacccttgcgtttgaggggtggtgttaagatagattaatta

SEQ ID NO: 296920 - DNA, 1798 bp, Cannabis indica
aaaaaaccttcgtgttcatcatttttctttttatttctttactatttttatatttccgtgcaagtttatcactattcaggctcaaatttggtttatgaaaatctgcgttaacaattatgaaattcaaatgttacttttgattctgctcattcttttttgatgatggtaaaaaatatatatatttcccacatattaaaatgattacattaaagagtagattgcagcgatgtaatttttaagaccaaaaaattataaatgtagtaaaaaaaaaactttttaaattaaaaaaataaaattaaaagataaatattttaatattaattgttttttaataaatattaaatgttctacaacacgtgtcgaaaaagatgaaagaatttgatggcataaaaaaaaaataagagtattattatatacatgatgatatgtattgaaaagaagaaaaaaaaaaaaaatggtcagtagacatgcattgagagagagaaaaaataaaaatgtgaaagaaagaaaaaaaaaaaaaaaattaaatgtgtgcttcagtgtaacattgaagaaaataaatacattttttttcaaaagtaaatacattttttatcgatgcacgttatagtaaaattaaagaaagaatcgatgtatatgttaattaattgaccaataatattgtgataattaattttcaatttttgtctcttttttcataattataacatttatcattattattgtatccaaatcacgacacatatgacacatatgacatactacaaatttgtaatatacagtgtcatgaatacatatcttgtaactttggtggcatgtaatgattctatttatttatttttattgttgcatttaaaagtattgtaatactatttgaatgaacttttaattattttgttggaaaaattatttcattttgaaataaaaaaaaaggactatattcataaaagatgggaacaatttactaattttttataatgcaatttaaattttatttcattggatttttatttttatttttattccaatttctactattcatatatttttatttcttctaaacaaatacaactttcgtttttgttgtttaattcttctttcattttttctttctaaatcaacagtaatagttatatttacaacctaacagctccaaatattggcctaaaattaatatcacatcaatacaaaaagtatcattctatcaaaaagtgtatctggccttttcactttcttaggccaaatcacaatttaatctatttttgatgtcgtgtttgatatatacaatgtgtaatagtaagaatagcaatcattccaaagcacacattaagatgatacactatcacagccaatgctaatgcaaaaaaacttgctttcaacacaacaatggcaacaatttagtacctgaagatacctaaccactttttaatttcaactaggcatcttttactataacaacaattaaagagaagatgctctacatcttcatcatactttccacaaaccatacaacatggatcttcacaagtattattgaatcgatatagtcttacttttgtctgcaaccgatcgatccaatacagcccaccaagtataaatctatgtttcggagaattgaatctatcctatacttggccataccaaaaaactttattatcttcttttattattttgctccccttgcagaaaaaatattaacaacataactaacgtcaaaactgaaaaaccgtgtttttgcaaatgtcagttgtatatacgaaaatataaaaactgtaagcgtttgcagcagcagaaagta

SEQ ID NO: 296921 - DNA, 3459 bp, Cannabis indica
aagattttttttaaaaatagacatcactttggtcaactactattttatttttggaaatagtgataataaacattataattatagtaagtatttagctagttgtcaaaaaattctgaattatttttggtatggagtataagatttcaaataattagttgtacatgagtcttttttattatatacacaggtaattaactattttaaattttatttttaaaatcttaaattatttaaaatttacaccactaaaatgtctctcacaaccacaataaacacatatacatataaaattgttataatttctccaaaatgtggaaagcaaaaacatataaagtccttatacatttatataaatatgtatatattattgtaaattcaaacaaaaacatataaacattgaagtggggttttgatggtcaaaatttgaagagtaatgagtggaattaagaaaggaagagccacacccacgcttgctcctctggcagaggaaaaccatacttgagtcttgaaccacctcaaacccaaaactcacaacaaagatcttcaacatttctttttacttttttttaaggtaaaatatcacaaccaccaaacaccaagagcaaagcactctaatcttcaacatttcttaaaccttccattttctctctctcaattattttcttttatagtattcgttgccttttgctatacaaacaactactaataccttcaatattaatacttgttgtcttgatgtgcagcgttctcttattaaaaaacaaacttaattaataaatctaataaaagtaaataaaaaacaattcaacatatgatatgatgtgtattatggaacaaacaagaaagcacttgcaactatataccatcatccattggaacactccaatcacgggctacttcgtcctcaaattttcctttcatttttattacttggtatacaaatatcaacataatttgtaggtatggtatcacgagacacaacttatctttttccaaacttgtcttctttttctttattttttcaccagaagtttcatatatctaacaataacaaatacaatgtttatagcataccatcatcttaagtatggtaattatactaactcaacaaggtacaccaaataaaaataaaaataaaaacactgaattttttactaatttgacaccataattagtgtcatatctaaaatagtgactagtgtgttgaagtgtcttagtgagttgagcttgaaatttggtttttgattaaattggccacatgctgagcaacccaagttgagccaacctcagtgcaagagaaagcatgagtgtggccctctctttcaagtgatagagaaatatctgggacctgcctggagatctgtgtggcatagacaaagtaccagaaaagcataaacaattagttgaaaagtacaaaatgccaaaagcaaaagtggagttataaagaggaaaacaaaaaaggtttgaaggaaaacgaataacttcaccaactatgagcatttaaaatgagccctctctattcttcttccaaatgcttgccaacccttgttagttgttatataatcacctccagcttattatgcattaacaaaatctactctaggaacttaaaatgaaaactcagcaggcttgaatttcaataacaaagggtggaccgagcatttcgtgtctataggagacaacgcgcatcatgcaatggttgagtttggaagattgttcatggaataactatttctatatatagcatctatagcacattcccactctaagattatcttatttgagaagaaagtaatggacttgattctctattagtgtttctaatacggcaggaatagcagtcagaccatttagctgatcagattatggtctatgaagatagagccatattgatatgcagaatcatgaatggtcatgatagtcaacaacctcctataaagctctgaattaccattttaatttaacaaatgaaaggaaggttattaggaataactggctacaagagataattactttagattgaactatgtaatcgtttaatagaaaagaaaccgaaatctttgatagtagattggcctttaatttaaggtgtctgagacaaactccttgtataatctaatcagttgtcaatgccgaacagtaaaatgtgtattcatcttaagaaatttcagataagaaaaagaagtttcatgttcggagggccataattgagcatgaattttatgatatatcatctatctaaagctttgcaagtggtgatttgagtaatgaaataccatcacttacctcttcatacatttgcagtggtccccagtgatcgtcgatgccaaacaaaaacgcaattctatggtgtttctctctcataaatgtccaatctggagtttctgaaagctagcataggatgccaatagccagaaattgacacttcaatttaatattcctaccaaacatatcttactagaaacagacaaggatagctattattgtgaagttgacagaaagcagaacaaagagttgaacaatttagtctatacatagatcttcttaacatacatgtcaaatataatgagaggtctatacaataaacttgactatgtgataaccaaatattagtgatctcataaaaatagattaccttcttgaattcggtcattgccataaagagaacattccgcattgtatggaactgcaaatttccaacataaaactttctaatcacatgcatacacagattataagaaccttcattataaattgtagaaagtccacaaacaatggccaatttggataagaaaaaatagaaaaagagaagattcaatattcttgcctttgtcaagtgagagcaagtaacctcaactgcagtactagaccatgatttcccaacagatttactaacaattaaccttaaagcccagcttggtaagaatcctaatgaagctacaatggaactgaggaccacacttacaacgggggacctgaaacacgttctttcacgctgttaatcgcttagatgctataatatggaatgtcaaactaaagaagaaaccccacagaagcaatgtgcaatttgtaataggacgaaaaaatatttttacaccgaaatcactcaatatgtcgtcattctaaagctatcatccaatggagctgtttgtatatgaacaaatgacaagactgataactagtcacagcaaagtacaaaaaagttactgcagtgtgtggcgtgctgccccatggcacacccacaagagggccattttgtaacatgagcatgccttggtgcttgatcattagtcaagtctcgcaccaagcacctcattggggtattttgtaacatgagcatgccttggtgcttgatcattagtcaagtcttgcaccaagcacctcatgggggttgggaaccttttgttgtttagctttctttctttgtatttccttcacatatgtctacagagctaaaat

SEQ ID NO: 296922 - DNA, 5570 bp, Cannabis indica
aaaaataaaaaataaaaaacattatattatatttctccaagtagattctaaaagccttgaaaacatgaaacttagatatatttttttttgttcctttaaaattatttgtgtgtgttctactaaagaaatttaaatcacagaataataattttttgtttctatcttacaggtactattagtactattggagctaatgaagattctcgagaaatagataagaaagttcttctctcattgcaaaaatttctcaaagactcaaataaagtaaaccaaggaagatactcagagtggaacaagcacaataagactgacccatgtcagtggaacagtatagagtgtacaaacaacagggtaacaaggatttctctccaagatagcaacattgtcggtcacctcttcaacaacttctcagccctcactgctttgactcacctcgacctttcgaacaacaatattgatgggcaaatacccaatgaccttagctggtgccgcaacctcaaattactcaatctttctcacaatctcatgtctggtagccttaacttatctgggttgcaccagttggaggtattggatttatctgtgaataggttttcaagtgatattcagtcgagttttcctgccatttgtcggaatctaatcgtggctaatgtgtcttcaaataaattcattggaaaaattgataggatctttgatgaatgcttgactttgaagtacttggatttgagctcaaacaatttcagtgggcctgtttggaatggatttcctaggctgattgagttttcagtctcggaaaacttgatcacagggaatctttctggctccattttcactaatcaaaattgtagcttgcagttcttagacctttctgagaatcattttgttggtgaagttccagctgagatttccaaatgtcagagcttggttagtttgcatttgtggggcaataagttcacaggaaagatcccgactgatattggtaagatttcgactcttgaagggttattcctgggagataacaatttccatagagaaatcccagattcccttttggatttgaataaactagccttcttggatttaagcaagaataagtttggaggtgatatacaagatatttttgggaaattcaagcaaattaagtttctagttttgcacagtaaccattataaaggtgggattagatcatctgggattctcactctacctaatatatcaagattagatcttactttcaacaacttctcaggccctttacctgttgaaatctctaagatgcgtagcttagagctcttgctctttgcctataatggcttcaatggtacaatacctatggaatttggaaacattccaagactccaagcactggacctctccttcaacaagctaagtggttcaattccaaccacctttgggaaattgaactctctcttgtggttgatgcttgcaaacaattcattgacaggttcaattcccaaggaattaggtaactgtactagcttgttatggcttaaccttgcaaacaacaagctctccggaaacatacctcctgaattggctagcattgggataaatcctgacccaaccttcaagttgaatagtcaaaagatgaatggaactattgctggttctggtgagtgtttggcaatgaagaggtggattcctgcaaactaccctccattcagttttgtgtataccattcttacaagaaagacttgtagaagcatatgggatagattactcaaaggtgttggactattccctatttgtgttgttggttcagcagtgagaacactacaaatttctggctatattcaactgagtggaaatgagttaactggggagattcctcctgaaattggtaaaatgaagaattttagtatgcttcatttaggttacaatagattcaatggtaaattgccttcagagattgaaaatttgccacttgtggtgcttaacatcactaggaataacttctctggagaaatcccaactgagataggaaatcttcagtgcttacaaaatcttgatttgtcatacaataacttctctggtgtctttccaacaagcttggacaaattgacagaattaaacaagttcaacatttcgtacaatccacaaatctctggtaatgttccatcatctgggcaattgtcaacctttgaagatgcttatattggtaatccaaacttagttctttccaagtttattcgtaactcctcagacagtgctaccaagcaatttagaaaccaaaaggggcctagaaagtttcctacattcttggtgttcctagtcctaatttttgttatcttagttattggagtcttgatacttatagtctgctcaatggtgaaaggccctgatgtgtcagaacagtatgtattaccagaacttaaataccagcacgatctcgcttcaagctccaacaactcatctccatggttttcagacactgtcaaggttattcgcttagacaaaacatctttcactcatgcagacatactagcatccacaaacaatttttctgagagtaggatcattggaaagggtggttctggaatagtttataggggagcactccctgatggaagagaagtagcggtgaagaaactacaaagtgaaagggttagaaggcgagagggagtttcgagctgaaatggaggttctaagttgcaatggcattggctggcctcatccaaatcttgtaactctctatggttggtgcttagatggacaagagaaaatcttggtgtacgagtatatggaaggagggagtttggaagatttcatatcagacagaacaagattatcatggagaaggcgagtagatgtagccatcgatatagctcgagccttggtgtttcttcaccacgagtgttatcctgcaatagtccacagagacgtgaaggctagcaatgtgttacttgacaagaatggcaaggcaagagtcactgattttggcctagcacggattgttgatgtaggggatagccatgtcagcacaatggtcgctggtacagtaggttatgttgcaccagaatatgggcagacatggcaagccactactaaaggtgatgtgtacagttatggagtgttggcaatggagctggccacaggacgacgtgcagtggatggaggtgaagagtgtctggttgaatgggctagaagggtggtaggtaatggccgaggaggtgtgtctagccgagcggctatacccgtggcgatcatggggggttctggatttcttattgaaggaacagaggagatgtctgaattgttaaatataggaatcaagtgcacaaccgagtcacctcagtttagaccaaacatgaaagaggttcttgctatgttaataaagattatatgcactaggcaaggagaattaaattatggtgcctctcctcaattttgattaagattttgatatggattccatgtaattttaagatgttaatatagtttattatacaagcagcaattttcgctgcaattcttgtttgtatacagactcattcatcattcaaattttacataaatagagtttcactaaattgctaattgatttctttttgatcttgatttaagattctttgtatagttagcaacactttcatcactaatttttaatttattataatctcaaggttcacgcttctttgtgattgttcaactaatttaaagcatttgttgattgactttatgggcattgcagaaatttcctatgcgcccatcaaattttacttgacgaaaagattattttcttaatgaaaaaacatgtccaatacaaagtatcacatgggtcatatatgaatttgcatatgccttttcacataatttagtttaattaaaaattattgcaacgtaattatacaaacttcaaaattactgcaaaaatcgtttgtgatctcaaaaaagaaaaatatcagaacactttaattagtttattaaaaatagatgaaccaacaaggaatgagacaattactattttatcctaaacatgggcatgaacaaaccgttttgctcctaaaactattttggtaaagtgatataatccaacctttgaaaaacctttttgataaataaatcaaggttcatttgaataggaagggtccacaattaattatttcattattggccgtataaggattaaggaataatcatagctttcaccaaagggcattaagatgaagtttttgaaatttgatcaaactgatcaagaaggtattaagatttgcctcctccaacatcatagaaaaagaaaaagaaaaagaataatgataaatttactcgtgaatctgttgttcagcaattggccacattcacacatatctcatttatttatttagtggattttgcacacaatgtacatgactccatattgtacatttaactagaaaagtttgtttccacttctacacctaacacatattaaaagttttaattttttatcatatctattagttattagaaatattaagactacatctgtgactggcttgtttatttatttataaacaactttttacaaaccattaacgcaatatataacactattcacactaaattttatcaactatcataaacacaattaaatgaatactttattgtacaataagtacaagaaaggatagttataattgtttattatgttagttgatccatcattattgcctgttacaccattcatatctctatttatcatcacaattcacacacgtgtacaaataccccatcccaatttcagcttcaagttatgacatctattcgggactatccattaattaagcatttcctctgttgcattcaaatgtctaagcataatttacttaaaaggcactagtagtgcctaatattttgtttagtgttatactgttattaatataattaagtgtcgggtgttatataacttaagaaagtaacttttaaaaaatatcgttgatcaagcactgggtgctacttacaaaaggtattgtaaaaaaacttctgaactaccatactttatagtttgttcatatctctcttctctctcttcttttgtgaccaatattgacctatttacttccaaaccaactatgaggtggagacggctcagagggctatataggaaaattgtcttggaaagaagatgaagtggtcagttgtagccaacgacaccaaggtcactgcaagggcaagaacctcaccctcaaacttcaaggctactctattgggaaaaactgtcgtcaccgcttacagcaagggcaagaacctctggttccagcttgattcgcctactatctcttccttctaattcagtactttttggtttaaaaaacctcaaaaaataacgcagagttattctaacagggtctttatgttggaaatattttaccaggatcttagatttactaacaagtatgttgtttaaacatcctaaatgtgaacttccaaaacgatattaaataaacacatataaagtatcaaaaaccttacagtagttgcagcggaatataatgtctccttccactcagatctctaacccttgtatcttttctgtcgcaaagtatcaccaagatctgagcccgaatgtc

SEQ ID NO: 296923 - DNA, 4749 bp, Cannabis indica
tcatccaaagctccctaaggataagatcgtggctatggttgttttggacggctggggtgaagccaaacctgatgaatacaactgcatccatgtcgccgagacacccaccatggattccctcaagaggttaactttcttttccttttttggattgatcttatgcgagtggttttttatttttatatgtatattgatttggatctgtgcacgtgggatgtttatagttagtgcctaaattgtattatgtcttgtttcttagttttatgaactgggcaattttaaaaatgagaaaaatttaagctagcattattaccagtggctgtgtgctttgtctaatatctttactgggttttgatttggtgaagggtgctcctgaaagatggaggctagtcagagctcatggcaccgcagtaggactcccaactgaggatgatatgggcaacagtgaagttggtcataacgcacttggtgctggacgaatttttgctcaggggtgagtatttcagagaaaagttctttgtttttagagtttatattgaattatgatgagtatatgaaatcactgtcatcacataaataaataagttgtacacacaaacacatttgtttttcccctaagtttttttttttttttttttttttttttttttcctatccaaggtgtttgcctaataaataaacatttatacatatttcttttccaaatgtagggcaaagctcgtcgattctgcacttgcgaccggaaagatttatgaaggagatggttttaagtatataaaggaatcttttgaaactaacacattgcatctcattgggttattgagtgatggtggagttcattccagacttgatcaagtgcaggtaggttttttcaaatggggacaaggccaagcttttctattttatcatggatttccttttaatagttaaattattgtctcctctcttctcttccattaactcttactctttctttttcttgcagttgcttcttaaaggagctagtgagaatggcgcaaaaagaattcgcctccacatacttactgatggtcgtgatgtcttggatggttcaagtgtgggatttgtggaaactattgaaaacgaccttgcaaaactacgtgaaaatggtgttgatgcacagattgcatctggtggtggtcgtatgtatgtcacaatggatcgatacgaggtatgatctatatatgtttacgtctgtctaattgcagtagtcagtactatgatcgtctttgttttgttactttgctatatattattcacggcttctgttttcatacatgatataaatctgtgttaaattgtataaggtgaatagtaaacataatatgatgtgtgtgtcttattctgcacttctctttccgtcatgtaaaattgcatagcactgctcagttttgttggtggaataatagtttatttgtttcataaattcaataattattgtttccaactttccattgaaatgtctacatgggtttttctagactaaacatgggaagggagttgacggcccttacggcatcaattttataagaatagttagaatgtgacattgtgccagtatttgaatttctttccaacaaagtatcttatgaaattcatatcattaagttaatatatacatggtcattcaatatttgtttagtaattaagtatatgctttccatgatcaatgcttgtcaataaatttgtagttttactctaaataccatgattgttgactgtatatttctctttattaatactaatcaacaaagtttttgctgatttgtcccttctctctgttaagctgcttgtatttgagccatggtattatacccattgttgtctagtctagtatgtatagtatgcatctggatcagttaattactgagctcattcagcgtggaaaactatctccatctaaacgggatggggatcatcatcatgtattttcttcttaaggacataaaaatgtcaatgttataagtactttcctgtttgaaagaatcgtaccttttgtagtcaaactccttattgatcaattgtttccactgacactaattttaatgaagttatttaccgtactcgtggtgatcaattatttgcagaatgattgggaagttgtgaagagagggtgggatgcccaagttcttggtgaagctccttacaaattcacaaatgctcttgaagctgtcaagaagttgagacaggagcccaacaccagtgaccagtacctgcccccttttgttattgttgatgcgagtggaaagcctgtaggtccaatagtggatggtgatgctgttgttactttcaacttccgagctgatcggatggttatgatcgcaaaggcacttgaatatgaagattttgacaaatttgatcgagttagagttcctaaaattcgttacgctggtatgcttcagtatgatggtgagctgcagcttccaagtcattaccttgtctctcctcctgaaatagacagaacatctggtgaatacctaacacacaatggtgttcgcacttttgcctgcaggttagcccatgtcatttaaatggtgtttattcacatatgttattttaaatttaattatttttacttcacatgccgcaggcatatttcactgtggttagatgactacttttagcctttcattcctaaagtatttttcaattatatttgataataaagggaaaacttccattatatcgtgaatgttttttttttgtttagaaaatcaaatgcattctaatgcaggataactctatgtatctatgtccttgcttttacaatttcttaagttttttacaatgtttctcgtataatcttaccatggtgatgtgtctttttttgagtgtttaccaaccaaacatgggctagagttccaaatttgtttgtccttctgagccattctttctggactttttgtattgcttacctattttcttccatttttcccctgaacagtgagactgttaaattcgggcatgtcactttcttttggaatggaaaccgctcggggtattttaaccctgagatggaagaatatgttgaaatcccaagtgatagcggaatcacatttaatgtcaaaccattaatgaaggccgtagaaattgctgagaaggcaagggatgccatacttagccggaaattccaacaggtattctgtatgttgcaccttactcataacaaataatcttcagattgtacaattgtttattcagtaccttttttctcatgattcatcaggttcgtgtcaacttgccaaatggtgacatggtgggacatactggtgatattgaggctactgtggtggcttgcaaggctgctgatgaggctgttaaggtacattaactgcgagcctttactatttaaatatgttaaaaaagaattgtattgacaatttgattcgattgaaggctattctaaagatatataatctacatatttactgtaatttataaaatgtgacacacgtgattgcagattatcctcgatgcaatagagcaagttggtggaatttatgtcgtcactgcagatcacggaaatgctgaagacatggtgaagagaaataagtctgggaaacctcaacttgacaagaatggcaaaatccaaattcttacttctcacactcttgagcctgtaagttctataaattctttctgaagtttacaaaaagtaatttgtttttcattggcatatgaaaaatatatgtccacataaataattttgatgctgagtcatattatggtggaattgtcaaatcttttatcaagtaactccacccattgatttaatgaattgcaataattttgaaacttgttggattttttatatagtgaatgttaaaatagttgccgaagattataatgattatataaattcttttttcaggttccaattgcaattggaggtcccggactagcgccaggtgttaggttctgcaatgatgttcctagcggtgggctagccaatgttgctgcaaccgtcatgaatttgcatggatttgaggcacctagtgactatgagccaactttaattgaggtggttgataactaaaggctgcaaagaaagaacaagaatgactcgaggttttaataataattcgtctaaattttgactcaatttaaagccatacataggaggctgtggattatggttcaataagttgagtaaacttttattattgctgctatgatgttactttctcatagctgtgacagaacaaagatcaaatataatccgatttttgtgttcacatgattttgtcattcatggagttatatacaatgccaatgattgtatctacttttatgcaatttattttgggcttttttccttaatagattttttaggcctaaaatttacatttttatcttgttaaagaaaaataaactaaaaaagaaattaaaaattttattttaaaatatacggacggactgaaacaaaacaattctcatcttcctctctcttcttcctttgtttccagctgtaccaaagcttccatatctctatttttatttcaattcaggcacgattttaggtccaaaaaaatcgtataaatgagaaaggcacaatgaagatctcaacaacaaagcaaaataatcttgacaaatctaaaagtaaaaggtaaaccagaaaaaaaaaatgagattacaaggtggtgatatgacactttaaattttctctaagactattattttcttttcttcttaattctcttatttttttttttaaaaaaaattcatcatctt

SEQ ID NO: 296924 - DNA, 4951 bp, Cannabis indica
aagtttgagaatttcgtaacctttttcggaattgatgataaatttaatgtcatgagtgaaccaatcataataaaacacatttccgagaattttttcggcctgaggaatgggaagctgtgttatttctccggttcccaggtttcgaacgcggcagaatactctgtgacgatgctctattatcaagccctcatagttgtttgggatctccatggaagaaaatagaagaaaagatatgatcgttgttatattttttcttatttcttgaactgatgaacagaattacatgaaatgcaagaaaaggaagaaaatgatttagacattaatatgcataaattaagaaagaattataatacaataaataaagctatatataataatatgaaaaagaaaaagttacaaaaaagaaatattatacctagcttgggatttttgaaattttcttgactttccaaattcttaagttgaatggcgcacgtacaattgaaaaggaagaatttgcaagaactatatagataattaacaaataattaagatgatcattaacaatgagaaagcaatagaatattatgtatggtagagaagagaagagaacttacattattgaattgaaattatttgctctaagctgagatgataattatgtctctctaatctctattatggcgacactgtgtttgtttacttgtgatgaaattaattactttggtctctcaacactaattctaccaactaattataatgtaagcacatttataaccgtcacaagatttattttattttattttggttgcaagataaaactcggtttcaataagctagatgaagaaacacaaattatttttaaaaattagaccaattatgatcttttttttatttaaggtataaaaaagaaattattaatacttaatccattttcattttgttctaatatatgaggagtgctaattacaacctcctatattacaaccacttagttaatctctacatccgaacttatatgtcagaattttattgttttaattttttttgtagcagtatttgttatatttacaatgtcataccttgtaaaattataacaaatttcaaatagtttacagtatgaaaaacaaaactttcggatattctaatttaccacttgtgtttaaaaagttttgaacctatttttggtattataaactatttgaatattttttaaaatttctagaactgatgttgtaactcactgtaagaattatagtttttagtgacagcactatgagtggcgccatgccccctttaatgatgacaagttttatttaatatcagtgaagataatatcgttactgataatattttatgaattttgaaaaaaaaaactagtaggatttttccctctaaaatattttttcatttatttattttatcttttataaatttttttcattcgaaagaatccaaaccccttccctttgttatcaatattaactaatgttagttagtttcgtgttgattcacaaagttgacataaacaccatcttgccgtgaatgatctttcggtgaagatgcaagctaatgcggcctttggcaatggaaaatttggtgttcgacctttttgccaactccaattctgttgctccaaccaatcaacaagcaccaccaacaggtcgaggcatgactttttccaggtttcctaatcagagggtggtgtgtcaagtatgcatgagattggtcatgcacactactgttgtgtgtgtcattatcgttttgacaagaattggacagccccaaaaccaggttaccttgctaattgtgcctttttcactgaattaaaatttgactgcgatcctcaagcatacaccaccactattgtgcaagactttcactacaacaaatttggtcattagcggcagaccacaatatccgccgctaatggggcggtttattttttctttaaaaaaagatacttttagcggcggcagtccgccgctaatgcccgctgctactaatattagcggcggaccctgtcgcaaatactccgtcgctaatgaatgggcgtgataaatcccactcattcagttcgaatattattagttagtggcggggcattagcggcggaccctgccgctaataataattaaaaaatataaaaaagctttttataactattagcggcagactatctaccgctaatagtctgccgctaagaactctataaaaaccccatcagacctattttccccttcttctctttaaatcccaaacttctgaaaccctaattttttcctccatttttgaccaccagcagctgaggtctgattttggcgaccaccatccccacgtctccgattcctctttgcgtgcagctacaaacaggtatggatcctaaaccttcccttatttctcagtccgattttgggtttttatttgtttttgaattttttatggcttgtttgtgatttgtttttctttcgaacatatataactgtatgtctgttagtggattagattttgatctgttgattgccgaaaaaatttgtgggaaaaatttgtggattagattttggttattttctctgtcttttgatttatatgtgtatacatattaatttttgttattttgtatatatatatatattttatttgagtatatttttgaaatctaatgtattgtctgtgtattctatacatataaaatatatatattttatttatatatgtgtatatataatgtatatagttttggtaaatgtatatataataaataaatatattttgtacagtttatttacatatttgattgtagtatatttttttttatttatttacggtggaaattgctttgtaagtctaaatttgagggtggcatgggatttcgttcttttgtacattacaaccaagctctacttgcaaaacaagcttggcgaatatttgacatgcccacatctttactgagtagactcttaaaaagtagatatttctcaaataacaactttttaaaggctcgacttggtaactctccatctcttacttagcaaagcattcattggggacgcgaattgctgctcaaaggccttacatacaaggtcggtaatggttaccatattcaatgcggatttgacaagtggatactaggacatacggatttttctccgatcaattacacaggccctccatctttgaatgtggctgccttaattatggaaaaaagggagtggaacatcgagcttctcaactcaaaatttaaccaaccccaaaaaaaaaaaaattctctcaattccattgagtttctttccctcgaatgacagattaatatggcatcataccacttcggggatttatactgtcaaatccggtttccatctagctgccactttggatgagcaagatcaatcttcatcctcgaacctccatagtacgtggtggaaaactttttggaatttgtctcttccatcaaagatcaaaatatttgcgtggaaagttatgcacaatgcacttccaactgccgctgccttacataggaggaaagtgattgatttatcccctgcctgtttaatgtgtaccaatgcatgggaatccattgggcatgccttattctcttgcaagcacgctaaatcggggtgggaaaacactggcttctctttcgattttcgacaagcacaacaaatgtccaatggtgattaccttttccacctttcgactttgcattcccaacttgattttgagcttattatatgcacaatgtgggctatatggtcaagtagaaacaagaacttacatggtagtgcaagttcggatggaacaacgactgctgcaacaacgactgctgcgcctactgctacttcttccagcaacagccacaatgtaactgctgtccgttggcagcctccaactggtatgggattaaaaatcaacattgatgctgttgtaaattctgcagcaaaaaattgggggtaggtgccattggtcgggatcatggtggccatgttgttgctgctctttccaagtcagtgcagggctgctttcggtcagatgagatggaaggcaaggcacttttccacagtttgaattgggtattgcaacatcaaataagcatcacaaacattgagaccgatgctcttagagtcttccaagctctaacctctacatcgacagatttatctagtttctaagatttaatcttagatgttcgttatcttttatcctttttccctgaagcataaatctctcatactaagagaaatgctaaccatgctgctcatggtttagctaaacatgctttagagttggatcaagacgtttgttggttaggggaaattccctttcctattttcactactgttgtaaatgattgttgatatagtagctttctatagtcatgacgacaaaaggttttaggaacaatccaccagagatagtgcctttgagatatctcagcaacttcttgcatgcttcccaaagtaacattattggagatttgagaaattgaatgagttttttgatagcgaaggcaacatttggtctggtaagagtaagatattggaaagccccaattatgcttctgtacaaagtaggttctctaaatggttcttcatcatttaaagacagttttgttgtattgctaataggtttagagcaaactcttagctccttccatatgaagcttaactagaagatttgtgatgtgtttagtttgagacaagaacatcccattagaatctctaaatatttccaagaaagtagtgattatcacctaaatctttaagagaaaactaattgttgaaatctgtaactagtttagatataagattcttgtttgggtccgttcctagaatatcatcaacatagactaggagtataagaaggatgtcgctagtaccatacacaaacaaggatgtgtccggttttgatgttttgaaaccccaagtagactagttttaagtttgtcattccaagctcttggagcttgtttaag

SEQ ID NO: 296925 - DNA, 3093 bp, Cannabis indica
tctctctctctctcctcctctctctctctctctctctctctctctctcctagtctcacacgacacacactgtatagtgaagtgtgagattgtgataaacactatctcaattacagtatctcatgagtggagaatatattataatacataaatatactcatcctatagaatctaatagctcactctatttctaagtgttgaggttggcttggaagattgtggtgtgaactcttcaataatagtcttggattggatgatcgtaattatactaaaagatagcgaggatctcctgataggctaccagagatattgtctctcttttcagtagtgtagatttaatttatatatattacgttgagatctttagacttatggttcatattggataaaactatttttttatcaaacctgcttctacttttctaactctgatatggaccataaaaactaacaatgggtatcaagagctatttttataattatatagattaaatattgggttggatatttatgcattatatacatgttgatatattttgaatggatggaattaattttcttttggatgaatttgaatcgttaattatatgataaaaatttgattaggaattttataattttttattaaaaaattgtacgccataattgtggtataaattttgatttattttattattaacatttatttgtaaattttgttaaattatgtcaattcaaaatccgcacattcctccattgatgagtgagctacgggcttaaggtgtaaagcctgacctcattgagacaatattatttaaacttcgaacgacgagccacgaacctcgaagggcagcgacttcaagctttgaggctcattgggatgagacacgtgatttttcacgtgggaatgcatggcatgcatggttggaacccaacgtgaaagagagaggagaacctgattgggttcaggttggatgacatccaccataagcaccgtctggttttgtggctgcttggacgaagtcgactggcccttctgggccactggttgacattgacgggcatggaaggaagacctctagtggtcccttgttttgggctcagtcgaacaaacaattaggtctcacgacccgactacacctaaactggagctttgctccatttttcctcctcccactaccagtcaagccaccgataacctccctcttcccttgccacctcatggccgacgatgacctcccaccaccaccatcaatcggcctccatggtcggcccctatatatatgtgtacacatgtgtatttatataattttttgattttaataatctaattattaatttaaaaattaaaaatatgagatattgtgttcggttttgaaatgtgcattattcttttttatcttaataagttaaaataaagttattgactcaaaaatctggactggacttctaagcaacacctgcttgctagtttagcgagaatatgaaaagttacaaagtaattaatgagagacacaataatttatagtagttcacccctattttgcaatagtaatggggctatgtctactttgaccttttatttctcacgagatggtgttacaacaactgtttaagtatcagaaactttagactctacagagagaaactctgacattgtggacagttttttgaatgtgaattataaactaagggagctctccttttataggtgaaggtggcccacaaaaataggagataagaatacaaataaagtgctttccaccattgatgatgatctaatggtgaaatttagctttcgggaaagatatttaatttttggtgtttggcgggtcccgctgcgagatactcatagtttattttcgtaactcccttgggggttaattgatagcttcagaatttcagctagtgtgtgaggcatgaatttatagagggcttaaaaagatttaaaattcaagtcaaatcgcatcaatcagatgaaaattgagtgagttatggctgttatactgaaggcactgcccaagttgatatctgatgtcaacctaaacgttgtaaaagggtagaaacgtctaagggaagtcctttgagatgcccaagtgatgatttgacactccttagtccttttatatgttttagtgaagctggtcacttgttcttggagatattgctattttgcagaaacggaagactcaaaactttcggcttccgaatgagccaaaattaaagttgtgaatttggctgatctgacttcaagggtcattgcacttgtgaaaaacttgacggatggggacaacaacatcagattcgaataagtagaacccaacgaaccaggccaaatgttgacctggacgttggggcctttaaattaagctcctgagattctatttttgatactttcaaggcttctaaggcttctaaacttgaggatggctctccccccatttttgaccacgccggatttgatggttgcatctaatttgacattcgaggttgattgttaacctgggtgctaggcccaacaccgagtcaactaaggcattgggctctatttctaaggacttgagtttgtggttttctccttgagtgtacttgattcgtcattatttctgatgacgataaagattcctagagcactttttttctgatctgaattggaaacagcccaagttgacaaaaatgtcaacatgggcgcaaggcccactcctaggcgtcaaccttggcgctgggtccctcttttgccccttcaaaagtgttgtttagcccctagaaatagtttatttttaatgtttattgaaggtagagatcatgctcgaaataattttgggagaactccattttttgcggcctaggttgaccaattctcaacctaagcgcagggccagcccaaagggtcaacctgggcgttgtgcccagaattggttatttttccttagaaaggaccttattttccatttttgatgaataaaatttcaattcaaaagtcagatctttgatcgaatgcatggacgacatccaaattgatagattgtcaacttggcactgggtgctcaaaaatcaacttactctgaatttaattcctgtaacaccctaactagcataggcgtattacgtgatt

SEQ ID NO: 296926 - DNA, 5768 bp, Cannabis indica
ctcttcatcaaaacataataccaaataagcatattcctctaaaactaaatcagaattaaaataagattagtcatcaaaccttagttaaacatccttactctttttacttacatagtcataaaagttgtcgtttttgttcttttgataaaatgaaagttgtcgttacaacaaaagaaggcccaaaagtaaaagggccctctctcgtggtatgatccgaaaactactccacgtcagcaaaaagtcaaacagtaaagtcaaaggaatgtaacgtggccaattctaattggctgagctggcgtggtcgaagaataacagtggagaaaacacaaattggagggagtaagatgtagaagaagaagaaggagaagacgatggtgaggtgggaatccaaatgggttgctcgtttcttcttcttattcctctcttcactgcttattctccaatacccttctcttgtttcttcgattcaggtatgttttgatttattgctttgaacaattcaatctgggtttgtttcgatttctctgttctgttctgggtttattcttttgttgagtataacaataataataattcttagtatttttaatcttataattccataaaattcggggaatggctaagatctttgtgcattagacatgggtttcttaataggtaaggtgatagttaataagctcaaattgctacttcaagttgatatttatgtttcaagatttgctcatatgaattttggtagtgaagatcatttattcatgtattagttatcactattctgtatggtttttgctcaaatgcttactaatttcacatacacattgtggtgagttggtggttattaattgataaatataccattgttgattactatttccctctatttgtttaagggttcctccttgctgggttatttattgattctatctgtgaacttgtgctttccaagttattcaattctatcagtttatggactctttttttttttgtcacagggtgatgagggatctgctacttcacggtaatttggttaaaatattgttttgaataaagatgtaatctgacattggatttggtattagtagttgtaattttagttatttgaaatttaaaacttgggcaaaccaaatatacgatctttgtaattaataggattagggaaccagaatcgttggttgagtgttgaataggattgtggacttaattcatagaattatgatctttgtgaattgtctcatcaatgtttgctttggatttatgtttttaattttcagaaatttagtggaagagattgaagatgctgttgaggtacattgttcgagagaaaggagtagggcagcatcgaaaataattgaggaggtattagaatagtctgtgtaccatccatttttcgaactaggctgcttggcttgttaacttgtcgataagtttatttcatcttttgttgcagtatttgattccatttattgagaaacatcagtatcagattccaaaaagctgtaggctgcacccagacaatgatctgtttagagatcaggagcaacacaagatccgtattgatgtagatgaatggaaatgtggatactgcagaaagagtttttatgaggaaagatatattgataagcattttgaacagagacataacaatttgcttaatgtggtaagttgtaaattcccccaagtcacccttttttcttaccataaattattcaagctgtgctcagttatgttatcttgcacaatttttttgctttgtcttcaatatttcatgcatatatagccaattactttatgttttaagtataaaatcagaatggataacataaaacatcagagtttatggaataaccataaccatagcatcaacatataccgaaatttgtatgtgcacattcgatgaacaagaagcagttagattaaaccataaccatctcagatgttagaatatactagtaaaaattctggtataaacatggcattttttcgttgatcaaagtcataaaagattttcctagattttaatctatatttgctcttcttttaacgaagttttcagtccatttaagttctcagctgtgtgtgtgtattagtttcttttcccattctctgttgggaaccatgatcttgcgattcggtaacattttattcactgtgcttcatgcagagtcacggcaagtgcttggcagatgtatgtggagcattgcattgtgaccaccatattggtttgccacaaaagaccaagtgcaatcctgctgcttctgcaaggaataaacatttgtgtgaggtggtgtttggttctaacaaatttattacataaatcttttaaacactcgttattaataaagtttagcttatcaattttatgcagagcattgctgatagttgtttcccagttagcaaaggcccaacatcaagtcgtgttcatggtatgtttttcttcctcatacttgcaaatgttttaatgaaattgtagattaattttcagcttcttatgatactgctttggatcattgattgatttcacagaattcttcttacgccaattctgtgatgctcacacttgcactggaaaatcgaaacctttctctcgtggtcgcaaggtaagtttacagtctaaggaccttaatgggattcaattattacattgaagatagcagttagttctcatttttttttcaatttttcttcctcctgtaacaatgtatgctgctcatctattatgtatgtacagaaaagaatgaacatactctacatcgtcatctccgttttgacaatgttgcttcttctgtttttctacaccttcatttacttgtaccagaggtatctatctatctatctatctattcaatgtcctagtttgttaaaccattttaagtacatttctaaaggtgggtttttccaatttttcggcagaggggtgaaaacgggaacacaaaatctgagacgcgtatcgcagagtggaaggaagaaaaaaccctcttagctggtactctcctgcattgcaacaaggatagaacaaaagaattatttgtattcctgcttcagttctgtttttcgtttttctttgataagagtattcctgcttcaaatctatactagagaagtgagacaagagagaagattgttttgtaccaataaaagatcatattggtactcttcttcttcttcttccatttttcattgtaacataaacctttgaaatgagtagtagtcaacaaagaaagagccatttttttcaaactagaattcttgcctaactctataatatttgaggatcagaaaactataacaattgttatgtaagtatttaggaaggactccaatctcaaattttcgaaagcgaaccaacctctcatgttgattgaaacttttgatgaaaattcataaaaagcaacttagtattcattttcttctatttactatttacttgcactgtgtatctatactatactatatgtatataatttaattcttttttcatgatttctaatgctaatgaaagctcataataaacagttaaacacagtacaacaaagctttgtgtagttgcattaaagagtagacaaaatgcttggtgttttttttggttagatagtaaatagctgtctataattcttttatgaaaaaatttagaatattgttattggtaatttaaagtgtataatactacaattataaatggaatcttatattacttttaaaataaaataaaaaaaaatatgtttatttttgttaaatgaatttcatctaatattataagacacaaaatagctgcaaatatgtctgatttgattttgaattacatttgtacgttattatattagattaataaatgactttttgattaaacaaaattggattaatttaaacaaactttaaaaatatacatatatgtatactatattttcttttaaattctattactattagaattgagaatgtactatatatttttgtgttaggtggatagtaggcttatacatcatactcctccacacttgaaacactatactctctctcaaactctattaattgaacaaacaaacaacaaagctacaacaacagttaaatcttagaagattggaggaaatttcatctcaatcattttcttttaggtggatcgcggctaagtctgtgctttttaagcaatttgatgtaattcctcatgaggttaaacttgttggttcccaaatgatgaaagtaatcccatgaataaattccagttttatgcaagtcatcaaagattatcctgaaatagtgtcaacaaccctttaaaactatcagtactatatattcactattttagtgacacaaacaaatttcataagcttactatactagttgtaccttaccccatagtttcccacaggttctgcagacatgattcccacttgacttcgacccgaaatcacctgattaagggttcatggtgtaagcttctcacatttttttttactaaaaacagttataaagttttgctgcaatatcatattaatgatcccaactcccaccaactatgttgctataaagtcaaaaatcctatgatgaaattagcaaactttgaaagtattaacaaaaaaagatcattaagatttggtgcaagatatgagttacagggatcacaccattgactctgatttcccccactgatcaaattattataaaagcaaggaaaaattatccaagcaaaatcattgaattgaccaattaagcttttatggtattagctagagaaactttcatgagcttcaaggggactaaacattatcaatgttttatgatctcaaactatcccactaatcaaaatgtttcaaaatccaaggaattatctctaataacaaaaattaggtaagagtaaagaaaattcagcaattaccttctcacccccaattgacctaacccttccatcagcagctggactatatattcttaaaaactcagctgacaagttaaatgcactgccattggaaaattccacttctacctgaaacaaaaatcacatacattgtaataataaattctccaaaacaaaattgggtttttgaatttttcacttcagaccccaaagaaggggacaaaaatcaattttcaaacaaagcttgaatttttcatctgataaactgaaacccatatagcatactcatctacttatctaaaaagtatcatgaaaagaaaacctaaattctatgtcaaggcattgaactgagattggaatcacatgctaatttattaaaattaagtagattaagaacagacaaaaagtgaaatttaacagaactagaacaaaaaaattacacattttggagcgtgaagatagaatttggtcaggcgaggagcatcgacggtggtgtaaagcctccgaaacattttctcttctggttttttcagcctcttcttcgttttgagttttttttttttgaaagagtatcataagatattattgggccgacattccttgtcaatagttagtgggctttggcccataaagtttcatgtctgtcatcaggcctgactgagcaagtggcccaagtcggcccaatactagtttaaaaacaatgatgaacgattaactcacgattaccaccacttaattttctccatttctcttaacaaacttaaatttattcatcatctcaaataaaatactaaaattatcttatatacaatttttttttttattttttttaattttactagtttgtagatgctccaataatttttatgtagattgttatgtaaatttaattgcgatttaaattgctccgttagtt

SEQ ID NO: 296927 - DNA, 1752 bp, Cannabis indica
taaaccagggcatgaagggagcagtgtcatgaattctatctatgaaagtccaagtaataaatttggaagaagaataaggagacccataataataactaagagagaaagttaaaacatgaacatcaataatattgttccaaaataacaaaaggcctcccgtaaacctctcattggcacttcaaaaatattatcaaaaattaaacagttcttaaaacgagttccatggccagactggagcttagtttccatgataaaaagcaaaatgggtcgatactgtttgttcggtgattgttttcgaaaattaatttttcttttaatcttaatttttttctttggctcaaattctttccttccataattccattaatttttcactcattgttttttttttttttgtaaagcactcagcttttgttatttatcccgttaagtcagtgtctgattgctttgtttgtttgtagataatcattcatagaatttaaatttaaaataataaaagcttatgatagagacttgtatcttcaaacatcttaggtggaagagacaggtcttgtcatttgtcaagctcccttggtgccatcttatatttgagctgctaaagtctaaactatgtaacatgaatgatgatgtgtacgaagctgcttagtttttttttttttccttattcttgcattcaattactttgctaaaaaagaaaaaaaaattataaataaatgtgaagaaaaaaaatgttacatttaatgcgatatttatagttattataattttgctctaccacataatcacacttaatgctatttaataaattatatattttaaaaaatatttagtagatatattggattattaaatgattcctggtgatgtgtgtgttcttttatacattcatgactctattattttattttagtgtgtttgtctcaagtttttgtgtattttttccataacataacatgaatcaactcattatatattcattcaatctttaatattcatctttacaatctttttcagcaccaatcttcgcctgaccattaactaattacaaaattatagagcatcaaaagttgtaataagttctggaactctcactactataaaaagtacattttgcgtcggtcaacgcgtctcaacaaaatggttaaccgaggtagaaaataaagagagcttttatgcttcagagtgtgcctgaagctaaaaaataacaattagcgtcggctggtaccccgattaaaaaatataaccgaggtaaaatgtgacaatttaaaaaattatcttttgcattttgcatcagtggaaaattgaagccaatctcttttgattcgattaaaaattgaggttaatatatttgtcacggttgtgcaccgaagcaaaaagggtaatgcatttgtaaaactcaaattttacaatgtgtaattttattttcacgcatcccccaattcaaaaccctagcagaccaacagacccatccccaaaacctagtcgtgccagccactgtccgccgccgcccaccgtcattccccactgtcggtatgcacctctgaaattctctctctcagacccatcctcactttccaatacgcgcactgtccagcagacgcatccccgaaaccatagccatgatgatgagatttcatctttagagttctcattttcaaagccacaaaatctccagtacataatgaaaaaaaaaaagaaaaaaaaaagagaagatattagagcagagtgcgtgagagagaaagaggaaaagtt

SEQ ID NO: 296928 - DNA, 3329 bp, Cannabis indica
gtagagaaaaggacgaatacgcggtacttttaacgaatgctttcgaaatatagttatctgagcttaattaacatgtattataacaaatatatctttttaacgacaggtctcggcttttaattattatatgactatgccaaatattcaactcatgcctcatcactgtggtctctctctttttcttttaattaatttggcttacagtttagattagtaaacaaacaaaaattatgcatcctatgggagtgcccctagtttccttggctatagataaattaaataaataagtctcgcaaattcagagaaaaataaaggcacccaaaaaaaaataaaaaactcaataatcacagtcaattattgagtaacaaaagaacgagactttttcgaccaaaaaaataactcaatcttgaatgaaaatgtcgtcaaccgacattcaagaactagggggatgtaatttctcatcacaggtttttatacatcgatcaagaaaaagactaaaagaaattaaatgcaaaataaaacaactaaaaattgatcaaaaaataagtgtcaatatctctttcaaagctaaacttttcttcttttcttcactcagtaatgccaggagtctcgatatcaacctcccccattcctgtgtcttcttcttcttcgctttcatcatcaccaccaacttcctcattatcttgacgcaacttagccatatgctcagccagtaatttgtcatcacgttcactcacctgcatcgatgatacatcacacaagattaaccacttaaatttttgagcattcaacaggttatccagtttttgcatcagaagactcgatgataaattcatactcaaccgagacatgaatgccgacaaacataacatagctaaaagaaaaaagaagattgacactcactgctctgggtgcctccttgacaacgagtttccccttctgtttctctattgcttctgagcaagctgtgatagcattggttagaaccaatatcccttgttcctgcccacattagaaaatgacattcttagaaaaaataaaaactaaaatgaaactctattatggaaaaagataacttcctctagtgttctgaaatgtgagccagaaaaagaacagcatagaatatcattacagaaattaagactaaaatgggagctgggattcttttcaaggaaggctaaaatgggagctgggattcttttgaaggttattgtcactttccaaatggaggaatatagctggactgaaatctgaatagtacgcaatcacttgctatcactaattcataactgagttccagctacttgaattattacataatacttgcacaaacattaaatgtcaaatagaattcattcccctaattccctattttaataaggtaatgtaattttgtgatatgaggtagagtctaaaggcacaaatttacagctacagactctccataggagtcattactccaggggtaaaagaaaagaaagggtgtaaaagggctaacttcacctaagactaagagttttacttgcagctggtctatacagacagtttcatatttcgcaaatatgcataaaatgatttggataatcacagtcattaatctaaatgaaactttgcactaccttgtcaagagtctgagtagtcaaaacataaagtggaggagcaacaagcttaattttgacaggacaatcatcgttgcctgcagcttcagctttccgcatagcatcctacaaaatgtcgaaaaggataaataaatgaataaataacaaaaagactacttagaaatgaaagccataaatgtatataggcaaaaacaaaacagaccttgatgtgaagaacaccatcaaactggaaacatttcatctcaatatcagcacggatcttcaaaggttgtggagtcattcttctcctaatgttcttcacaagagcatctttaacttcctcagacaatgcagcaaccaccttagtcacctaaaaaaaaaaagaagaaagcagctataaacatgaacttgagaatttcggcctaaggttacagaaaaaggttacctcctgtccatcagggccaagttctttgacttcacgagtgagtgtatttagaactgtatcgggatctgtcacaactattttgaaagcctgcaaattcaatcaattaggctgtgtgctgcaatgtaaaagccaaaagcaccttaaaattagtcaaaaactcacctcaaaagcatgaccatattttcggtataaaggccagccaacatgaatgtacaaatcctgcaacaagtgattgagttcagaaaaccaaatgaaacaaaaataatgtataaacaaatatgcatgtgcatatatacatatatctgtatctatatattaacccctatatctatatctataataataccggtaaaaaaattcgtatggcatgaaagaatcaaatattggttaaaaggaaaaaaattagaatcatacatagaatggtacctctaataactaagctgctaaacaagctaaaaataacgttgatcaaagagtcaagaataaaaacaattgtatctttaatcaaatcaatcacttgaaggcaggcatacaaaactgggctcaaccataaaatcaatatgcataaatgcactactattatgctcttatcaaataaacacttctacaaacgtaattatgtgttaagaattaacccccacctatgaaagacataaccatttggcttctttgaaataattcattgttcatattatggtcagtataaaatcattcttttctcccagcaactaaaccaaactattaacccatcattctcctatagacataattacatcaggaataccaaaaataaattaagagtcttgttcttgaattataaatcattgaattatcaaaaatgaaaatacctccaaatcgattcccatcgtctcagcaacgtggcgcataatggagtgaactagcttgctcttgttgtacctttcctcacaggcctgaatatcctcctcagaaactctcctcttactcaaatcgatgtaacccttttccttatccaccctaagaaccatgacgggctcgatgcggccaaccttgatcaagctgctgacactacgaatacgacggcgggagagttcggagaagagtatcataccctcgatgttgttgtactcgaggagcgaaacgtaagctcccatgtcggcgatgtttttgacctggatcatgacggccatgtcgacctctggatatctagcctcgtacatgcggcactctaggttcggatgggaagccattgttagggttgagtgaaggctattaccctggatttttttcaatcctttttttttttt

SEQ ID NO: 296929 - DNA, 5337 bp, Cannabis indica
aattaggaaacaaagcatcacgccattaaaaacattcagcatagaagaaaaaaccacaagagagcaagtacatgcctaagaaaaagatacaagagcgcaccgattccaactctgcatcattctcttcccgagcaagctttaacatgtctatatgctcaagcaattcctgttcaaatgccttgactcctttcattttacccataagcgagccatgttcacggctaaccttccccgcatggagaggatcattccaaagatctggcttattcagctctactgagagcaaattcagcctaacaagcaacttcttccactgccaccatcaatgtcaagtatatgtctatcataataggcttaaataactcataaaagatcaactaattataaatgaagaacttagatgacactttatcaaattctcatcagcagaatcctaacatgttatcaatggaaattatgaaaagcctataataataatacatacctgcaaacgtttcttaattagatgaatggattgggcaactgccgccgcatgactcttccaatcattctcgctctcgtccagaatggtccaatcattatttaagattctatcgacggttaggccatcagaggtcgagggttcaatggctgtctgagtactaaaccaatgaaagaagctcaaagggacaaaaccagagcttgaagaaaacccagaaactctcttctccaaaacactcgacctatgatgcgaaaaacgacacctttctgaaccataattatttgtctttgttgaagcaactgacccagatcctaaaacgttgtcttttgagactgaagttgaaaaatagcgggaaatagagtaatatgagaaagacccagatggaatttttgagatacctgcgagaaaactcgaagacccagaatcgaaaaccaattgattttgagctaaagttgaaaaatcatgattttcagatacaaaagaggttaaaagaaaaggaacacgttcccatacattgttccttcctaatcttttcctgcaaaccaaagaattcatttttcaatttctgaacaaaagaattgagttggggtttaacattttaagattctccagggtttaatggtggctggctggcgctatgtctaatttgattcagaccgacccaaagattgtcgttttaaagtttttcccctctaaacgacgtgtcgtattaatctcattctaacttagcgattggcgaaacgacaattcaattgcagcaaagtatgagatcaacttgtttgggtcgaaccttcttcttcttccctattccactcaatctcaccaccatcgtcccagttcgcaaaaccctaatcaaatacaactgctgctactcaaccatgtcagactcagatcacagtgacccatccaaactaacttcccaaaatgttcagaattacccaatgccactctccccaccactgcctttaatctcaaaggacctagagctgagtagagccatgtcagcctcatcaaaatccagtctttattccacgtctagaagggactttatatatgaagatgagtggcttattgccgtcaacaagcctcagggagtgtactgtgagagcgtgtttgagtcagttcggaaggttctctctgaatcgattgatccaggttcaacctcttgatctcaattttgttcttttacttaataattctgttacagcctaaagaacatagattgaatatgttctcttgaaccttcaaagggaagaaactaagttctgagactcttttcacaatagagttggtgaatcaaatcttgttcaagacttaaaattctctttaactatcttcataattctctcaaagtaaggctgagaaccaatgccaatgacaaagtagaatctgcccttaaaacaataacagaaattaactactttgagatgaaacatgtaagttagttgattcatttggcttcatgttataagaattgaattacaagtctacaatagaaatgaagagatgtgctgtatctgtttatattggcttgaatcattattcttgatagaagctagtgtgtgtatgaggagtgttttcatgtgacagtgataatggaatttatgtgattaattcaagtgtactattttttgtttggtgattaaagttcaatgctatgcagaatttttttgattgagattattcgaactgaaaactagttattagtttcacacatttaagagttgtcattttcttgagtattggctgaattttcaaaattcatttcagggattgaggcaagccctcttgagcttcatcttgcaaatcgccttgatcgtgacaccagtggactaatgcttataaccaagtctcacaaagtagctgccaagcttgttaaggcatttacaacacacacagttactaaaacttacattgcattgtgcattggttcagttccaaagtgggaaaagatcaccattagatcaggtcatggtcggtcgaagtttggtgcctggcgtgtctatgctgcatcggatgttggtaggaaacttccaggcggatcagtcgtgagagacatggaaacatcattcgaattgttatcagtaagtggacaaggaatctttaaggagccatccatattcgagcaagatgaaagtaaggtcatcatagttgaagagagagctttaatcaatacagagggaaaaagggatgaaattttggtaagagctagtccaaaaagtggaagatctcatcaaatccgcttgcactgccagtaccttggaatttccataagaggagatgtcaaatatgagggtttgcatgagtggagagggagaacttatgatggccatgaacttcatgcagagagtctttcatttgagcaccccattactggtcatccgcttgtgtttaaggcacctctgccttcatgggccaccgaggcgtggcaccagtaatgatcttcaaagcatggcaggtttcaatgaaatctttctatgcaagttgcaccatttcatgctgtttgctgatttccctggaaaagatgtgggagaaaaccaacaagcagagatccttgctcaacacattctccattttttttgcagcttattcagaaagtaagattccttgagttattatttcagaagctaacctattgagtaacatacttgtatgagaattatagggattaatagagagcagacaagccaagatgaacaacaaagtcatttagatatacaattaaagagtgtagcaactgtgtaataatatgatactcacagtttttgtccgtcatcgtgtgatttatagttatttatagaaaagttggatttgtttcttagaaaaacttatgtcctgctatttttaaagattaacaataacaagaataagaaatagcaaatgtctgttatttattgtcatcctatatagcgtattcactctagacactcttttctccgctcatcataaatagtttaagcttttcggcttgcggttgtggagaactttctgcttcatctaatcactttcttttcatttagattaataaataactaactctaagcctagatgatacaaaaagataatcaacaaagagaaaaaagatgtgggagcaatctgaatgctacaaacaaattactaaacttgaacaatgtttttttttttaggaaataaacttgttatcataaattaaatgataaagtcatttacaataacagagcaacttgaacaatgtttatttatacctttattcaaaagtttatatattcttaccataagtttttagggaaagaaatagaaatagtttttttattattattttgaaattatcaagcctaaagagttaataaatgttattaagatggatacatataatccatgtacctgctgacaaaggtaatagatatatttaacagttgacaccaagattatatatgtaatctttgattcaattaaaaaaaaacataataagaaaaaattcaataattaaaagaacattttctcatttctctaaaataaataaaaggtttttattcatttgtttacttgtaagcaatgcgaatcaatggtatgagaatcatttcctgtttatttaatttattaaattttggaaagggaagcttaattaaataagagagaaaggaaaagaagaattttttctactaattttttaaggaatatcattcagggtattcagggtaacggattttattttattttttaatattaaatttataatgacaattttatcctttaaaatatgtcttacaaaataattatcatatactataatttaactcaaaaagataatttagtcaatttaagcattctgattactttttctgataaagtaaacaagataaattattatctattttcaagcaattttagtaacaatatattacaaatattgattcattattttttattaatttcattatattttttcattactttattttgaatatggatattgtgtaataaacgtggtactttgtacatccaattataaatttggtaccatgtaattttaataatatttatctcatattttctattttgaaatcatatatattaagtattttgaactcaaattgatcaatttgataccatcaaattgtcttcaattatataagttataaatttaaatttaatatttaattgcatgcaacttagatttttgtcaataattatttaattattcaattatatcttattttttaatttaataatttattttcacattttaagaaaaataaaatatagacttgataatatttaatgtatatacattttattaaatttaggataacctcttactcaaaaaattatggctaaactttctagactcgacaatcgttttgctctgtagtgcttctgtctattttactctattaagtgtcaaagtggactgttacaatgtacataaatgtacacgtggcaaaatttcattaatccacctaatacttataatataaatatttaaaagataacttaaaatattaaaaaaattaaaatcagaaaaaataaattaatttttttgtttcgatctctccctctctttgagatctcaccatctcgatctatcctctcccaccctctcgatctctctcaacgttctccttcagatcgcaccaaaattttcactacaacagtaagctcttcgttcttttccatcttcggcccggccagtaataggtttgggttttggattttagtttttgggttatcttagattacatattagaattttttttatagggatattggcggctaaaccacctgaactttacgttttgtaacacttaaccacaaaaaccaaaattttggcagctaaactacctaaaccctggttccgttttgctctgcacacctcc

SEQ ID NO: 296930 - DNA, 5664 bp, Cannabis indica
aaaatttaaaaataaaagtaatttccaaaaattttgaggtattttacatctaagctattttcttttctttttagaggacaaaacagccgaacctagatcaagtttgtgtttcactttctgggtccttgtctctgttgtcggaagaaacaacgattagctcccatggctactagctcagctacccgaaaacgacccaattcggttccaagctcaaacatttgaggtactccatcctaattctacagtattcttgtttgggattttctgcctcatcttcttatctatgaacataacgaatcaattgagatgtgcctttcgtttatttcctaacacattgtgaggtaagaagatgaggtgtgcctcactgaggttgtgtcttaatttttggttcgaaactggtcatggctttaagtatgaatactaagcccaatctcagagcttcttttttctttagaggaattttcttttccttttgctcattccttcttgaaatttgtttcacaatgaactgttatagttatagctctaatcaataaagtatgtcttccaccaattaaggaaggattgagaaagtagaggtttaaactttaaagcttgtgaactaagataatatttatagaattagtatggttataataaggaaaattcgtttttttttttctcaaaattgatgttcgagatgtaagttttgcaaattttggatgtttaattataggaatacaaatggttggatatcatgaaaattggtgaacgaaaatatctgaaagatagtcccattggaaatttttttgctcatcctatgggcaatagtatatttttcttcatattacatattaaagtaggaagaagaaatattgaataagaaaacacaaagctttcatttcttggcttgtaaggcatgaattacttatttctcatcgtaaagtgagtggtctttgacagttataatgtttttgctgcatatactattgagtactaacagagaaataactttttttccatattgttttcactttgatctccttttcctgctaatggttatatgcaaatagactttacagacatacaagaattgtagtactatttattgtgattgctatactttttactttacaaactataaactcttatgcatttgtccttatagacccaatgtgttgcatactttctctcttttaaaactgtgctgttataacaatgtaagttgtttaaactgaaggtcaatggacagtgataatgacaattttggtactcttcatctagaaaacatggatatccaacttaaaacatcaaatgatttggacttgaatgtggagcaggacaatcgcagtcaaaaagtggcacatgctagttgcagtactcactccactttttcctcaaaagatgaagttggtgtagattcaatattgcaaattggcacagagttcgattctgatgaacatgcctacaaattctacaacaaatatgctaggttggttgggtttagtgttagaaaagactgggtaaataggagtaaggtacatggtcaggtggtatctaggaagttcacctgttctaaggagggttatcgtcggaaagacagaagagatgtaaatgtgaggaaacatcggaaggaaacaagaactggttgcttggcacatatgattattactcgtcaacctgatggtaaataccgtgtcacacatttcgaagctcaacacaatcatgataatgtcagtccgtgtaatgtccaaacatttccactgcaaagagaattaagtgtagatcaatatactgcagctgatttgatagaagattttagaccacagtcaaaagaagcatctgtttctatgagtaggcagtttagagtccgagattctctagatgatttttctttcaattttgataattatctcagaacggaaagaacacgagatatgaaagagggagatgacagcacgcttgatgcattattttcaaaggcaacattttgaaaatccatcattcttgtatgcgttacagcttgatattgatgataaattgagtaatattttctgggctgatgataatatggtatcagattatgaccactttggtgatgttgtttgtttcgacacagtttgcagaacaaaggcagaccattttccatttgtacagtttataggagtgaatcatcacaaacaagtggtaatctttgctgctgcgcttttatatgatgacactgtggaatcttataaatggtttcttcgaacttttctagagattatgtctggaaagactccaaagaccatacacactgatcaggatgcggcaattatcgaggcaatccagtcagtcttgccagaaacgaaccattgtgtttgtgtgtggcaaatgtatgagaatgctgtcaaaaacctgagtcgtgctgtaaaagatgctcaatcatttgctaatgatttaaagagctgtatttatgattcgaaggatgaagaggacttcgttcatacgtgggagaccatgttggaaaagtatagtcttcaacaaaatgagtggctaaagtggatgtttagagaacaagaaaaatgggctgtggtatattgcaaaaattcattttttattgacacaaagggctcacatcttggtgaaagtttatttaataatttgagagactacctaaattctagtcttgatgtgcttcaattttttaagcacttcgagagggtggtagatgagcaacggtacaaagaaacagaagctagtgatgaaatggatagatgtatgccaaaacttatggggaatgtggttatcctgaagcatgcaagtgatgtttacaccccaagggcatttgaagtttttcagcaaggatatgagaagtgtttaaatgttgttgttaaccagtggagtgagaatggaccatcatttgagtacaaaactaagaaattcgggcaaagtcgagaatacaacgttacgtttaactctgaggatgatacggtgatatgcaattgtagaaagtttgaatgtgttggattcctctgtagtcatgcattgaaagttcttgaccacagaaatataaaagtagttccctccacatatatattgaagaggtggacaaaagatgcaaggttagggagcatgaaagagtgcaaggaactcccccccacccatgataatcctaaaactattgtagcaaaccgttacaaggatttgtgccacaaaattctaaccttgtctgctagggcttctgaatctgaagaagcatatgtatacgcatatagacatcttgatgaagtgatagaaggggttgagaaaatattgagattaaaacctgaagaagctcaaggagtaacttcaagttgcatgggcgcaaatgcctctgaaaatgaacaatcacaggttttcatagatggaaatgcaattgacgataaggataacaataaagcaaaccacggggagagagcagtattggatagagatcaactaactattttaaatgaaaaaagctctgctacagaaggaatttcgaatgtagaagtgcttcctcaaagtactattagctgtatttctaactccctggctgtttatgtttcaccttcagccacaacaggaaatcacattatgcaggtactaatttgctaggactgttacttccatatttggttataaattttatgtatcctatcttccatctgaacatgcagggtttatacaattttgaagcaaatcaggtggttaagagcatgtatgaacagccaaatcatgttattgacctgcaaaccaatagtaatttgtaccaaccaccaaacttttatgctaaccaacaggattcacctagccaatcccaattattacaggtgagctagctgtttgttgaaccctatttcgagcataaaaaaaaaattgaattttgaagtaaggttgttatatgtgactttcatattcttcatgcaggaaccactaatccataatacgtatccagaatctgtatcaaacactacgcagctgaggcaggtaatcaaaagtaggaagtcgaaaaatgagaactgacttgcaaattattttctatttttacttttgaaaccctatgttcgaattataatttgtttattttgttttcactgtagcatatggatcttgatatccaacattcacattcagcttcgttcttgcaatttgatcaaagatacagagctccagatactccatatcttggtcacagtcacaagtaaaggaaggatagatgtttaaaatgacaccctttactaatcaaacatcagatgtaaatgttactagcagcagagtcttagtcatacatgcgtaaattttgttaagtctaataagtagagtagatagtagaaaaaataaaagccatattcttctaagtcgaatactaattaatttctcaattgaaaagtaaaatatgattacatttactagtattatctatacctccattttctatttcttcacttgtttttcttacattctcttgattacttttagctttaggatgtaattagcacagggaatatctatttgagcttagaacatgttttataatgttctagaacatgagctggaatttataatgggaaatttcactattcaaccataataaaataccccatatcaaattttagaccccttcatcactttaagatgtttgagattcaaaaaacaaaagagaaaaatgatgtagcatttattacaagcatttatcttaaataattactatgaacataagagaaattcatacccgtctagaaaataatacactaaggtccttcttcactatatcacatttgctcgtccagctaagcattctgggaaatcgaatcccatgattcgtgccatacctcttcccaacttctaaaatagtctcaacgtccaatattgttctgcaggtgcgaagccataagctattatttacactcatgttgtacttccaaactcaacttcttctcatagttggccttttgtttcaacatgttcttctggagcgagtgcataagtctagcgaatgagtgcttcctctaaggaatccagaacaagaactcgagatcttcgacatatctaagtatgtcagccgtaatcaacgtgttagcctcacgacccagtattactacctcaacaaacaagcacaagccaagcttgtacaagtcttctgagttctgacagattgtgaacctatattggagtgcttctgtcttcacactatcagaccggttgaaatatttattgatcaatcagtctggtcccgagcgggcaacctgtgcagccttctcctctatcgttggccccgaggagaagttcacgcctgtaatgagcgcaaattcaaccactctaaatctgagctccttttgaccaatgtaaaaccgcatgtgcaaatccgcctcaacatcaaccttcatcttgtgcaacatgacttggtgaaataacactgaggagaatgtcaggggtacgacatttcaaaagttgtcgaaaccgctttctttcaccatgttattcaaattgtactcctcaaattgagatttgatttttgcaaaagcactggtgcttctatatgtcacatggccagtaaaatgctcgaatgctagaactatgagtcgtggagccatctaaaaaaatatataacaaaaaaaaattactgatgccctcaaaaaaaattatcgacaaaatgttgacatcatgtcgatattctatcga

SEQ ID NO: 296931 - DNA, 2524 bp, Cannabis indica
aaaaacagattttggaatcttgaatagttttcacagtttgatacttgagaaggtcaacacgtggtggatttttggatcagacagttttgtggctctgttgtttttaggtagaaaaaacactacataagcttcaaatgttcaatctttcattgtaaagacagcttttttaatgattcaagcatagaaagaaagctaaatttttaatgtcaaggctaatttgttgaatttttttcttagaccagatcatagatacagtacttgaaaatggttggattgttttaaaaaaaatggttggattttccatgtgggttgattcattcaaactatattaattattaggacacttagtttagatacaaaccataatatttcttatggaatacataaaaaggggatgtataagcgtgcctgtaatatttatgaacttatgttgtattgtggtaaagattgaatcggggctggggacaggccttggtttgaggtcaaagccatggttggggtcgggataggagttagggctaagtctatggtctgaggtcggggttgggggttgaggcacgattttggatttggggtaagaggtcacaggtcgagtctaaggactagagtctaggatcaggagtctagggttgaggatttgggttatggatttgggctcggggttaaggttggaggctaagtccaaggttcgggttggggcttgggacagggctagggttcatgatccggggtaagaggctggagctgaactcaagggcgaagtccgaggtccagagtcaagggtttagatacagggttggcattggggaccgatctagggtcaaggtccaaacttagggctggggctgaggttgaggcctgagtccgaggtttggagttagggctcaagttcgaggccttggctagagtcgtaagtactattacaaattttccttttgcatatgaggtcaatttttttcttaatttatagttgttgtaagattgatttcttattgtttttctaaaaatatatttttgtaattttaaaactttaaaattatacttaaaaaaatgtataaattgtaaaaatataaataaaaatacatatatatttatatgaagatatttatggaaaaaaaaatgctctaacctcataataagaatttactagaaaaaagtagtctacaaattgtcaaaaatgttgaatacaaacatatatatatattaaatcttgttaagaggctcaattccaagcaaatagaagcatttcttcatcactatcgctgttgctttacaaagcaagagtctgctactttcttctgcagatccaaccacctgaccatacatttacatatcaataatataattagtatataggagatttcgacccgtttaaaaggtcgttcgggtagatttcttatctgtttcaggcattcagaagagtttttcagtaattttctttttcatgatcgcatatgttgtagctatttaagactacttgtaaatttttagaaaattccgaatagtttacataatgctgaaaataaaatttacatagttatttatcatgtgtataaaaaaaatagtcacgcgtgtgcaacaatatatgcaaattttatttcggcattataaactattcgaaattttctgaaaatttacaagtggtaggtagtcttaaataaatataacgtattccatcataaaaaaaatagattaaaaaactcttttatatgcaaaaataaataaggagtaccgaaacacccttttaaggagtgtactgtaaacttagtctataacataataatgtttgtttagattgatcagtgaagtgactatgtatatatatatatatatatatatgtacctgacaattggtataaaatttctttgtgaagatttctgacaagttgtaaagatattcacacacaacatttggcaacagattggtgactgcttcttcaacagccttgcaaaatcagaatcaaaatttagacgacatggcacgacacgatacaacacgacagttatgttaagtacttttctcttacctcggaaaattgtagcaaatgaaggcctaattcgcgctcaccggcatgatccaaaacaatcaccccactctgtttaaaacaaagtaaggtttagcaattagttagttaattagttagaattattagcaaagtagaaattacttactctcttcaactcttctatgtctttgttagatttactaatgattgaacatatcctagcataagcatagagcaagtagacagccgtatttccctgctcggtcatcgaacaaagaagaaaaaaatagcatcaaaggttgcgtttgaatgacattccaatacgttaaaatgcagcctaagttttactaacaaatataagtcaattttcactagtgattaacaaattcaattaaagaaagctcgttaaatatcaactcaaaaacacgtagtgatcaccgagcagggaaatactgctgtgtttctgagttgacacttaagggtacgactgcaacaaaatcgtaaaataaagtactttt

SEQ ID NO: 296932 - DNA, 2874 bp, Cannabis indica
aagatcaagaaatgttaccttcattcatttgagctcttcttcttcgttgagcaatgtagagagccgctaacacacacaaaacaattaaagcagcaaacccgacaacaactcccacaatcagaccagtgtggttctttttagtgcttggaggtttgttactgacagtaggtacaaaatctgtatcaaaacaacaaatgttcaaacaaatgagacttacatttccattaaaaatagtacttgaaactatcaacaacatataaaaatatacttacttggggtggcactgattgctgaaatggaaggcccataagtaccttgagcaggtatacaacaagttccttttccagcccaaaacagatggacttcaatgaagttctgtgaaacattggcagtaaattctctcacaactgctctgttagaaacaccaccagcctccttctttatgtcaaaatcttttaagactaaatttccctgaaatatacacaaatttcacttagctaaacatgctttctaaatgtatatacatagaaattgtaggtgaacaatacctgaatataaatatcaaatacacgcctgccaacacttttccagctgcgagaactcagtatggcgatttctgcaaactggagtttgacagtgtagttaccattctcaagcccgagaccatagtatctcaatgatgaagcagatagccttactgtctggaatagttctgaatctaaagtatttgtgaattgagatgatgtaaagcttttataggtagcattgttgtttccagcaaaaactccaacattgctcactgcccatctgttgctgctggtgacaaaatgtgtagctggacctaaagcctcctcatcaatttcatacaaaattctatcagaagatgtgatttgaggacccccagagttaatcccaaagtcagaatctgcacaccaatgtaatgctcttttaaaaaacaaagttatcaagctattcgaatcgattgtagtaatcaatcaaaatgtacttacagattggacggcctagaccacagggaaaattcttttgaagacagttcaatcctaaaagaagaggactgaaaagggaactaaaaaaagaagttatataatattgaaaacaaaattcaaagaaacaagttaaaactgagaaaaattacctgttgtttgagctattcattgtaaagttgttgccaaccaagttactgccaaagtgaaaaacaaagacatttttttctttagacacaagcgtgttaacccgaaataggcatacactgaaaaacgcgaaaagttaagacatacatgtgtagattttgttgattgttgacccaagaaggaatgcttcccattagattattgtatgagagatcactgaaacaatagcattaccatgaatgttgctaaacatttaaccaactacactaaaatatcatatatatatatttacttacatattgagaagagatgtacttctttgctgaggcagggttccatttaggctattatttccaagtaatctgattaaggatgtacaagaagcataagtatattcttaaggcattatgtttaaaattacaatggaagatagaagatgtattacaggtaagagagtgagctaatgttgaaaagagagtttggaattggcccagttaacttgttaaagctcaagtctctgcaaacaaaaagtgggaacttcatgagtgaacatgaaaagttaataatgaaagtaaggtggttttgagatttttaattaacttacagttgttgtaactgttggagttgcccgatattcgatggaattgtaccggtgatgttgttattcctaagtactctgcaagttgtattcaatgtttgtcagattatattcaaaaccagaaaaacaaagggtgtaaaggtgttgaaactatgttacttacaagttacttagagacttcagattattgataaatgcaagagaagagcttacattagatatttcacttaaccgcctacatataattcaaactcaagattgttagttttacaaaatttgcatacagatatgaaagtgatcagactattaagtttggtggtactcacaagtctgttagagaagttagatttgcgaacgaagatggtataggtccttgaaaagagtttccttgaagcctcctaaagaaacataagcaaagaactaacaatagttagtattttgatatattcacataaatgaaacaaaaaatagtgaacttgacttacaagacagtaagacttgtccaacttcctatgaattcaggtatctttcctgtgaattcattgtctgatgcccacctgcagaaagtcaaagatttttcattattagaaaaaaaatctccatttataacagtctgtgtattgaatcatgaggtagaagaaacagtttacaatgtttccatgctttgaagtttcgcaaatgttgaaggaatctcgccactaactccagcactatcaatgtaactgtcaaagaaaaacaaagaaaatcagaacaatgtacaagtgcaatctttagtagtaaggcaatgtaacaaacttacagttgttgtaatttatttaaatttcctaactcagatggcagaggaccagagaagttgtttgatgaaaaagacctgtatacaaagttcaaaactttaatgtcataaacaaaacaatgaaacaaagggttccatggaaattcaaatgccttcaacttacaacattaatagctcagtaagttgtcccaattcttttggcacttgccctgataatgcatttatgcctaagctcctggtaatagccaaaagaagtgtttaaataaagaaataacataatatataaaagagtaattaggaattttgtccctgaactttgacatgtaccagat

SEQ ID NO: 296933 - DNA, 725 bp, Cannabis indica
taaaataaggcaaaatatcggggcgttacatttatattattttaaaaaatataaagtctattttattatttaacaaaatagatggcctaattaataatttttataaaatacataatcgaaaatggtatcaactattttgttaacaccttaagtagaatttagagatttgaacaccaaccttggttagatattgtatctaagttaagcataatattcattagcaacaaattaggttgagtgatgttgtttgggagattagagatagatggataaacaaacagtttggtaaatatttgggtattaattttttttttttaacaaaagtcaaatagtaattataataaaatatagtttgatttactattatgattatgaaagagacttatggccaataattaataacaatagtgattaatataaacaaagcatgattaaccaattgatgtaaagcctattttacctttcttatataaaagctagttttcttaaacctttgtatagaaaatttagttttgtattttgcaaataaaaaatgttgtaaaatttgtttaataattactatgaatatagttaattatttgctaaagataaaataaaattataacatacaagtaattaaaaaaaagtgattatttcacaaatacaaaaataacaaaaaaaattataaaaataaggttgtatggaattttaaatatttttaaaatttatttacaaaaaaaaaataa

SEQ ID NO: 296934 - DNA, 2289 bp, Cannabis indica
tttaatctggatattacagtatcacactacatctttaaacataaacaaaattgaatttctaaagagaaccaaaagtgcataacatcatcaagaagtgtcataaatgataactctatatttgtcttatatatatatatatatgactaattttatgttttaggatttttaaattatattagtgtaattttaattttttataattttagaaaactaatcatgtatttggagtcaattggaggagttctaatacattttggtagaaaacaatagaagtcaggaagctcggtttgactaaactgaacataattacaaattttgacagctttaaaggcataactgaactttgagttcatcataaaaaatgtagatctcattctgaaatttcaggatcatcttgagccattcaattttgatttgtattgaataagttatgaccaaaatactgatataagtgagcaacacaatttcctaggaaccaccgccctcacggtacttaagcaccgttgggacagctagaggggtaaacacattcgtacagttcgtaaaaaatcaaattttaagctaaatttaaatgagcttttagggttatataaataagtcttttacggttcatttttagtacttttagactgcatttttaaaggagagaactcaagagaagaggagaatctacatctagttttgttcctaaactcttctaatttttaattataattatgcttttgattatggagtagtcctctaggttaagagttatttcaaaacccaatacatgatatcttaaatgctttgattaatgttattagtttattcattctcattgatttgcttatattcttcaatacttaattttatgattaatattttgatcttgtttagacgactgttaaattaggctttacatttttctattattatttttagaatttctattcacgtaatagtctaggattttagctttaagtgataaattacttttaagggtattgtgacaagtattgttaattgtgataaaaaaaatacaaactagattaaatgaattatatgattaatttgttacctaaattaatctattttttatataatttaatgatttttctcgtttaaataggttgtatgtttcacgaatcaattgcctaataaaaagatttaattatttagcactttgtcgtaattaattataataaggagactaagataagtgattattttctgggttaatagttcaaattaggaataagaaataatatttattatcgttgttcttaattgattgttgaatatggagaataattcttaattgctttcaaaaccataattataattatcatttgttattagttttgcttttaattacaaactcaaaattcacttttaactttctgttacgcaatgaataataaaataatcataatttttataaattcgacccgtatttattattatactgaagtatatttaatttattgtaataaactaaatgcattattaataatgatagctacataatataaaaaaaatactaattactcacataatacctaatagaaatgctctaacacaaaaatgaggagtttggtaatttgacacaaataccatggtcataatagtcattaaatcaagtttttttttttaaaaaaaaataataataatatattttattacattatattttggttagtcttcttaatttcattttcttagatatattaattatcaatcattttcagtgatagcactatcttgggtcacatgaagttgaccctaaaaataggtcattatcatatatgcacttataggtggaacttttattaatgctttgatattacgtgtaactataatacttataatgccaagtactacataccctttttgtgttgtgttctataaatatatagaaaaattaaaataataattaatagacttattggttgactaataataggattgtagaacacccttattgttattttattaattaattaattaatatattttttttgttttgcggtgaacattcagccatttgtttattctttaatcaatcatatatgtgtgacttaaaagccaagaaaaaaagtgtttggattaaagtacttgattaatgattgataacactttttagtacaattcattctcaaattctttcaattttatgagagaaaatagcaaaatgtaattaatgtattttgaataagggtaaaaattattttagaccttgaattttgcaaaagttattaattagaccatctattttgttaaataaaaaatagaccttgtattttctaa

SEQ ID NO: 296935 - DNA, 1446 bp, Cannabis indica
gaaggggggacatgtagttctcgggctgccatttcttctcctatttagaaattgccagacccgagttgtttcaagcttaataagggcgttgttgttagaagggatggaggagctattagctggggccggtgattcgaaatggtgagagaggtgtggtgcgagtctttacaaagcttatggtaggttgtttttctccttatactgctgagttatgtgtttgtttggaagctttgaaatgttgttattttaatgggttgtgaagattgattgtatggagagtggtttgcaatttgtgcaattacaacgggagaagatttgagtgaagatgggattatcgttggtgatatccaacattttcttttattatgtaatgttggttcttgttattttattttttgtttgagtagtattttaaggaaaaaaaacggtggttattagtatttaaaaaaagtaaagttagttgagttggcatattatggattgtattactcacttgattggtgagacaatgtaagaaataatgtttaaggtattttcaaagataaaaacatattaaacgtatgtaaaagagtcataaatatgatttgctataaacatgttaataaattaataagttaataaaaaataagtatgatcttttatataaataaatataaataggtttataaatgtgttgagttttagttttcaacttcattaattaatgggtcaggtttaagtttaacatttacttgtaatacttaaatttcaacacatataacacgacttataaatatgagttacgaccactaaaattggtatctcaagtccaattaaacccccaatttttttatacatggtcacacttgatatggaataaatatgtatgtattggtggtgttggtatgtgtcccttctcactgtgatgtctctaaaattttgctcaaggtggactgtggttgtgggattggagatttatgtgatatgtgatgtgctgtataactgaattttaaaaaaaaaagaagataaaataattaataataaaaattcccacttgagagtttttaaaagaaaatgtctatgtgctcaaaagaagtgatataattccttttaaaagataaatgataaaaccgtatgcaacttttataaaataaacgaagttaataaattaaaaaacacttttaagatgaaaaatcatttaaatataaatatgcatatcactgtctataggccaaaacttccaattttgagattcatttcttctttgtattgcatttaaagaaaaagaaaggatttaatgtgtttgttttgtttgttagtttgaaaacaggatgtgtttgctttgatttcaaaaactttgtggtgtactgtacacctcagagtacacagcacatcactcaatttcttcctaattttttctggggtcccctttctcctattaattgtgcaacttgttgaatctagtat

SEQ ID NO: 296936 - DNA, 8711 bp, Cannabis indica
ttattattattatattgatattttattgtgtttattttttttaaatataattttatttagttataaccaattaattaaaatataatttagttaattggtattggttattattttccaaatttgttttatacgtttatcccagcagctacacggacgacctgccgaaaatcttgttttaaggaattttcattcgaaatagctttcctttccgatcgattagtcattgggttggaatttggaagccatggatgagaagatggagttggctagtaccgaaggccctaagaagaagatatcagcttgcgatgttgaagccctaaagaaatgcttacaagagaacaatggagactatttcaagtgtcagccacacgtagaggccttcaaatcttcatgtactttcaagaaacccacccaatctccacaatcttcatctaacctcaataaccctgcttgatctttgatttttttacctgttcatgttctattattcttgatcaattttgaacttttaatccattaagatcttctgattttgttgacccatgtattattgtatgtatggagttaaagctgaaacttagatatggattttagattattatatcaattatgatatgagaataaagatttaagctttaagctttcacatttttaagtatgtgcaaatgccattagatcaattatgattttgattcaatttctagtaattatttatgattttgatactcttttgtgatgctttcagttgatattattatgctataaaatataacacaaaaacacatttataatggaataactatctatattctgcttacatgtttcacttgagtaatatctatttagctcacctgagacaagtgttactagatcagttgctaaaaagtaaaagaaaaaatgatgagaattgaagtttattgtggaggttccatccatcattaacatgcattacaactcttcctacatgttccatagtaatccaaggagccaatcatgaagacagcatttttcttacattctcccatggcagcccacgtagaacaattgtcatcttcatcggtgcagtcttcgtagctcgacaactcagacgacgagagcttttcttcagcagttatttttacctgaaagaatttgatggcaaaccacatttctccctctaagacagggcatctagcatgagagctgctagtgtcagtagttgagttaggatagatgttgaagaacaaaattgcattgccttttttcggtttcatgatgtcactactaccactactctttgtacaatcagaccaaatgttgcccttcacctgagacattttcatgttttactggtgaaaaaaaaactatttgagtgtgataattgtaatatgaattaagataatgagagttgttctaatctgacctttgattttgggaatataatctgaccaccatttttggcatcagagagatacaagacaactgttgcaatcaaaggcttactttggtctagtaatgaactgttaccaaaataatcaaaattcttttcggaatcctcattctcgtatcgaaatatttgcaaatcctttccattttctgaagagaaacaataatgcagagcaataatacaaaatactgaatcagaaggtgcacaaaataagccaggaaattctcaaaaagtaaggtaagaaacaccattagtactggcattattagaaaatatacctttgggaaggaaggtccaagctgaaattctttcctcaatccttgaaactacatcatcctgaaacaattaaaagaaaccattacaagtgaagccgtgtctggttaataacacaacatgggtgagctgcaatctcagtattttagcatgaacaacctaaacagtacaatatagatctcttaaaaatcagctcattcaaattaggacagatccagaatatgagaaagagagaaaaatttactttaaccagttggggagtctctgaacttttcatcaattttttctttatggtgtttcctgaagcatcatcctcccttgaagtctaagcaaaaaatgtacatgttttaaaaattatacaagatttaaggatagatatacaatatgaagacaaaacaggaagggtttaccaaggaaattaggtgatcacattcctcatctgaaaggaaaccttcatataagaagaccctattccaagtcgaagaaaaaatattcagaattaacaaacataatgacattattcagaccaatcattcttcaaaaagactgaactgaaatctcatatgatacaagcaaaatacagaaaatgacttgacactattttgtatataaaacttgaaaaaacataatgataaatccttaatcaatgtcatcttccattgaagtaaaacaaccaccaaagcttatggttgtacctgaccttggtcgccaagagagttggaccacccttgatgggtcaatcctgttggaatgaacagagctaggaaattgtatcaccatttcctgcttaaactcttcatcccttaattccttcctgctactgaaaaaatacaatgacagatataaattaagctaataaaaaataaacaaagaatcactgtcaaaggcataagaattagattacagcaaaaaaaaaagaaaatcctcagccaatagaaacgacactgtccaaacagtacaagctaccaaaaaaaaaaaagtaatatgaaacattcatgataaatttcaaggcattgtaaaaaaggcccagatcaagaacattacgaaaatattcaattcaaggatacataagaaaaaagctgaaacaaagaacaaatgacaaaacgggcaaatgtgagagataataagaaatgggtttcttacatttgggaagaagaacagaggagaaaagttagaagaagcaagattgagagaagagaagccattgttgtggttgttgattacagaggagtgtgaagagaaatgcagaaaacgcggcttaaaaaaaacgaaaaactgatttaaaaaggttagatacaagttaggaaggaggtcctaactgcctttcgtcgtgattttttatttttcaatcaataaattactaaaaaattatatagaaatttcttgttgttaatttattttcagaaaaaaattataaaaaaaaattgttgttacagtaaaacgttatatgtgttctccttagttatattttacatattattattatttttattattgaaatggaatttttgttgtaaaatatatagttagaattagaaataatgatcaattaagataacagaaagtgcgatcaaacagatatttacccttaaaattattaatacgcaactggacaacttttattattttaaatcaaaaaagtggaaatttcaaggttatgccgatagaacaactttattattttatctattaaatacacagaaaacacctcaaaatcaatacaaataaataaataaatacaaaaatgaatcaatgaatataattatccgcaaacttattactcttttttctcatatatttttaatttaaacctcaataacaaataacatttttctcatctataagagtcttctttggcagaatattcatcaaaagtttctgtgcttctggttcttctaacagaaccaaaagatgattccccagctgacccaggtgagctctctgcttcctcatcaaaagttccatactgggaaggtgtaaaagcatgaggcacagaaagtgttactgctctctgcaatgcagccttgtactcctctttcttctctttcgccaatgtttcttgccgttccattctttgtttcgtcggaatttccatgatgggatctttctttaacatcaactgtacagagtcaggataacataatgtacaatgagacgacgatattggattttcgaacacttgtagacaaagtcttttgctttttcttgttcgtctccaggaaggagaaaagaatcaatgcttttttaaaaaaacacatgtagagcatgtaatatagacaatcaacaataggagataagaatgagattgaaatcgaaatgtggctaaccgaagagactgaaaacatacttctagagctcttcgggcttctctttctatccaaacaatggcatggtcagaagtggcattacatgaaagtactatgtgctcaaatcttccatccactggcactgctgtccttacttctggaggaaaccttcccatcctatatagacaagtgtttacaaaacacaggcaattttcaactcataattggcaagaacacaagaaactttcacatagtaccactcatggatagaattggtcccaggtcaagaaacattttaatttgtcttgattgcattcaactgaagcaatagactatgaactaacaccactaagactagaattggcttaatgtaactaaaatgacaattttttatttcaatttaacatggatgcaagatttgacaactataatgagaaattagcaaagagaaaaataagtgggaggacaagacttgtttggattttcatttttaagattggtaactaaaacataaactcgacttctgaaaaaaatttacatgttaatgtttaatttgttacttcttttcctttttaaaatgcacagggctggtgagacagtccaaacaagcaccattaacttttgcaatcccatgaacccaaatatctaatacataaatgttataccagaaaattgatcaattcagagagttggtataaagataaagttcagcaatcagttgagcatttgaaagattatcaacatatgtctacacacctgaaaggttttctctccacaatgtgatagagacggccaggtgcatatagcctccttggatctttaatcatcttctcttctggtatacatgtatctctcatgcatctcaggcatagtatgcacggcaaactgttaagtgaaaagaacccagctttattaacaggttgagatgaaatccgacgatgcagtgtgtactatcgaatacttgagaactattcaaacttgatgatactatcaaatattctttcaggagagaagatgattaagcctctcatttgcataaaggtttctgtactttaatccatttaaatttatagaattttgttactaaatgagatgagtcaatcgatcagtataagaagacaatcaaatggtatttcttctctacccctgtaacgaaataattttaacagcctatcagacatatacagagctattgataagaagcaaaactaatcataccagaaaagagacttgaatatgtcttccaatggtgtggctgtgcgtggtaagaagtcatcctgattcagtttaaaaaacacaataatatttaaaataacatacttgcagccaattctcaataaaacattgtctgcttgagaattaatttgacagcaaaaataaaattaaacatgtgtaggagttttgatgcagatccattgagctcaatcatcaagaaacaatttcctcacatgtagtaacttagacattgctattgtcataagaataaatctatggactaatacatcatacaacagcctatgtgatcaaggacacatattcttacagtttcattttagaacacatttgaaattaacttcacatatcaataaacaagaatttcggttaatcccctttctaatcaatgctcacataaatctgggaacataaacaagattaggtatcttcacaaaaaagaaaagacctataatgcttaaacagaattctgaatattgaaacagcaataccaaacagggaatcgattaagaacttgcctgaaggacgacagaattgatgacatctgcatatctaaccgctaaatttaaggacatacaccttgcaggagcaatggcatagcacctgattcttctccggtcaatgtttcccaattcagcccgattttgcacagctaacacagctagaagtgttgcaacaccagaacctaaggaatgtccagcaaaagtcaaagtataatttggatacttcattaccaacttcttcaaagtatcagattccataagcaaaacatgttctgcagctttcaataacccattgtgaacataaccaccatcaaatttcctctgccccaacttattatccaataaaactgcatagtcactttcctttgccaaattaaggcccctaaaggcaagtactatatcctcatgatcatgatccagatacaatatgtaaggaggagcttgtccatcagtatcttcataggatttcttatgttccaaccaatctgggttgattccatagccttcaggaggttcccaaagtgggtgccttagatcatcttcgtaaacagctagaatataacaacacatacgaggcacaggctcaaattcttcagcagtggcaataccccaattctcactgtcatgtcctgctgtgtggagacatcttttccaagcccagcgggcacatgccaaacaataaacacactcaagaagagggatgccacatataattgacattagagcctcctatctaagcaatcatcctaagattgaccgagacacatgagttttagcagtattacggtaactaatgtccaacaaggaaaccccaataggtaattatctatatctacttggactgtatagaaaattcgagaagaaacttttccaaccaaattagggaaataagtaacactaccaacaagaactaaaatttagatgcttgagacttgagatttacaacaggtgcataagcttgcaaaattaagaaatcaactgagaaatatgaatactataagtcaacgggacagacagtaacccgagtaaaagaactaaaggagagaaatatatatacggatcaacggtataagaggtattgattagggaagactccttatctcaaatgagtctctttcactaagcttctactatgcaatgaaagatcttcattcactgatgatgacacaattttctacaaccaatcacacaagaggaacaaagagtataaaaaaatgacagatacccaggtatcaaaattgggtctttaatcaataatgtggacttacagccttcgagagggatcaaaattcacgattgagagagtggagttgcatagttggaagaaaagaaaaagaaaaaacaaaagaagggttcttcctcttcttttattgttgtaataacaataatagagggcgtcgtctgctccactccacctacgagtcaagatccaattgggaaacttcgaaggaggtgttttggtaagcagcattgatgaatttgacatgaaaacgaaagggaggataagaatttatagaaaggatatcccaatcccatgttaaaataataataataagaataaggaaaatatataaaaaaaattggaacggtagagagagttgttggtttagttgtactttgtttattttctgcaccagtagtatcattcactcacttactctaccattcttccgttctaatacagagtagacaacgtgactcatcttcatctatgtgtttttttgtcagtaaagactattttactttttaacttcttccattatttccatgttggaataagtgattaaattaatcggatgtttggggcatgattattatgtttttctataactacaataaaaatgtcaataattttagtcctaacatattaatttacaaaaataccctttcactattcaattattacttttaagacaaattttaattataaattaaaaaaaaaaattgtaacaataataatataataattttgggtttatattttatttcaatccccatttctaatttagtttgatgtacttatactaatttattagtatttatatatattgttagaaagtatttttgtagacactctcaaatagaatagactaatgtgtaaatacttaagaataatgtaccttttaatttagaacaacaacaaaaaaattcttcttaaagaaaatatatagctaataatagtcgaagccaacataaatcaacttgtattcattgtttgataattttaaaaaatattactattaagcactaatgatatctaacaccactatgaggtgacatcttaaaaattgttaacgatattctataataattattatattaaatcaatctaacgaaaaaaattattatataatttatattaaataatgttgaatatgatatttaattgtatcaataacaatacaacattttgagtggtatctaacatagttagcctctgtataaattcccaacaaccagactcttaatttactattattaagctattatttacttctagaaaataccaaaaaataaaataaagatcaagacataaaattgatatgttacaatttttttaaaaaatatatttgaattacgagctcacgtgcgaagcatgttagaccccaactagtaagtatataaacggtatcaaatgggcttttctactattaaaattgtaattttcgtcttgttttatcaatattgtaaagttgtaattagatttagtttttaaatttattaaaaaagaatttgaaaataattaatacaagatgttcaaacataataatttattttggttacaaattcaatatttagttacttagcaaatatccttaaaatataatattaaggttaattaggatttttacctcataaactttaacatgtaccaaattatatcgcttgaactttttctggctgttaaacattcccctgaactattgagattattagatttaaggacttttgtttaattttattcaattt

SEQ ID NO: 296937 - DNA, 4326 bp, Cannabis indica
aaaaaaaaataataaaagaaattcttttaagccggcgtccaaacaggaaacaaggtcatcataaaccgacatccaaacacacaccttaataatagaattagtctcaaccaaacagacccctaatttgattctcttcttcattctctgcaaaaccctacttcaaccccaaaaacccaattaacagaaattccttttcacaaaatctcttccaatgtcttccgtactactccgttctcgtctcaccaatttgatatcaaagcgtaatcgacgcctcctcagttccgatgtggcctctaatcctcccaaggagccactcatcgctgcccaagctctcgcctccgatcaacccccgccacccggtactccggaatcttctaacgcctccactagcaagtcattgagttttctcaagtattctcttgttgcagctattaccggagctactgccgccactggttacgtttcttacggtatgcgattttaaaaaaaaaaatgattcttttttgaatgatttgaatttggttttgtgttttgagatttgggtttctttcaattgatgaaatttagtgtggtggaagatcaaaacttaggtatttaggtatttagtgtattggctatctttgctttatatggtatgagtatatgaacacactgaagtgttggatttgaatttggttgtttttacttgatcagggatgctaaaagcttaggcttttgttttattgactacattgttgctaatgggtttcttttatgtatttgaatgttttaatttttctgtgaaatgtaccattcaactgtttttggtttctaattgtgaaatatgtgctcattggacctagttaaacttgagctacaatgttgctaatgatgaattattcatttttttttgggtgaaagcaagaatgtgaaaagtgataacttttttcttcctttggcagcttactctgtgggtgaaatagaggaaaagacaaagtctctccgagctgcacctctgcgtaacaacttaccagatgatgcctcttcaattgatgtaagtgtgtgggtgtgagattgtgtttttatctttttttggttaaaatttaattacttaatttgcaaaatgaaaatgtctttacacatagtttaagatctcggcattcttgtgctcaacaagaagactttggtagtttgttggtgatacgagatatgttgtttgttcattggtctgcttattgtgatcttatgttgcctgcatttgatgtgctatccgatcattttcatcttttctaatctgtaaggtcgtatccgtaacttaacatttttcatatcaatattttttgcagaaattcaagaatttgctctacacttctgcaatgactggtgtgtactttctgccaatagttatatttttaatttaatgcatggaaactacaattcttatgtaatgaattcctaaagtttcattctttagtgacccatcattttaggatgcattacctcatgaagtcaatgttagcagaacataatgtttgaactatttagttttaaattaagctaactacctaagttagtttagctcataaatttttcagatttttttatttgctgatacatatttatttgtttttgatcttcagtgcctgctaaagcatctgaactttacttggacgcaaggaaaatgattgaagaacaagttcaggtaggtccctttcatccatgatcttctgctacttaagatcttgttcttctcatttcactatctttatgtgtttaccccaaattctctgttgcgttgtagggttacaccgaaccatatgctgagaagcttcttcctgacttgcatcccatggagcaacatgtctttacactagttctggatcttcaagaaacactactttactcttattggacggtaaggctaggaatgaaaagtagtgacaacgctagtttcttaaaatatcaagttttgaacttaccagaccggcaacattggctaatatctcttacaagctcttttttagtaatatgttatttttgcatctctcttggcaagtcttctttaatttttggccgtagtttcattcttatactcatattttttcctattttatcttcaaattgcggactaactttgtttttgactttgcttgtgaagagagaaaagggctggcagacaataaaaagacctggagttgatgccttcttggaacatctagctcaatattttgaaattgttgtgttttccgactattcaaatatggtaattaaaaatatttacgccctttgcctgattcgtattatcttaaatgttaatactcaccaacattatatgaattgtcttggcaagtgcagtatgtagatcctgttatggagagattggataccaagcattgtgtgcgatataggctaggaaaggctgctactaagtatcagaacggaacacattacagggtatgttgtggttgctgctaacttgtattgttcgctttattaaaaatctttcagcatgtaaggaattttctttctaaactatatgtctgggaaggtgaatggcatgttgctaatgttcgatatacaaagcaagaaaagtgttcggtttccaaaattaaattaaaattatctatttcaatttaaaggaaaagtgcggttataaatactagtgttcttttacaggatctttcaaaactaaacagggatcctggaaaggttatctatctgagtgcccatgcccgagaaaacagccttcagcctgagaatggtgctgtaataaagccatttaagcttgaaaatgatgacacagcccttctggacttcataccatttcttgaatgtgagtatatacaattttcgttatatggtagaacaacggcttattatccaaattgctatgttcgagtacagttaatgatgcatcctcataatgggtttctatacagttgttgcccgtaatcctccagctgatataagaaaagtcttagcatcttacgaaggccatgatattccagaggaattcattcgacgatcgaaagagcatcggaggtaattattatgacgtgtctaaaactaagaaattaaagaagccaacactgcttaatctttcttttgaaaaagatattgaacttgtcattactaacacttctgctattattttaccaattcatatttaccaatttcgtaacataagaaggtttagattaaagcaattgtataaagtcctctgcatatttttgttgacaccgaactttttcttatcacaggcggatgcaagaacagaagcaacaaggacggttgtggagacgttgagagagaagtcacagctcggctcagctatgtaagaaagaaaaagcaacctctgaagctcaaactacacagtttcttcattccggggtttgtgaaaatatggagattggagagtgaaaacagtatttatataagttgtgaagccaagatagatatgttgttgcctttaaggaggcaattcagtaacaaaattttgaatccataataattcttttttactgcaccattgaaaatgatactgaccatgagagtttgcaatttctctcttttcgggttcttattttttttcttcttctttagatggaaatcagaaatttttgctaacagtgaaggaaatttctttcaaatcatgctctgctactctcagatcattatgttatgaatatgaatatgttttggcaactctcatgagaataattattgatatgtatgtaccaatatgaatgttggatgaagatgattatgttcataaattattcaagtgggattagttctttcaaatccctactgattcagtctgttagaatttcaactgtcataagttagtctttgatctttgtaaggaggccttattctgttggataattgtttttgcttgctcgggggatggagacggaatttcctgcgagatttgagtgttcgatctccattaatcttgtgttcgaatctgtataaattgtgtgaacttttatgttagttttgttgaattgtgttcttagtttttcaactctggtattctatgttgtttcatttgaggttctgaactagaagaatctttctttatttcctaaatgatatgagtcattatcttttattttgtaaagtaaacaacatataagtaaatcactaccccatacattaaaaaaaaatcttaggaacctagaaagattaatatcatttttagaaaaaaaatatctatttctatataaagtgtgtctatataaccgaattcttagtttatgagaaattcgtgggtgacttttatttatattaaaaataaaataatttattattaaaaataaaatggtttatgagaaattcatg

SEQ ID NO: 296938 - DNA, 4113 bp, Cannabis indica
tatggacacgtggagggcccaaaaacattatatatgtattttattttaaaatgtaatattcttaataatatacaaaaactaaatactacttgtttcaaaaaaaaaaaaaaaagagagatgcaataccaaattatcatagctgagtgaaccaatacaatgtatggaacataattattgaattgaagtgtcaatataatctaacattaagtatttatgccgcaattcactctaacaaacttcttttaacaaattgggaaatctaacatctttgtatattcgattacaactgtcataattattttccttgttttatttccgtctataaataaatcagtgcatagtttataccacatgaatcaacagtatatgacaaattctaaacctttaacataaatctaggtgaaatgtatcaactatatgtttctaaatcgactatttaattagttttctttgctccaattccaaacatgacaaaattaatgtgttaagatcaatagtataatttatctttggtggttgggttttctaagttgcagtactgatttagttatggctgatttagcctttcaattaaaaaaaaaaaagtataattcataatatgttaatacagaagttaatttaacgttattataaaacttttattaataatgaggacaaaattaggagatcatcaaacataataatcaaataaaccaaactaaagaagtcaaaaatgagtcttgcttgttggtttctcctccatcgcaatgatagaaacgttcatgtattatataagtatacagctgtactacaaataaaatggaatgtcaataagaatattacattattgattgtaattacatgcaataaaattgtcaatctatactaatttaatcttatcataattaatttataaacaaaagatatctcctcattatttgttcaatcaaattaatcccccaaacaaattaataaaatcataatgattatggttccttcattattttccatcaaatctaataataagtactttgtagtcttaatcacaacatttctcttgttactcattgtccccatagccaaacaagaagatcaacaaaactactattactattattactcagaaagaactgccctttactctcttaaagcaattctaaatcatcagttcctcaacaaagcctggaccggtccccactgcaatttcggtaccccgatatggtacgggatcaagtgctccgacgacggccacgtggcagaattagtattggaaaatatgaatttaagtggacgtattagtggagatgcattagtcaaattcactgacttgtctattctaagtttcaaaaacaattctttgagtggtactttgatggagtttgatttgaactcgaaattgactagaattgacctttctcgaaactcttttaccggagagattcctctctcggtcttgagagtttcgagattggagcggttttttgtggaggaaaactctttgacgggacgggtcccggcttttaaccaatctagcttaagggaattcaatgtctccaacaacaatctcagtggtgttgtccctttaactccaacgttgaaattattcacctctaattcattttcgggaaatagtgaactacactactcttttgtcgtcgtgtctcgtgttcaaaacgacaacacgacctcgtctacgacagaagaatcatcatctaaaaacgacaagaagaaatcaaaatcgtacacaaagtatttgcttcttttgaatgtcgttttagtagcggcggtgattgttatggtcattttgtacgtaaggaaaaggaagaagcttaagaaagtaattaaaggaaaaaccaaacaaggccaagatcaattgaaagtcaacaaaaatagtaatgaccaacgaatgatcgtgatcaaaaacatggaaaatgaagatcaaatcaaaaccgttgaagtaaataaagctagtgcaagtactagtaatagattagtaaaatcaaatcatcataataagaatgtaaatgaagagaaaggtaagcttttgttccttggtggagatgatgagaagatggggtttgagatggaagatgttctcaaagcttcggcggaagggttgggacaagggacgttagggaattgttataaggcgatgattatggaaagggatgtggcggcggtggtggttaagcggttgaagaatttgaagcctttgactgatgaggaattcaagaagaaacttcttgtggttgctaagcttaaacaccctaatttgcttcctgttatggcttactacaacaacaagaatcagaagatgttgctatataagtacgtggagagaggcaacctttttcaacgacttcatggtgagtttttattttatgtatatatgaatttatttcacttaaataaatgaatggtgatggtatagaactatggtaatttatatatgatcctagttttttttttttagttttatttctaatagaattacacaaaattttgcttttatatccatttactaattttgtcatggtgttaaggttatgatagttaaaagtataatataaacctcacaaattattcatgagcaataaaattctatttcaacattatacaaattttgttaataatatatcattataataattacgaaaaaattattgtcatatatataaagagttattgtgttgagcttatggaccatcttttagttgaaaatgttgttatgtttttttaattattataaatggtttaattagtctattattattattattattattattatgctcgatgagcatccaatttgcctaatgaaaatttctaaaatatacaactatagtaagaatactccttttactcttatgcaggtagggacatttttatttttgatatttgttaattttttatacaacaatctacattatagttacattagacattcataaaatttgaataatttacgattttgaaatcaaaaagtacttcaaaataatcaattgcatgcgtattaaaaaaaatatatgtgattatatgtttaaattttgatttctgtaccatgaattatttaaaactttctaaaaaaaagaaaaagtgactccgactattttaaagcattatcttcaattttacaattatataatgtaaataaaaatgcaggaggtaaaggtactagaaaccgaattccatttcgatggggcccaaggttaagcgttgcacgtggggtagcacgtgccatagaatatctccacctcaacacttcttcccaagttacagtccctcacgggaacctaaagtccacaaacattcttctcgaaacaaacgacaccgttttggtaaccgactacagtcttgcttttctgatcatcgcacttcccgtcgtgattcaacgcaccgtttcgtacagatcaccagagtacaaatcaactaggcgagtttcgaagaggactgacgtttggagctatggctgtcttctcttagaactcttgaccggaaaagtggcagcatacacttccccaaccggcgcgaagggagtggatctgtgtagttgggtccacaaggcggtgcgagaagaatggacggcggagatctttgatgtggagatagctgttaatcgaagaagtgctattcctggaatgttgaggatgttggagattgcgttgcattgtactgagaagtctccggagaaacgtcctgatatgtcagaggttgttagagagttggaggagattcagtttgttgatcagtctgaagatgagaatgagccttactctattgaacgatcctacaccactgatgattctatttctattaccatgaaatgatgatgatcatgatatatcacagacaggcccaatcttggctgaagctttagcctgtgagaaaaatggtatatttttatgcagtgagaaaaatggtattctcgtaaaattttatacaataggcccaatactatccaaacttcactttacatatcacacaaaaattcttgggcccattattgctctaatcataagtagaatgaatttgtatgttacaatcttttagtcaactttcacgtttaaaaatacatgtcagaatatttttttaattttttttctacagaggtgtttattatgcttacaacatcat

SEQ ID NO: 296939 - DNA, 6425 bp, Cannabis indica
tctctctctctctctcaaccttgaaaatcacttctccaaaaatcacaccttgcaaatgatgagtaaggtggtaactaagttgttaattcatttacaacttaacaaactcctcataacagtatctccataccagctcaagacaaatctcttacggatgacagacatgcttcctagacaaaggaccgaagcagacgctaaaagtacttcctagataagaataaagacaactagagtcgactatccaaaacttcgttccaggagggaacaactagccatctggaacacctttccagaggcagactagcttacgtagagactccttccaaatggacaagttagacttttgggagcgtccttccgaaagacatgtaactttccataagacgaacatctttaggactgttagctatcattaccaagttagttataattcgattcaattagctgttgtggtctgtttagttgtaattgtttgtatataaacctttacttcagtaataatagatgactctttttgtcctttcccttttgtttctctatctttcttatttcatcttctttagctctaagctacagcaatggcgagacacttcaagattccgcaatccttcatcaaccactctcctttcacaatttcactctagtaagaatatagattgattgtcctgtttaataaagagtgttttaacattttagagtgtaacatagagcaattagtgtaatattgtattacctattttaatttaaactaaaatatttagaagcccatatcacatcttaagttttttgaaaacatcacctccaaacaaatagctcaagaagctgtcgagtattagaggctaaactatgaactgtcaacagtcctacataagcatattagtcacataaagtgtctttactagtttttttttttttgaaaagattttaaatataatatatttcatcaaataatttgccgtcatgtaaatataaacatattaaattatagggcataacttcatttacgggaaataaaatctcttcttttgtagctgttaagttttagagagttgaattccaaaataaaaaaaatatcgagtgcaatatgaagtaaaggactcgtatggttccaaaactcagaagacaaaagcatacatatagtattcacatggtaaaagaaggaaaaggaaattaaaatctttctaactagaagaatttacacttcggttaagcaaatctgtaaatataaacacccctgccttacgaaacaaattacccatgaaaaggcaaaggctggcactgtaatttttctgtgtaatgtacaagctttaaaatcaaatctaatctttcaaggaaaggtgtagtcactgtttacctaaacctgctaatttatgtacaaagtgctttgtcgccactgccacttcaggttcagtgaaaagaaaggaatatcctctttcatagcgatctattaaaagaatcacctataagagggaaagaatctataaagaaagaatgtagtcagagaacaatggaattgccctcactcagtctgagaataactcttccagttctggttgttcagatttattcatagcagttgtttcaaaatctgttgcattaggctgccttttccccctaacgcagtttcattatccatataatcaaacccaaactgctcatcctcacttatctgctcatctgttacatcatcggaatctttattttccttgatataactattatcattattgttgttgttatccatcttatggctgtgactttgattttgtggacttatttcattaggatttttatcagaagcgtcacatatgcaggcttctgggttttcatgaaactcacccttgcctggcttaatctctttaggctctcccatgaatccaatctgatgagttcgaactttggcagcaaaatcttcccatgtcatgttatatcggttcatgaacagcttatatagctttttagcattaggacggattgttggtttgtgtccaaagtatctcctgcaaaagattaataccatttcaaacaagtgatcagattagtgtttgctaatatcgtttacaaatataaagtacaagaatatattgaaaccaactgttaggacctaggattagtgtggtgtgctaacatatattaaataaaagggtaattgagtctttgtattgagggtagtgttttggagggaatacaatagtatatatagaatattgagggaaattgggaagtatgcaatgtattgagtaaatctctatttgcaccaaaagggcctaagggctcccttactttgtaattgggtttctcatacattcaatatacatttcctattgttttgctactgttctactcctattattgctgctgtttgtgctatttgctactattctattgtgttcttgagtttggagatctcgggtcttatcaccaactaactaagaaaagaaagccaataaagaaaaataaatcgaaaaaagaacccgaatcccaagtattgttggtaccttcgtccggctaagattcttgccatgttgccattgttgttggtgacgaaaacatcactttcatcacagacaataaagtctagtgcagccatgcgagaagagaaggatgtgaatggtgccagctcattcttacttgctatagtctctttagtatggaagtttgggaagagtctttgagaggtgccaatgtctcctcacctccatatacctcaccagatgccacgtacaagtgaacatcacttccaaaacccaaggctctaagcataagaccaacttcccctggagtaagtgggcatcttccatttcttctcactttatctggattgctcacctgcatgacatatcccaagacagagatatcagttacatgacacttaacaagtaaatgacaaattctaagatactattgaagactcacatgtaaacttttccacctcttccggattaggccaagttcttctttttctttatctcccccaccaaaatcgcatccggagaatgcaagcatatcaggttcatatctacaatcaaaacaaactttcgtatcaggttaagcaaactttcccgttggatctgtttttaggctaaaaagtgcaaaagttattgtcataactagcttagctacagatttttgtgctttaaagaaatatacacagataaaaacgtttttgttttctacgtatcacattactgtcgcctaaattattatgatgcagagtgaagaactactacagttagtggctaaaaatgtatcaatacagagtagtgttatactgaaaagtaaacatagagaagactaatcggaaaagggtcacacactaattgtactttaccttaaatggagggcaataaaatggttgcttttcttcctcatcctttcaaccaacttttctcccatctcaagaatggaatctgtaaattttagagcgtgatagttaactctacatcttagcttttgtagatgtttgctcagcttattcgaaagtctgtaatcgaactttgagagctgaacaacctgtaaatggaaaatgtaaattcatcgatgacagttaaattcaatatttaattcatttctgaattccttaatgcatatctaaagtaaaaaaatataaaaataaatatttctttgtttaaatatataaatattcagtgcaagacttgttatttaataaacggcgcatagatggacattcatcctgcctactgcattggaatgaaaacagaaaaagatgaaaaagattgggaaatgaattatgctgaataatacaaacatattcacacaaatttctctaatttcttaaaattgattttaatgcacctgagaagttctaagctgaaagatcccaattaagattttttaatttgctcgtaaaataagcaaagttctgtacatactacttacatgtcttttgttcagaacaggtaaaactcggtttaggtagcattttggagtgcactttcttggaacacgcatggagtgtggagtcaaaactttccctcccttcagtggaagctcttttataatatgaacatctttggagagaaatgatataaaccgatccacatcaaatatttcagcaaagttactgaggcaaacacgaactcatattaatgaaaccagaataaatcattacatctagtcaaacaaatataacaacactaaagtggcattatgagaaaaacctgctatcgtgccaaaaggatttttggtccaacttgggaacaactaaagtggcatttaggatataagctgcaacaacagcatctgttatctgcaaccacagttggaaactaacttcattttctttcagtataactatattaattgtctaattgagatcgagacctccgaaacatagatttctactaaagagaatagtcgtatacatgggtttgcaaattaattcttcaattacagaagaacttagaagttgggaaaataagaaatgcgtccgagccaaagaaacttacccctgttctttgttgattcaagccaccgctagtagcaatcaccaggtgtcgactaggattcgttttcatatccgaagctatacaatatacaaagagaaaaagcttgcatcaaattaaaaatccaaatgatctctgtaaaaaagcttgcatcaaattaaaaatgcaaatgatttctattatccaaaaatgattcaagattcatgaagaaactacttttgaattgaattcttacggttaatacagagtattcaaacagagccaaaatcaataaaatggtacaaatgatagctaattctctcattttgaatcttccattcctaattaataaaccattttcaagattgaaaatgaaaaagaagaatataagacacttactcatgaagttacgggcaccattactgcaaccatagtacagttccgatcccaccgagctccatatatcacgacctaaactcactccactagtctaaaaataaaaataagatcaatcacaaatttaaattcgtcaatacctgcatcacgtctataaccggaagcaacgaatttttttttttttttgacacaaaaataaaaatacatatcagagaccgattaaagaaaaacgtaccggaacatgaaacgcagtcttctgatcagaataggattcccgttccacgtcgccattaatattctgaagaacgaaaaaaaaaacacagtgaaccatatgaatttgattctattcatatatatatatataagaaaagagggtcagagagagaattacagagtggtgatggtgtataacaggggaaggagcgaggagagagaaagcgacgagaaaaaggagtaagcaggcggagaaaacagagacaagctgaaaaagatggcggtggaggcggcgatgatgacggtagatggttgcgccaaatgttatggggtttgtctgatcttttcttttcttcttcatattattattattattgttattagagataagggtaaaaaagagaagaaaaggattattgtatgaattgtggagagaatattagacagaggactaaattgttggtttggtatttaaaggaaggaatgagaagaagagaaaagagttgttgaagttgaaggaagatatatatatatatatatatctgaaaagtgttgagttggtttggtttagtttgggttggccagcgaatgagatcaggtcgtatctctcggccggccttctctctctctgcctggctttgcctaacaatacttcactcaaacccaaaaacaacgtttatttttctcctccatcttctttgctattgaaagaaatacaatacaactcttttcccgcatataataacactacaaaatttgtccttttatttattatatatttttaatttaaatctaaataaataaaaaataaaaataatacttaataatgcctcgaaccaatcggtcgcggagttcttattgggctggttttgcgtgtgatacttggacagaccagattctgttttcttacttactcacccttttcatttaatcattgttcatcattatttatcaagtatgcagtaacctatttttttatttaaaaaaacttaaatatttatgttctattttattaaattgtttttttttttttgctagatttttaccaaattatgtttctaaatttttaaaatcgttaaaaatgtctcttgaactattaagattgttaaatttaaggttttttgttcaattttaataaaaaagtataacatagatgaaagttcaagaggcatgatttaatacatgtcaaagttcgaggggcatgatttggtagatatcaaaatttggggagcatgatttagtatataacaatcactgaaatagtaaaattggatgaaattagacaaaagtctttaaatccaacaatctcaatagtttaagtgacatttttatcaaccttaaaagttcgagagtatgatttgatatatgtca

SEQ ID NO: 296940 - DNA, 2397 bp, Cannabis indica
ttgaagcggggacgttacagtgttttattttcattggttattagtttgcaattaggctgctgatgtggcaagttctatactctgtaaatagagcaagggaatttggcagagtccttctgttggatgagaatagagagtaatctcaagtaggagagatctagccctcttgaaaggttagaaataggagagaaatcctctcgaagagctattttgtgtaattctttggtgattaatgaaagattctggtggaatttcattacgattgttgtttgtgttgatagataatttcttctctaagattattctatcataagccaaagttacagcataccttcaactggagcattttcaggaattgcaggctgaatgccttcaattgccagccaatgagcattaaccgatacatcaagtggtggtttgggtaaaggtgcatcaactacctgcaggacttaggaagtatttatattgggtcttaacaatgaaagtaatgacaaatatataaatctattaggttcatgaatgacttattacatctttaaactccacatccttgttatcaatgaagaataaatccttgtgtccagcagctctcttgaaccgcagatgatcgcccgaagcaaaaccgtatattggctaaggtagcaccacaaaagttaaaagatagccaaaaaactcaactttgaaagaaacacatcaacacaatatgaacaatacaaaaatattgaaggaatgctgtgcttttatacatacaaataagtctaacaagacaacttttatgaaaacacaagtagttgtacaaattcaccttccctcttcatgattattcaatcatattacaaaatacagaccctaatcctccacttacacttaacttcttaagaaatattttcttcaagaaaagaaaaagcagcataaattataagtttaaaataattcaaaaaaacataaaatgatacaatattctacaaggaaagcaagttaaggatgtttgggattgaatgagcacgacaagacatcaacatctggataacaatatggcttacctcaacatgtcttaacttcagtgcactatccacatcctcagtagtaagagtagtgcgtctagagtggcgcatgcatttaattgcctcctgaagattgaaagtttgaaacaatatggttgatatcttttggttgttttaaaaaacattctgcatagttttcatagtatagacaaatgaaacccacaactccggggaagtgacattagatgttcacctaaactattctaacacatacaataacagtatggtcaatctctaaaccagtaacaatattaaaattcagggatagttttgagtgttaaaaaacaaaacaacatcttatgtattcaaaacccttggacttcgatactgaactaaagctaaatcttgcataatggaatatggtacaactatgacctactataacaagattttagctttaattatgaaacagcattaaagaattcacactctcaactcaaattacatgggtctgtccaactcaaacttggcaagtaaactaaagctagctcttgtaattgtactatgtgacaactacatcacatacccttacaacaattacgaaaattagaattaaatgtgattaaactcaagcatacctgcatgatctcacgaacccggtactcaacatcaggagccagagccagggccacatctggggacaaattggtaatgccaatgctttgagcaatgacctcaattgcttccttcggcacaacgctcatctttgtgtttggtttcaactttttggatccaaattctcaaaatttattaaaaaaaagtaccctaaaatttaaaaattcaaatttcacgttttctaacgatgatgttttttttactacttatttcctcactttgacggaacactgctggctaggatgtcgttcctctcaccgtcaccgactccggagtaggtctatcatattattcgaaactctatgactaacgaagagagagagaaagaaaagcggtgactatttgtgatgggcctttcggcggtaagctgcggccgaaattcaaggtggcgtagagttaaatagagggtctccaaagctgagcttgccggatttgggcagcgtcgtctcgtcggccggtggtgaggtatatgtatataagtagaatatgaatttggtaaacagactatgataggtgcagaagattagtgtaatgtgtttcccttatacataaataactaaataaataaataaaaataaaactacaaaaatattataccaaccaaatttgaactatatctctcaaaaaaaaattacactatataatagtttttaacttttttttaaaaaaaaaattaactcattgagttatctcggtggtttctatatgggttgttata

SEQ ID NO: 296941 - DNA, 2600 bp, Cannabis indica
aacaccattatctatataatagttggcaatttttcctattaaaaaaaaataaaaaaaaaaaaaaaaaaaaaaaaaaaaccccaaactacatggggacaccattttttccttatctttcaaatttgtaatatctcaatgtggaaatatctaaaaaaaaattatattatattacaaaaatcaaaaaagaaaagaaaaacaaaaatgttgctgcccaggatcgaactggggacctttagtgtgtaagactaacgtgataaccactacaccacagcaactaattgataagtaatcaccaattttacaacttattcccatattacccctacaagttcttatctttttctacaaccatccaatcactaatttccaaatggataaaaataattcaaacatgcattgtcttaataaaagacaaacatgtaagtttctaagaaattttcaaattaagctaaagtttcatagcaaaaaaaaaatatttaagtgtgtccctcacttactactaggcttgcattgccttacatgagtccatctcttaaacccataatgtgattggatttttcaagtgaagaaaaagctcttaaaccttttgacattttattgagttttcaagattggaagagagtccaataatataaacaagggttctaaattttcaagagctagaatggtcacaattgtaaaatcatgcttgaagtcactccttaaattggtgaattcaattttggggtttgttggaattgctatgatcttgtatggtctttggatgatgagagtttggcaaagggacattgaagatttttcctttgatgatcttctttctactactccatggtaagtactaagtagttcttttattgagtaagattcgagtgagtcatattatcgtgtctaatcaatccaattactatttttttttccggctagtagttcttttgtctttaattgtttctaatacagattgaattcaagttgtgtgatcatgtctgacctaaacaaaatgtaacatactatactattattcgagtcgcaaaaataattattcttcctctagagattcttaaaaattgaggtcagatttgagttgtgtgatctaaactattacttgtttcacaaaaatgtttactcatattggtgtttatatttttcaggtttatatatacttttcttggtgttggagtaacactatgcctaataacatgtttaggccatttagctgcaacttcttccaatggttgttgcctctcttgtgtatcctttcctcttgttattatggactaactctttgttacaatgatattttcaagttttcatattattatttttcttttaatgaatttacttatatattcttctatgataaatatttgtattttatctctaaattctatattgtgctcagtttttaatgattaacattcatccgacaaatttaattatttgtagtgtgaactaaactaaatcatctctgatttggacaaaatctaaattctatatccttaactcaactagtatatgatgatgattttgttacttcttctattagagacagcaattgtaacagatatactcttaaattctaattgggaaaaggtatataatctttgacaatcgtcttcttatattttaataaagaaaaaattaaaaacaattattatttttttttatctcatgcgcttaacaaattcttttaggatataccaaatgatcgtactggaagattcaatgatttcaaagattctataaagtcaaactataagatccttcaatggattggcttaataatagtcttagcacaggtatccatcttttcaaattatgatacttttcatgaaatatataaaaaatcaaatgagaaaacattggaacaaatggggttgatttacactaattttttctccctccataatttgcaggttctttcaatcttactggccttgattctaagatgtaaaggccgaaatgaggactatgatagtgacgatgaaagctcaccggcaaggcttccgctcataaagaatgtagaccaaccggcgccatatgttgtcaatggcgaacaatttggatttgcctctgaaaacatcaacaactccttgaatgtaagaatttattacaaacttttctattctttttaaaaaccttttaagtttaagaaacaaaatttgattgttgcctcttatttttctcagacaaataagtgaagagcaatgtttcaagcattttacaggaaaagaaagtaaaggaacgaaaaacaacatgtggaaaaaaaaaaagttatcagtctactgtgaattgaacaacatttacttatgaccaatattattagggtcagtttggcacagttgtgttgtggagaaaagcagttgtggttgtgctgtgagaaaaagcagctgcagtagaattgtgaaaaaaagctgaactgagtgtggtaaattataaattttaaagtactgtgagttattaagatctattataataacaatgaatgttataatttaatttatttataatcacaaatatatatataaaaaattattttatataaaatttttattttttatgtatttttttttccaaggaataaatttatatgcatttgataa

SEQ ID NO: 296942 - DNA, 4623 bp, Cannabis indica
caccactttcttcctttttttttcttttttttttatcaacaaacttaattttattcatttctaaaagaaaatttataaaaattctagataggtgctgagaaatgattaaattagcttcaaaaagtgatatttttcaaaggcaaactttcttgtatgttggtgaaaatcaaacaattatgaacaccttttatttattggaatatgtttggagcaaatcccatcacatgtgttgttacaaagcttgttgcgggattaaccccttttgtccaaaccggggtctcgggttttattcattcattcattcatttggagttcaatctttgaacatctaccaactggtaaagatctcctcggcgttgcttctgcagtgggaggtttgtcctaaagttttgaaccgaaaagttagtcaatccccgactcgttaagtttagaaactgaaaacatagtgaaacacaaaccttctaagctcaacagtggagtaatcaatctctgcgatgattatcgtctcttcgtgctcggtagtagcaagaacttctccaaactgtttcaaccaatgtttcggttaagggttttgttatgttaataacacgagggaaaagaagctaattatcgggatcaactcaccggtccaacgagtgtagagtggccccaagctacgtacccggattcagtgtctcgagcgggtgaacatgtcgctacatacaactgaaatactaaaactgcttattagacaaacgatttaagagtataaagaaaacaaacatgttattgaattctagagattttctccaacaaaatcttagaaaaaatctttaacattcatttcaattgttgaaacaaaaacaaaatagatagtcatagcctagtaatattataccgctcttattgtgaggtccaaaattcaaatctttcttttatcaatatcagaaaaaaaaacacaaaataaaacttttatgccaagaagaattcttaaatacttatttaagtataattttttatggtaataatacttaatttatatttttgaaacttccataaatactacaattaagtgtcaagtcaatagtcacattatagttcataactggttcaggttattaaatttttatattttatttaaaaaaatattctaagtatacaaaaaaaaaatgacatgtggatattgacttgacacttaacgataagttacaaaaatataacttaaatatcattaccgtcaaaaattaaactttaagtatttaatatttgtaaccagaaattaaatttaaatatttacgctacaaattactcttgatacataatatgaaattcatgtgtttttctttccaaagaaaaacaatagatttgttaatacctgattatctgcagccctgcacatgacaaatgaaggaaatccaataagaaaaacttgatatatggctgtgaatacccataataaaatctaaagaacgaatttttttttcgggtatttggcgaaatagcttctttctttttcttttagtcagcattttcttgataatttattgcaaaatagagaaatggtctatttggactagttaatagtttctttacctcgctctctgtagtaattcccaatgcaaaggtccggtagtcatgttgaaagccccgggatagcatagcaagtgagcacctaaaaatcaacaacttctatgctgtcaagttcaataatttgtttcccgaataaagtgtagaattggttgttcggaaattgtaggaaatcaaaataaccatggtttaataaaataccaacctcttgctgcataaatcattgctagttcctggaaccgaagatcgtaacagatacctataccaattcttcccacatctgcgtaaatttttcaaacgaataagaaaattgtattccctttttttgaaaacaaatgaataagataatgtgatcatgatgacaaacctgtgtcgacaattgtaggagtctggccagcagtaagagtctttgattcaatgaaagtaatcttcccaggaatgtcaatatcgaaaagatgaatctgcagttataggaatatgcaatttacggttacttataaaggaaatattttgatgggatttttctccattcaaaatataagctgctcagccaatttcattttccttaagcataagaattcacaatgtggtgtggtggatgagataagagaaccagaggacacggccaatgatacaaccactcgggtagaactcactcccaaaagctagcttaaaaaaagaggatgcccaagtagttatatactactaaccaatcggtcaatgtagaatcctaacaatacactctcctttggagccaacatccacggcagacctacggccctttcttgacatcggccccactaccacttgatgccaccacttgggtagtgctcaagtattatatactattaaccaatctcatactttgtcaatgtgtgatcctaccagctgattaagtgattttaaatatcaaagacactgagatcatcatacaaacccaattgaaagatataaagaaccacataaattcattggcttcattgggatgttgtctcacatatctagattgataattccactagaaagcttttaaatactaccaaaaaataatgactaaaagagatcaagacctacctttctgtgtttagctttcagctttccatcagcaccaaaaacacaacaagcattgtacaacttatctccggaacgctctggtatagatccaccaactatggtgatcttcaaaacccgagcagcttctgaaagcatggctgttgatggagatgcatcgccgcccgcatcaatgtcttcagcataaacagggaagcaatcgtttgaataaggactgttccatatttcctgacataaaacaaagcaatcattcttttctttgtagcagaactagcataggctcaaaatattgttcagttaagaggtaaattgaagttaacactctagggatatggaccattgcgttgggaatgatgctaactcttatttagttgccaaaaaatgtgcaaaccctttttcttttaacaatttcattctaggcaattcaacacacatcactataagaaggtcacatttggattgtataactggactatatgagatatgtaaaatttaggctaattaagatttttcgattccaaactttgaaatgtactaaattgtacctccaaacttttcaggccattaaaaatctcatgtgaagtattgagattgttggattcaatgaaatttcgttcaattttactagggagtctgacatggatagaaattctagatgcacgatttggtacatggacaatcactaagttaggcattcattagtaaacttgaacaacggaattggacagaactgcttaaatccaacaatcttattagttggagagaatttttaacagcctaaaaagaaaccacttggtacatgtaaaagttctgagagaaaatcctaattatcattggaaacctctacaatcctcccttgtatatgattgaaaagcttgagataaaattacactttctctaattatctttaaattcaatccaattccacctttcaaactaacaaccaaattcaatgaacaacaagtcaagattcaaacacaaaaaaatacaaagtaaacatttttacaaaactcactggaagtaaaacaagcttagcacccttttcagcagcttcctcaatggccttccgagcatgaacaatgttcctctccttatcattagtcaccgataattgacaaagtccaatcttaaactgacccagatcgaaaattggccccaaaaccccaaaaccaacaaaaccccaaatcaatacaaaccccaattagatgaaaaattcaaagaacagtaaataaaaaacttgcctttgagagtggtggaactggcaagggaagagccggtggtgctcgggcctgttctgggttgtaggaggaggaagccattggtgtaaaggagaaagctttggtgggaaatgggagctttgtagtggaattgaaaggagtgtgattgagattgaggagagatgagcgagagagagtgataaaggtgagatttttggagattgtcaacatttcatttcactttcactcaaaaactcttctctgattttgcttcaaacttttcaacttgatttgagattactttttcttttttattttctaagatggagtttgagatttactagaagattagggaaagaaaaaaaaaacaactaatttacgatataaatatttaaatttaaatctcggttataaataaatatttaaatttgatctcgtttggcttaacttctacttttgcttatagatagaaatataagatgagtataagtaggggtgaaaatcggtcggttatggtcggtttttaaaattttataaccgaccggtcggttacagtttttattttacgaaaaccgtaaccgaccgtttagagattataaccgtataaaaccgaccgtacggtttttggcggttttaggtagtttttggcggttttgacagttttttggttaaactatttttttatttcaagaaccgaaaccgaccgccatgtcaaaaaaaccgaaaccgaaaccgaccgccaaattcggtgatgacgtggaaccgaaaa

SEQ ID NO: 296943 - DNA, 5885 bp, Cannabis indica
gtattcatgaaataatccctagctatatatatatatatttcatttttcagattattttagtaaagtgtattaatttatgtggtagactatttttgcaatattactggactgcaattttaatgggatgagaatattgagtataacaagatacacgttttggcaatacttgagatttgatgaaaatgagctgtgttgttcacagtctctttattgtattatatatatgcacagaacaagtatacaactaactgaattcagttaggaaaaggtagttacaaataacagaatgtgaacagtaaaaacagacacctaactacctaactgtctgtactaataccccccctcaagctatacttagaatgttctaagtaaagcttgttacataaaaactgaaatctaggaaaaggcagaggcttagtgaataagtctgcagtttgatcttgagtgggtatgtagcacacttggagcttgttctgagcgatctgatcccggatgtaatgaacatcaagttctatgtgcttcgttcttgtgtggaagacaggatttaaggcgagagattgagcactttgattgtcgcaccataaaactgggggtgtcttctgcagagaaataccaagttcattgagtaaagatgtgatccatattaattctgttgcagcagaagacaatgctcgatattctgactcagttgaggatcgtgctactgctttctgttttcgagaactccaattgatcaagttgccacccaggaatatgcaaaaaccacttgttgattttcggtcatcaagacttgatgcccaatcagcatcagagtacccttcgaggttaagaagagtggatggtctgaagtgtaacccaagatgaggagtcccttttatgtatcttagtatgcgtttgcaggcattccattgattgacagtaggagacttgagatattggcttaatttgttgactgagaaggcaatatcgggtctcgttagtgtcaaatactgtagggctcctatggtacttcgatatatttctggtgtggctagaagaggactgtcatcttgtgagagtttgtttgctgagatcattggagtattgcaatctttggcatcctcaaaatttgttctattgagcaaatctgaagcatatttggactgagtgaggtagattcctgaagtatttctgtatgcttcaaaaccgaggaagtaactcacagagccaagtgattttaaggcaaatttatggtgcagatccgtgatcaatttggagatactttgagcatcagcacctgtaattagaaggtcatcaacatagacaagaacaagtaacagtgagccttgctgattcttgtaaaacagagatgaatcggatacagatggtttaaatccccaagttatcaaagtatgtttaagggtgtcaaaccaagcccttggtgcttgtttgagaccatagagagactttgttagttgacatacaaagtcaggtttgttgctatcttcatacccttgtggctgattcatgtacactttttctttcaattcaccatttaaaaaggcattattgacatctatttgttggatgtcccagtcataggtaacagcaagggagaaaactatccttatagtggatgctttgatcacgggactgaatgtgttgctgtaatctactcctggagtttgctcaaaacccctcacaaccaaccgtgctttgaatttatcaagagatccatctttgttatatttagctcgaaaaatccatttgttggacaaaacatgcatgtcatcagttcgaggaactagaatgtaggttttctttcgaagtaaggccatattttctcgatccattgctttcttccaatgaggcatggtaagagcttgtttaacagatttgggctcttcataaagttgctgttttgaagctgttaccagaaaaactttaggtttgtatatgccagattttgatctggtttgcattggatgtccttgaggtaagggtgggataggatagggaatatttggtgtggacaaatctggtgtgggaatttctggtgtagggacaggttgtgcttcattggtgaaggaagtggctacagtaggggttacagaatctgtcaaatgaggagaagaagtgttatgttgctgctgcatagaagattcagaggttaaatcaagagagccaaactgaatgtgggaatggtgaaccgactgtgatacagtgggaatgacaaaagctggtgcaaggaaatttttgtgataagtggcagtgtgtggtgtggaaaacattgcagaataaggaaattctagttcattgaagttaacacttcgagcaatgtaaattcttccagaggaatgaaggcatctatagcctttatgatagggactatatccaaggaaaacacacttagatgtcttgaattgaaatttgtggtgattgtatggtctaagaaaaggaaagcatgcacagccaaatgttttcaagaatgagtaatctggtttggtgttaaacaaacattcaaaaggagatttaaatttgttaacaacagtagggagtcgattaataagatagacagatgaaacacatgcatcccaccaaaaatttaagggcatttgagcttgagctaatagggttaatcccatttcagttacatgcctatgctttctttctactcttccttgttgttggtgagtatgagggcaaggatgtctaaacaagatgcctaatttttgtaagagaggttgtaattttctgtattccccaccccaatcggtttgtaaaccctttaggctgcaatctagttgtttttctacaaaagttctaaatgtgagaaagattggaaaagcttcagttttatttttcataggatagatccaactatatttggtaaaatcatcaacaaagaggatgtaatatctataaccttcagcagtgggatgtggggaaggaccccaaacatcagagtgaacaagttgcaaaggttgtgtagtttttaaagaggagctactaaaatgcattaagtgatttttaccaaattgacaagcatcacagaattgtaaatcagatttagacaattttgtgtttatttcttggagaacttttgaaagaataacagaggaaggatggccaagtctattgtgccaaagctgagaaatacaatcagtagtattacatgaactagatgcagtacaagcaattttattgggatttctagaagatagagaagaagaatacaatgaaagattaacatgtgttggtgtggtgaatgaggaaggcagggacaactggtagagaccttgtttaagagttccttgaagaagaacctgcttcttgatcttgtcaatcacaaaacaatgattagtgtcaaatttaatgataacattgttatcagcacaaagttgagagatactaatcagatttttgtggatagtgggaacatgtaagacatgttttaggatcaagattttagaagatttagaaggcagaaaagttgtgccaatggaagagatagagagagaagcaccattacctactgtgagtttacctttccctgtgtagtcgattttatcagtcagagcattatcagttgcaatgacatggtgagaggccccactgtccagataccattgtggatcattgacactggaagcagtggcaagcatggcttgtggttcttcaggtgaatcttgagcagtggagtttccttctccttgatagctcagatcgaatctgtgatagcacttcagggctgtatgtcccattcgaccacatacttgacaaatagggcgatttcctccacgattgctggaatttcgaccacctctgcccctgacagagccacagcctctattgttattggttgaaccttgtgctgaaggtcctttcttgtttgctgcagcatagttagctgtaggattttgcatatccaaagcagcgatcgaagtcatttgttcgattcgaagttcttgtgtctgtaacaagaactggacttcttgaaaagtaacagtttccttggaggtaagattgacaatggcagaatcatattcactgcctaaaccaccaagaatgtacagaattaactcatcatcggagatcgaatggccagctgccattaaagcatctcctaagcacctcatcttgaggatgtattcatcaataggtgtagatcctttctttgttgtttgaaggaggcctctgagttgcagtactcgtgctcgagaggtgtttgagaaagttggcgaagcacttcccagagttcagctgcagatgcacatcgagccacatgtccaagcatgccttcggatatcgaattgaacagccagctcaggaggaactgatcaagtctcatccaatcagcgagatcaggatttggtaaagatctggtggcatcagtaggatcagtgatagttgctggaggtcgaggacgatcgccattgatgaatccttcgagttgatgcgctcggactgtggacagcacctgagatcgccagtagaagaaattgttgcgatccagtcgaagattgaggggaacgatgtgattagggatgatctgcactatggagttctgtgacgtgtgatgtggagcggaagaagatgaaccttcaggcctaagaccagaggaagacgccatggaagaagcttcgagaattcaaagaacaaagaaaggaaaaaaaaaccaaggttctgataccaacttgagatttgatgaaaatgagctgtgttgttcacagtctctttattgtattatatatatgcacagaacaagtatacaactaactgaattcagttaggaaaaggtagttacaaataacagaatgtgaacagtaaaaacagacacctaactacctaactgtctgtactaatagcaattataagttaattatgatcacataaaatatttacaaaatcatagatcgaaaatggtcttttctatgtaactataaacaatataatataaaaacattatattggttaatataatattttgtgtatttgatataatggcaataccatgcagttaacatcagaatatctttgttctacatttctgtatgagatagtcatgataaataattggaataataatatatatatatatcttgcattatatatattaaataataaaaaaaaattagaaaaacttaattttagtggtcatagatcttattaacacttattaaagtagcactgatcatgatatgtcatctcatataaattaattatatgtatattgattattgtgtgatagtcatcgaagaagggatttatataataattattgggaatgaagaagttttgaatatataaatatatatatatatatatacaatgaaaattgaaagaaaagaagtccaagtgaagagattgcaatgtttttgttctaggtacacttgaccactattacgtactcatcaaagaaagaattactcataattaggttatactactactgttggtattgctacatttaatttggtctctttctagtttctaccttccattccataacaattccactatcaatttttgtttctatgtcggtgacccccaaatatatatttgtggatattcacgccacccactatatccaataatttggcatcaatttatgtagttgggtttggactctttgttttgttgaatgataaaatagattaagtattttttaaaattgtatgaataggattctgggctaaattattaacaattttattttaatataaccgacttatagataattaattcctaatacgaatagatgtagaaaatttaactagttttgttataatacatttaggtcggattattattaagttttattttaacaaaaaaatcagttgacttatttgtagtactattttgaaaaatacaggatctatttatcatttaacaaaacaaaaagt

SEQ ID NO: 296944 - DNA, 1478 bp, Cannabis indica
aataaaattgttattaaatatgtacaaaaaataattatattgtatatgtatggtgtataatatatatgttcgattggttctcggtttaatctatcggtgtgccattgacactaaagtcaaccgtgcaaaggcatttttaaacgggggcaattttttcagtttttgattttgttcgtgttgattttttcggtgttcaaacgggtgtactcgtggtttctcaatttttttgctcaaccctgttgacctctgccatccgaccaatagcactctgcacccactactcttacttgtatggtctgaccaacgtaccatgtactacatggtctctatggagaccacttgtaacttgagccataagagctaatctataaaaagagacaagtccctctttcaaaggagttggaaactttgtgtaactagctaacaagttgataacacaatacactataaatagagactcacccatcatgcaagttttcttcaaattttttttaaaaaatcatctatcttcttagttttcaataattacacaaaaattttggccattaatatacgagtttttactgtaaacatatatgaaaatgaattaaatgcaattattctataaatttacttaatatcataactaattaaaaatttaagctaaataagataataaattatttatttagttaattaagataataattacacaaacttaattgtaaaaatattaaatataattacataacattcttgaaattgcacaattattaaaattattacatgccaataaaatcatgtacaccaaagtcaaagatttttcacgttttaattaatttccaaataacatataagataatacattatacgtttaattaaaatggaaaaattaaaaaaaaaagttaattgtctcaattagcatataaattaagaaaatcataaattccaaaaatgtattcaaaaacttaatttttagaattttttttaaattttctcatggaaaacgatatgacccggtttgtctgcactcgggtcgcccgtacctatatggaaacccgatcaaaaacaccatgctatagggcaaagaacagatttgcttgctcagattaaatcaaaattgatataggaagagattcatcttgtttcaaagcttaataaacaagaataaatctgactttaatttataaaagtttcggtcattaatatattggacccgtcctaaaacccaacttaaacaacattattttgatgtcaaaatttatgggttttcccaagaacacaacgaattgtgtagattaaaagccagtttagcacaggtattgtgggaaaaaataattatagttgtactgtgagaaaaaatagttgtagcaaaattgtggaaaaaagcttaaaattgatgtaagttgttaaaaatctattataataataatgtcataatctagtatattataatcataaatatatatatataaaaaaattatgttttataaaatttt

SEQ ID NO: 296945 - DNA, 1153 bp, Cannabis indica
ttgaaacaccactcatcctcaaaaacaatacttataaataaaataaagcattttacagctttatatatagtcaccatttactacacatgataatgatttatgccttttgttttttcattgtacaagccattattcattcaaatgtaatttataacaatatacatatttacgccatactctatacgtacattgtatgagtacgtaaaagggtatttggtatgattagttaactaatcaaattaaattcgcttcgcatgaaagaaaaataaatagtgatttggaaagtggtattgtttggtactctatctttagtgctttaatgaataagggtttctgtgagaaatgtggaaaaatatcggatgtcacagagagagagagagaaccaaaatggtggtccatgaaattccctttttcccactgagcatagcctagctggtcatgtgttcattaatttatgtgctacatacattttcagtatatatagtctctgtagctatatatgatgtatatatacacttattatatagcttggggagcttagcttttgtttctttattagagatatacaatttctataactttgtttcttttctctcgaaatccatcaatatacatatatatatatatatataaatatatatattttctcgtataaagtcatatacggtagtatagcctttgtttatcgaaactttcaaggaaaaaataattatgaaacttaccatttttctcctttctgtttcaaagctagggtgcatggagagagagagagaaaaagagagatgtgcatgctttcatttaatacagcactatactatgacaagtggattttttgtttcagataaagtgtgtatatgtatatagctacctctcaaaaagtgatattgttgtctactgagtttttatctgcaaaaagttgtatgtgtaatactactaaaactaatttatttctatacctcatgggtattcggcacaaatggaatttcttttagaaaccatgaaataaaggtaaaaaagttcactattatacttcaaattttacattttactatcccttgtttgttcttttttttgaggagttttgtttttagggggattaaggatttgacaatggatttgaagggtaattaaagatatcattggattataaccc

SEQ ID NO: 296946 - DNA, 1812 bp, Cannabis indica
tgtcttatataattatccatacaataatttagctatctattaagtaagaatattattgcacaaaaagaacactatacaagcaatctttagagttcagctagtgcattgaactcatctactgctcaaaccaaattttattctctacttgttatctactttttcaaataacaaaactttacattgacttctctataattttatttgaaattgttgtaacataatatactatatgtttcgattagcaatattccttgtatcccaccaaaatatttatgacaatagtatagatgtaacaccctgcgtttaaggcactatcatatagacccgtaatttttagacatttattccctactactaagttctatgaataaagtaaagcacttgatgtatgacaattaatgttgtatttaaagggttaaatgattatggcaaaatattttatattttttttttttggtaaattatatgtttttattgatctcaaaaactttacagtcacaatccttttacaatcaatcaacactcatacttcaagaagtagctaggaccgtgaaccaattgctatctacccaactaattccttccatctgtattgactctttgtctatatgcattctgctttatctcctttacaataccttctatagtgatatgtacttgatttcatatgacgttatttctagctttccacaattgatacactagtgcatcaactgcagcaacaaacactcctctacgaataatttctattgccgacattttcaaatccaatcgagtcgttccttaactgatttcttatgaatcggcaagccaatccatgtgatagtcttccatagacattacttggtgaaagaacatgagaagaacaagtgcttgtgtgtttcttcctcagagttgcagaaaacagacaagttatctaatataatgtcaaacatgcatagtctatcctttgtttttagcctttcccaaactgctagccacctcagaaatctatgttaggccaaagtctcgaccaaattatatcagcccatgatccacccctgttttttccctgtatttgcttgtatacaacattgattttgtattccattgtctgagctgcagaaaataagccttacatgtggttcttttccttcaaaatagccatccaataccagctggataccatgggagcttcaaagtcccaccaattcctcccttttatataaattaaatgtacctatcgaatccataggttatcttgcttagttgctattaatttggaaattcggactagacttctaagtcacacccgcttactagattgaggagaatggataagtagttaagtaattataagagatacacaattaatagtagttcaccccctatatcgcattagtaatggagcttacatctactttgaatttttatttctcacgagatgtaaattacagaaagagactaagtgtcagaagcttcaaattttagagagacaaaatctaagaagaaaagtttcaaccttgtgggtagttttcggaatagtgagctaagggagctctcattttataggtcaaggaggcccacaaaaataggagaaaaatacaaataagatatttttgacgcttgatgactatctaatggtaaaaattagttattggtagtgatggcaatttttcggagctcgacaggtctcgctgcaagtaacacggagcttatttttttaactcttttgggggtaaatttttatgacaatagcttcaatactacgtctggagtgtgagaaatgatttaatagagcattgaattagcttcgaaactcaagttgaatcg

SEQ ID NO: 296947 - DNA, 4294 bp, Cannabis indica
gaggaaaaaattaaataaaaaattatatgaaattttcttagaaaaaattaaaacaaaatatacatgagttaaaaaaaattatgaaaataaaatcaaaataagtattgaaattaacatgaaataatgtgagaatttttttttaaaaaaatattaagagtaatttttaaaaattatttaaatttatattttttttaataatggggtgtacttatcattttgtggggtgtaaatagaactccccttactttattattttaaaaaaatgatattaattatctataaagttagaaataaagtcatttatttgcatttctcatctaatttccacccaagtaattcctagctgaccatagtaattgggctattaggcccatccatttgtgttggtagtcgaaatcgaacaggcccacgaagcattgtacgataaccccacagcaacaaaaccattttcttttattttatttgtaagaaataaaaaagaaaataataataattcatagttattacatttaataactaatgttttgatccaaagaaatgaaatgactgaagcttagatattatcgccattgctatttgtttttctcctcctaaaactctaccctctcctctctcattctctctcattctttctctctcacttcaatcttttttcgcaggccaagccatgactgctatttccaactccttgattctaacaaagaatcaagcccttcactttccctccggtattgatttgttttttggttgataactagtacttttctgcgttttttgcaatgtgatttttgttcttttgcttaagattattagatcaacgcggagaaatcaaagtatatttaggattcagctgatttgaataagaaaaatagtagcttggtgggaagttttaaattttgcaaatctttaagttgtggtaaggggtaaaggacaatttatggaattggtttgggatagaatgtgaatggctcaatggggatgttaggaagagtgtcattagctcaagccttcacttttcgactggtattgatttcttttttaattaattaatttattttgttgtttttggatgataattagcatgcttctgtgttattttgtaatgtgatttccgttctttatttttgcctagttaaactcaacttaatgtattgagttgaactcgacaaaagtagaattttataattatcggattcaactgatctagaaaataaaaatagtagctcgggagcatagttgtatgtattttcaagttgtgggttgggtatggaattgggaacagctcaatggggttgtttggaagagtgccatcagctgattcgtaggtggggttcttgaaattttgaatagttctattggtgtaattgttatggcaggatcttctttgaagcgatccaacgaatgtttgggaagtggaaacttgtctttcaatatcaatcccaagcgtgctgagaagcctcaactttctatttccagaaagtccttgacagttcaagctgcctataggtatctatttccttggttttatttcattatggtatgctgatttaaaatgcttcacatgttacttgcttagctcgagtttcgcagctctggatttgtttgtgtaacaaatagcttgctcttgctcaccccatgtgtttaatttcaggaaatacatggttaatttcaaacttttgttaagattttactctctttgtgcgtgtgtgtatttagagataatttttcctgcatatgaagttaaggaataatggatcttctttcttagtgtactaatgattgtgagaagttgcttgatagcatgctttcatgtgaattattattactcctaatggtgaagagatctccaataaaagccttttctccatatcccacttgattttaagaagtgtttaggaaaatatttctgttttctggaatttgaaattcccctgctgctttgtttgcgcccctttcgcttcacaaatatgtttttacatggggttctaatgcaagactcctatttgtctgattacagtgatggtggcaggccaagtagtgcaagcatctttgttggtggctttgttctgggaggaattatagttggtacactgggttgtgtatatgcacctcaggttgtacccgttaaccattgccttgtttagttgaaatgtgatgaaatgttgttctggggtagtgtgaagagtaaccactttcatttataacatataaaatttatctattacgattgtaaccattgtcttgtttagttggatattggttgttgcctcacatatatggctgtctgcagtcaaggaacttaaataagtattttaatctttgtccatattatttgacagatcagtaaagccctgactgcaactgaccgaaaggatttaatgaggaaactgcccaaattcatctatgatgaagaaaaggctttggaggtgagaagttgtttctgatctctgttttcttgaatgcattgacattctttcccgttcgtaaatgtgctacatacctggtttattttttgtactgtttacaattacatcattagctgctttcactacactagaattactctttatggttcaaatgagacatttttgttgactgtttctgccacaaattatcatgaggggttgttcttgaaacacttcattgtatatcgtgaactgtaatatttttcaaaacacaaaacaaaatccatttcccccgtattatatatttgttttgtctttcaaatgatacatatacaatattgataccatttttgcatgagttttcttacatgaaataacatgttcgtattttacttgcagaaaactcgtaaagtactggctgagaagatcgcacaactcaactctgccatagatgatgtttcttctcagctccgatcagaagacggccctaatggagtagctgtgagctcggacgaaattgaagccaccatataagactgatctcggttgcaatatagaacccagttttatatgaaataatatttgaacttctcgcaaagtagtgtgccatgtgctcatgaatcattataaattatcatttcgaagtattagcccttagcttgggaatatagattttgtgttgttcgaacatgttgggtctcagaattgctaatatttgaacggtgtactcacttttcttgctattttctttttttgtgcatattaccaaatgaatgaactggagatggactttcctcttcctgccatgaataagaaaactcaatctttctgataccccaaattggtggcaagattgtacttttaaatgctgtaaattgcaggctcaattatgctgataaggttaaataaaataactaatcataattttttattaattgaagtaacaagtcctacatccttaacttaaaattcaggctctcaatgccttggttttaaaatcaaagataaaaaccaaagccttttccaccatccaccatgatttattttcagccataaatctttcaaaacaagaaaatctcattcggatggataaaggagcctttccttcttgctcaatggactttgcaagttgagcaaccagacacctacattttaacataattctagccacaatgagcttttgttattgaaaagagtattgctaaggagtacccaatagtatccaacaccacttgatgtgacatgctggccgctgttagtgtaattcaatatcggattcgatattaattttcaccaataatataaaggatgttagacaacataaggtgccaaataccaatcctttattgaaagacaagcataaaagattagagggtaatctagtaaaagacaaaaaaggagagggtgaatgatctgaggttcatattattttatgaccttatcttataaatcatcttgattcattttctccacacattcgtccaatacattgacaccataatttgtaatcagacatttaatatatgaagaaaaaataaaaataaaccataacacattagaaagctcctcataataactataaaaacgaattcaactacataaagagaagagttagtagtaagctagctcttctagtttttgaagccatggcatcccatgcagctcttgcttcttcaagaatcccagccaacactagtaggctaccctccaagtcttcccactctttccccactcaatgcttctctaaggtatatttgtatattctctctaagttctccatctcacgttaactaacttgatcccaggaccgactctgaataatagtgagcctaaaaaattctttttgtgttttatatctaaagcaaagtgagtattattaggtttttttt

SEQ ID NO: 296948 - DNA, 4190 bp, Cannabis indica
ttttgtgattaaaaaattagaaagcaaaagtgttaccaaacggcaccataagatttaaacatttacaattataatgctcaacaagcaacccaaactcaaattattatatttaacgcattaaaagatatataataaacatatctctctaatatgtattgatttcttcatgtcatttagatccttttacttgagcaattctcttctttcaatctacacatcaaaagaaaatatatgtgcatggaaggggtgtgtatgaacactacttttttctctctcaaaacacacatacccacacacatccttccatctcattatggactcgaatggtaataccatgcattaccggattatatagttatcattatacgcgctaatatcgacattgagtgagcaacacttagtgtcacataaaatattttaatattataacataatatagttttactagaatatataagcaggactcgtttatactcctatgacatctatgaaaacattcatgtaaagagagtttataatgctaaggaaaatcatatgcatattaataatatgaatgaacttatcatgaaccaatatgtggcaatatcttctatatatttatataacacattccaccaaagcttcgatctcccataattgctatatagacttccatttggttgggtagttttttttattacaattatgctacaaaaattagaatgcaattgcaaaagttgcttttataataattaatatattttgaccagacatacattacatgtatggaatataaaagaagtatataataattaacgcgcgttgttaaacacgaattgagtaacacacaatcgacatatcaataactcatgttgttgtgtgttctcctatattgacataacaaacaataaaaataaaaaacagtaagaactaattattaatgtcctttttgatcattaataataagacaattctgaatctacacggcgagtccctttatgattgggacactgtgagagggatcgagtctagaagaactggtttcttgaggaaaatgtttgtccaaatctccaactggaaggaacaacgttgggaaattcaagtgttttaccatcaaccaaagtgagcttgaaagagagagttcgaccacgaacatcaatgctactctgccaattagcaccccaattcctatgcatgggcatccatgttctcatcctcgacccctttatccatgcagctttcacgtctccacttcctcccacgttcgacatcatcaccatgttgaaatttccttgacctctcattgtgaaacggactccacctcttcttctacatgacaccctatacgcatataaatatttaatgtctgttacttaagagatcaaagccaaaaatatatatactgcagtcacatatatgtaatgacttcttttttttttctagaaatgctaaaggtagcattttgttattgatgtaatttaatattgggtaccgtatattttattttaataaaaattataaaaaattgataaccaattataaggcgtcaactatagtggtgctagacactttgattctctttagtagtgctcttttgtttaaagaaatgttaccattttacaatgtcatattgctaaccaattataagacatcataagttactggacactaacgttatgaaactacaatattattgcacgagtataccgtgcccaattgcacaccaatttgtgtgtaccttataattagttagtgattctttatattatttattaaattaaaatgtacgagatgctatattaaaataaatgtgttgtgttactgtgaacttagcatttctcttattgcacatggttctggttattattattagaataatttatattatatataattaataagaatatatacaagtcatcaaatgatgtcattactatatatatacgttgtatatattaattattattaccttctatatataacgggtacaattccttcgttgccttgtctggcaatgcgaaaaaaggcaggcatggacatgtcgaagtggtggcgaggaggattgcaccaacctccgttgttgttttggggacaaaagtttgtagtggttactgtcacggaacgccgttgcaggcaccactttggatccgttttgtagtcgcagatcacctggtagcacgcaccgcacgcctccccgcctctaaacagagctccgctcactgccgccgtctgaactccaaaacccgcatggaatgtgttgtcataaccacaagctcctcctacataaatatattattaattatacattcattagttttttgagtttcatatgaaatataaataattaatgaggtcttccaagtatattaattaccaagagtagaggggttttgattgcctccatagaaagttgcatgagcaccgagccagccgttagcttgacgagcactgatgctcttaaaaaccatactagaaaagaagaaaatataccaaataaaatcccaagaaacactacaaaccgccatatataatatgttaatacgtactataaaccgctttcttccctcttttgtattgttttacgtaacttcactaataaaacaagctctttttaaaaatcttatacaatcattagaggaaaatgtctgtgttttatagactcaaaacacggttacgtcggtgactaaaataaaatcaataatatgttttacatagaaaatatataatttaattgatgaatgaaaagataagaattatatgaaaacgcgttattctctgatgaattgatcacgtcctaaagactaaagagtaaaagagtacgtactaggcatgtgtacggagtttttagacagcgtacgagagacaatatgagagcaagtgcatgtggttcctaatgcgatctgttttaaagtcacctgtcggtgatactattatgctagaatgaaattaatgggcactacttcaataaatatataaaaactatttatgatatatatctttaaatttttataatatctatttttcatttttcatttcatgtacactcttcttagacatgtgggctgcaggttgaatatatatggcacatattttttatgtgtgttttttgaatggaaaagaaaaatttcttatagctagctaccagctctagaatcttttgattatatattaatatatattatgaattatcattttcggataaatataacactacggatacaagtgcatgtgctggagtattaattgagtgaaaatggatatagagaatcatcacaaagtaatattcaaatagattttacttagttataaattattatttaattaacatctctatagtattagctcttaattattacttgatccacaatttttattgattccacaaaatctaattattataatttataaacatgaagatcaaatttttataatttggtcgcctaagtacgtataatcgaggaaattgcaggaaatattttttggacaaagaaattaatttagtgtgttaataagctctattatttagtactttaatgacgctaatctattaaagtagctagcacgatttaacatttccatcatatcacattgactattaatatttagtactttacgtacgtacgtttggaaatatattgtcaaggtttttttttttgaaaatgatatattgtcaaggttggtttttcaattttctttccgcaagatgtgaaaatggtttggttgtcacctcattttcacccgtccatgcataattaaagagtacatctatatatgattatatatacggtcgataatatggtacttagtaggcttatcatggattgagaattgggcggattgaagaaatttcaataggccaatttaattaaatcggtttggaaaaatataatccatttatattagggtaaatagcggcataagtactcaaagttttaagtttgtaagtggcataatttcaatgtttatttttagcggcataagtatccaatgtttgtaaaactgtaatttttctctaatttcgtacatgtagtatcagttgttagactatatatatagtgtatgtaatatagcatatacaaatgatatgaaatgcggaaaataaaatgtaatcatatcaataatatatgcaatgaaaggatcgatgtacctccagccattgatctttgagcttcaatccctgcgatagcttcggtattggagtttgggcttcc

SEQ ID NO: 296949 - DNA, 8269 bp, Cannabis indica
tttttttttttttgaatggaatatgttgcaaaatagttgctgtattggaataatattgaaggcatgttctccaaataaacaatttgacattccttggaaattcaagagatcaaaggtttttccaccaaattaagagggtggagttagaagaagaagataggtctatctcatgaagaaacaaccacataacatgacttattacaaatacatatagattctaccaaacttatgataggctgtgaattacagtaattattgtttgaattagttatcttgcccacttgaccaattaaccatatgtaaaattaattccaaaatgaaaaaacaaaaactcaagctttacaattttgaagaaaggtccacactccacaaaatcccaacctacaaaaattaactatacatctagctactaattaaatagttaaaattatttcccctctctccaattgaaaatcttgaaaatgataaccaataagattccacagcctcaacaccaattgggtcagccatagtttcaattacctaacttatataataaacaagaatcatgtactttctttcaaaaaaaaaaaaaaatcaaaattcaaaactatatatgcacaataaaaagaaagaaaaaaaatagttcatcatcatcattatgatcacatggataatgcataccatagaaatgaacaactagatcttctttgatcattgaagatcaaacttgtacttcttctatccttctaatggcttctttcatatcaattcgttcttgtggattactctctacacaatcagctccaacatgaaggagttcaatcatttggttaaccgcattggaattagcagcattcccagaagcgatttctgggtcaagcaactctgtctccctctccacagtcttgtctgccgaagaaacccactgaacgatgtcaattccgcctttgcctttgttgagatactgagaagggaatttcccagtaaggatttcgagaatgagaatgccgaggcagtatacatcggtcttttgtgagactctctggtacttgacgtagtctggggttttgtaggcgaacatggattgagctgcgttggtgggactcatcaaggggtgaaacgcatagtcgcttaggactggttcgtggtcgtggttcaaaaggacattgctggacttgagattaccatggggaaggtcgtagtttgaaaactctgtatacaggaatcccattccccttgcgattccttggattatctttagacgagttggccagttgagctctgcatgactggttccccggtctcctaaattttataaattgttagtaaattatgattactctaattaactttcacacgacacactaacaccactttgattttgcctatattttaaggagttcaaaacacaatagttatagtgatttttaatatcattatgaaactttcatatgatattgagtttgcactactcatttagtattattttgtttaatttcaatattcttactagttattttaatatcaaaattatatattttagtttaataaatcatattgattgtctagttgtcttttttttctataagatattggatcagggatgtttccttaatctcgataacaagcttgtaatattagctaacaatgatatttaaatattacatgtttgttatttaaattttgatgagccattttaatcatacacattaattgtatatagattagtttcgtatactttcggatggatgaagaatattgaaatacttttcataattcttaatttttgtaattgatgttaaattgttggatattattatataaggggatcattttttataatattttttcaatttttataatttgtgttgatttagtagttgctctaataatttttatctcacttatataaatttggattatgatttacattttttggttgattgctatgtgagcaatgtaaatttttataaaaatatataaaaaaaaaaaattggttttaaatgtgaaataatatgatattatgtgaagatatctcttaccatgcataacgtataagaggctgcctttaggaatgtactcggagactaacaatttctcttctctccggtaatggtaagccaacggagtcaatatatttcgatggcggagtccaccgaaccgcctcatctcggcatcaaacccgtctcttcctaatctattcatctccctcatccgcttcaccgccacagacagcccgaacgacatgacagccttataggccgaccctaacccgccattaccaagaacctccgccgcggctttcatcaagtcagataacccgaaagtgcccttttcgtcgttcaccattatcaaatcagtcatggacccgctcttcccgtgttgcgaatctccaccatcaccaccaccaccaccaccactagcagatctcttggaatcgctgcccttttgggtggatgaatccaaattccttcggttagagctgggcacgtgaacttcgaccacgtcgtccgtggtttccctccctagctgactaaaatcgtcttcaatattgttctttgagcttagcagagcatatattaagacaatgaccatggcagccacgactccgccgacgactaatttgttgtcatttgagtaattttcggtggctggcagagccggcgattgggttggtaccgtggagcaaactgtgtccaatggtttaccgcaaagaccattatttccggcgaaagcactagcattgtaagaggaaaaagatggccgggatttcaccctcgagcttgttattggataagtcaagtgaattaatgctctgtttaaagacaggaatcgagcctgtgaattggttgttctccaaatgaagttctatgagatgagttaattgtccaagagattccggcacgtttccggtgaattgattctcgttaagccaaactttcttaagcgaatttaaatgggagaagaaatcagaaggaatatcaccggaaaaagcattcccgctaagtaacagagatttcaaaactccaagcttgctgaactccggtattggaccggagaagttattattcatgaaactaattgttctaaggcccgaaatctgattcaaggcatcaatatcgattttcccagaaagacccatgttagtgagatggagaccggtaatgattccgtcaaaacacattacccctgcccaccgagacgaacagggggaagagttaggaacccatgaagccagagcattggtttgtgtaaaggagtttttgagtttgagaagggaatcaccttcagaaagtgaatgtgagaaaggaatgaaatagaaaagaggaatgaggaagaggagagaaggaacagcggccattgatgagctgagccggtaatggggacacagctcgagatagaaacggagccgctgttcgtagataatgcttggtggtgagtatgttttggtgatttttgcttagactgtttttgttggataatcgaaatgtgtgtcatttttggtgaaagaggaatgtgattgaggagtcttggctttgagaaaagggagttggtcaggaaactaccctcaatttcatgccttattctaataatagattttttttgataagtactctaataatagattttggaaagagaaagacattagattcttgggttgataactctcgttgaccaattcaacctcattagagacctttccttttattaacaatgtgtctcaatctccttcaattctgcaactcattttgtcaaatctcaagctcagatgaaagcctcttcttttggtgtccaaactataattaagatccttaaaaagaaccaataaaaaaacaaatatgcaagacttgaagaaaagggtgaagccaagactcaagactaaggcattgtcttagatgcttcggtatttagtatttacaattacaatttactctgtaatctgtatgctttgattgagagaaaaaaaaaaatgattaaaagttaaaaattacatacatacaacttaacttaggcaaaaacactgagttttcttctatgattcaacatgccatctactgtgaagtgaaagcctgcccaaaagaatagttattaattttagaacaacacaaacactaaatacaagccaaaacaatagttaaagattgttaccgaaaatatgttgcagtgaccaggatcagcaatgtgagccatcaaattgtcaatgggatctttaccagtataaatagcttggaaccaaaaacccacaaaagccagcatggcaagacgcccattcttgatctctttggttctcaaaaccatgacaggctccggagaccctcttccccacataaacgggtcaaaccaaagcccacccgggtacccaacatcgggctttgggttcttcttgtggggcattttgggctcaatgtcgacgcaacctgggttgagcatatcagcccatcttcgaccctcaacccagcccattagtactaattgaaccacaaacaaagtggtttggtccgcaaaatattctctggctccagcttcgtaccatgagaagtctttgatgaatcctaatctttcaaaccactcagggataaggattccagacacacccagcattgcccacctggcgtgcatcagttcagcttgtgcgaaccattttagtagttctggatcagaccctgcaaattaaaccaatttcaccactattttcctatcaaaaaattaataaaattgtgggaaattttcactcaaatttacggttgagaagaatgtttgagtacctaatccaagtgggtcaaagccaaagtccccaggaaggctttaacaaaaaaagaaaaaacaaaattaaagaaaaaagtgagaattatggcaaatgtgataaatttttttgaatatgttaaaagggaaaacttggtgaccttccatcgagccattcaggaggtgagctaccagggaaccataatggcctatctggaggaagtggttcacaaacactcgatactccttttgttgcattaaccctagttgtccctaacaacgatttggaagtgatttttggtgaggaaattttcaatggagtttccctgtttccaaacagaaagtaaatatggtaaggattattgagaagtgtacttgaaaaagtgagacaaagttagtgttgtgtagaaaattgtgacctttttgagacgattgagagagcagtagaagctattgccagggccatgttcttaagcaataatgattattgaggatttgaacttcgaactttgaaggaagattggataattcatgatagggtgtgtgtactgtagtaaggtaacgtgtacgtggcacaacttgtggaatgaaaggagaagaaccgttgggtttctgattgggccaacggcccaaatctttgctgcctattacattgattttgggcccaactcaacttctcatgtaaaaaagttagatccattgattcaaatacatatatttttttcttaattgtttatatataaaattctatcttcagttttatttgcaacatgatttatttaattaagtttcccaatgattcatattgtttgtatgaaccacttggaaaatgattggcttcacttagaaatgaaaaccacagtggtccacttggaaaatgattggcttcacttagaaatgaaaaccacagtggtccacttggaaaatgattggcttcacttagaaatgaaaaccacagtggttatattaaataagtgaactatgatggaaaatgtggagatggagttggatttggtcttagaatattttaaattttatttgaataagtgaaattgagttagttgggttatatatgtaggtagctaatccactgctttctttcaaattaatgataagattggagatggagatggtaacctctcaccagtcaccactctcccccacttctctctaatttgatgtttcaatagttttactattatgtcacctttcttcaccaaacatcacacgtatatcctaattaataattctaatcaaaattaactattcaaagataatcaaaaccttctcttcaatattatcatttaggtcaacgtttatttaagcaactataatcaatgactattaagtaaaaaaaaaaaaaaagtctaccaatgactaaggataagtagcacaatccatcaaaaccaacacacatacaatttgaaatctcttgatttttttttttatatatacatataaaagaaagaaagaaaaataagaggttttcatccatggaaagcaaaataaattaatatgattatgttggaatttaatggtctaacatgagaaaggataccttagttggagtagttcctattcaattatacatattcttagttttggaataaaatagacaacccacctgtaaaagcattattcaaatcaagaatccaatcaaagtattatgtatttttttttcttatatcaaaatatattattattgttttggtgatttttttttaaatgcttaattattaaaaaaatgttaacctcaatttttttttttttgtaattttttaggataaatatcattttagaccctgtgttttgtaaaagttatcaattagaccatctgttttgttgaatgacaaaatggaccctatattttctaaaatagtaaaaataggatcttgaactcaatttttaacaattttattttttaatataactaactttaagacaatttctaacacgaatagatacagaaaatataactatttttgtcataatatctctagatcaaattattattaagttttattttgacaaaaaatcagttcagggtcctatttgtacaattttaaataatatagggtctatttgtcatttaacaaaacaaaaagtctaattggtaacttttacaaaacacagggtccaaaatagtatttaccctttgtgtgggcgggaggaggaatcttttgaacaattatttcttacatgtgatgtggcttaccatgctggagatcttctccttggggtatttatccaatttgtgacactggtatccgtatgtggaattgggtcaaattcatttgggaccttaaacacaaggggattgcggcggatgaggatttcctgtatgcatctctggtggttgatacaatctggcgcacccgaaacgacaaggtacataataacattatagtagacgtgaagaagtgtatcgactctattcgattctcttttgcagatctacatgctactatttttcctacccctatttcttgcctgaaggagagctagtctcctcccccccctccccccccctcaagattggatcaaatagaattgcgatgttaaagtggggcttgatagcatatgtacagcggttgtagccagaaaccatcttggtaaggtggtttgggttcaaacggctagagttgtttttactgatatgatgtgcggggaagcggcggcctgctgtttgaccatttctgcagcattggatatagaagccaagtttgttattgtggagagtgactcgagagtagttatcaatgctcttataatgggaaggagactcactagactattgaaaactatgtctctttttgtaatagctactctcatttatttactagttattttttctcgaatattagccagacatgtaattttgccgctcataatgtggctaagtgagcgtttacccacaaaaaattggagttattccgatatctactatttcaagtaacatgttttgtaatgaccgtgaggtctatttttctattaatcaaactcaaattacgctttattttgaaaaaaaaaactacactcaagaactcagatcaatgataacaatttgcaacaaacacagttcgaattaataaaatataaacaaaatggatcaaaataaaaaacaatttgaattgtacgttcaatgcagtagagaaacctttgctactggatttaatttacaaaaaaaacctactcttcaatggtgaaaacactaactcgaactacttacaagactatatactctcattatatttaattctcacagttgagttccttatacaaccatcaatacacttctataattgtagtaagaacgtaatctaagagatttatatagatatcttaagatgtggtgagaaggaatgtgaaaatagaaaataactaacttgacgtcttattaaccttattgcatcaactaattgttcaattcgagtggtcaaatcacacaacatataataataataataataaggaaaatttgcggcaaaagtccccaaaaagttcacgttgatgcaaattagtctccaagctccaaaaatagcgg

SEQ ID NO: 296950 - DNA, 2015 bp, Cannabis indica
gatttgttctaatgagtaatatgtgagccttctctcttcgatactatagtacattggagtttaatttttaggttttggactcactaagcgtgtttgaggtcaagggttcgaatacgagtaggagagtttgtgaaaaatttagtcgtgtaatgacaatgttttcccttctatcttaagatgtcactcactactaattttcgaatgagttcaagtgatgcaccttatccagggccggccctaagtataggcgggctaggcccgtgcttagacccactcattttaggggtccaaataaaaaaaatactttttaaaaaataccatttatctttataataagagtctaactttttttttgcatatgacctattttaactcagggccggccggtcctaaccttatcatatgtgggggcaacccatctaagtgtatgattttggcaaacattttttcggtgagactggagctcctgccgacggaggaggtaactgccccctcttcccttttcaccctaattataaaaaaaatatattttttttatgagattggattttttttttttttttgagaaccaagagattggatctttttatgctcaatatttttattttgaggaagtgtggattaagaagaaatgaaaaagaaaaaaattgagagagaagaactagaacctaatttttctacatcaaagtgcaagttcgttcaatttggtggaaatcaatttttgggtccattaattattatttcaataaaatcatatgtttggatataaatcaataaatttagcagcaaaaaaaattatttctactttcataattataatataaaaaaaaatcattatatatagtagcattaaatgtaactaattaaatagacaactagccaactcgtcttaagtcaattagagtctttggataaaaaaatctaattgagcttttttatatgaatttttttttttggtatatatagtgctaaaaatttataatatagtattttgcaaatataatcatgcttttttttattaaaatattaaatgtagtactttaaaaaataaattaaatatatttttttaaaactagtaatatttttaataaataagtaaaaatacaaaaaaaaatcgtatttttatataaaataaatttgggacctttttattaaagggttatataagccaggtgagggaccttggatgtcggtctctgctgccccacttttgagccggtcctgcaactaactaatctattagaccaataatattttgcttcaaaaagatacataaaatcaataatatatatattttttttcaatttaattagttatatgcaaatgtccttgtaacttagtatatagctatccctttgccaacaatgaaatgtaaagaagggatcgatggtttagatcatgatgacatataatatagtatcattatcctaattaaactaaactctatctcaactgaaaaaaccaacctcttagatggagtcacatggtagcttaggtttgtttgtttatttttttgcaacataaattagtgttacatgtgaaaatagaaatattcaactacttgtggccctatcatattattatcataggaaaaattagaattttgctcaacaaaatcatttttttttttaatttaggcgtttatatattacaatacataatttaggattcaaacccagtatacacgtatcttataactacttgagctagcttcgtatggtccaacaaaatcacttcaaactatagaaattatattataattatctctaattaatatggttcacttgtgagatcatctctaatttaaatcacttgttgtatttattcttggacactagattgggataaggcttgatataaagttccctaactgttcatgtaaggagagattttgtaacgcccttacttacgtaaaataagatgccataaataaactggcgttaagatactaatgttgcctttattttttttttttaaaaaaaactcttttcaaaacatgggtacccagttgaaaa

SEQ ID NO: 296951 - DNA, 2162 bp, Cannabis indica
aaaatggtgaaatgggggtgatttttcgtggtggttggcggagagggtttggggtttctctgatttggggatttctgggctggctggtcgaatgaggaagacgaagtgatgagctagggttataaaccctatggcgtcggttatttggaaataaccgatgccaaaagtggcgtcaaattcccttctaaaattttttaatcctatggcgtcggttattaattattatgctgaaaaaagcgactctaaaggcttgttttgtagtagtgagtacataattaatcatatccctagcgagccttcaatccatacctattaaatatttagccaaccccaagcgagtaaatggcacttccaatcgcgaacaataataagtgagtaaaatgacaccttgatgataaggtgattcaagatggtaattagcaaaaaaatagccaccatggagatattggataacagtgtcccacatgaatcacatcaaatgtaaaaatattgagtcatatataagaaaataaactattccactcatcactaattaattttaccaattaattttgagatgatggaatctcaacatgttctatcttgaaaagtaccattatttatcaaaatttaaacacataacaatatgacaatgccatatatatcaacttattattacatattattaattaagaccaaagcataatccatgcatgcatggatcttaattataagtaaatcattacatggaggaaacataagcacttctaccagaagtagtagttgtagtggtagaaagtgaaacattattaacccttttgcaatccaatctaatttcaccattagaaccagtgagtggactcaagtttcccattttgatcatagaaacaacaaagctttcaaagaaagcagtttggtttgagctgaagttgttaacaataggaagagtgtcatttgctgctaatgggcttgaaaacagctcttggtcacttgtgaacaatcccatgtgttgttgaagatttgagtagtagtttctgtcaaacaaatctggtgtggtggggtctaaatctgttaagatagaggcgtttcctccttgaggacatagatcttgtaataatctcaagtagttttcctctatggttggatcaggagcacctgtgccactaaaattgaataatcttccactgaaggttccacattgaccccttccaaatgtatgagcacctatataaacatataaatatatatcagtactgtcttgcttagtttttttaagctaattaggattcttacttccaaattttgacatgtactaaatcatgccccctgaacttttctggtcattaaaaattccccattgcgattgctagatttaaaaacttttgtctaatttcattcaattttactatttcggtgattatttatgtactaaatcatgctcctcagactttaatatctaccaaatcatgcttcttgaactttcatatacatgttagactttttttactaaaatgggataaaaatccttaaattcaacaatctcaatagttcaggggcataaaaattttaattagctttttttttaataacaattattaaattaaaatatgtaaaattacctgataaggcaactaggtctgtagtgttcaaatctaaatccctgaattttctctggagtatatctagggtttcaaagggagctggaagtccattggcaccagtttgattggctattctcccatctcttcttcctaatagatttctccattctggacctcctgactgccatagccaaaacatataattttttataaacaaattaaatgaattaaatcaaatataaacaaattcatttatccattgatatgcttataatattcctaaaaagtatacatatatataaatgaattaaatctaaaacaaaacaaataaaatccaaaaactaaagatatatgtacataattttttatagattatatcataccaaatacatcatttactcaacaaccaaaatcctataatttatacatacctacattattgtaacattttcattttatttaccttaaatgtaaataaatcaattataactaaagaaaaaaaaaatacataaacaatttcaagtgagggtatttctgtctttgcaaaacctaagatatttttttttcaagaaaaattttatt

SEQ ID NO: 296952 - DNA, 3688 bp, Cannabis indica
aagcttccatgcaattttccatatcttaatctcagactcactagtattagtgatctctgaatggtgcagcaactgatatgcctccctcacagtatagaacccataaaggtccttgtgccaataccaagtatcaataggagtctcctgatcaatgttagttcgaatgatcatctctttatctcggtcattgaatatattcgaaaccacctctaaatcccaagcccgttctcctaccaacatgaggttattaaccgtccacgtctccataccagtagctctagaagtaacccacggttgagaatcatccgcaagccacgggtcaaattgaacactaatattcgtgcctggaccaaccccccgacgagcgccctccttaatcaaagcttgcgtttcaaaaatactcttccatatgaaactaggattcggcccaagagaagcactgaaaaacatcatctttatagtattagttatacataaattaaaaaacatcatctttctaaatatggaacacattttgaatagtttatagtattaaaaataagtttaattatttttttaaacactgaaaattaactctttcgacacataaactattcaaaaaatttaaaaatttataatgatgatattataactatataacgaatattacaattaacaaaaaaaaaaacatattttggcaaataatattgtaaattgtacactttataaaagaataatttgtgacgtaaaatatttaagtttaatttctaattacagattaatatttatgttcaatttttgacggtaataatatttaagttattttttaaaaaattacataaatagctacatgacagttcttggttagtgtaccttattaaatttttattttttatttaatttaaatattcctataaaaaaagatatatgtgaataataatgacttcacttgataattaagtgcttacaaaaattttaaaaatataacttaaatattatttaagttaaatttacatgtttagttctaactaaaaattcaatttaaatatttacatatttatgccactaattaattttttttttaattatacttttgaaaaattatatgtttacatatttataattatacgtgcatgtaatcggtagctactactgcctatagtttataattattgcattgcgacaattattcctacgtatttcgtaaaagaacactagacagtcaaatattaataaaataattccgaacacgtgtcataagccaattggctcatcaaatttcggacagagagcaacacagtacgaacgacaggatagtactctctctctctcccaatcatagctagtagctacaacaaagacaaaacaaaattcatcataaccgtcaaatcttcagcttaaaacacagctccattcttgaccgttagatctaattcttaccgattaccgatgaagaaaaaaaacaggtacggaaagcctggcgtttttgttatctcccttaatgatagagtcagtttggaccgtccgatctattctcccacgactaatctcaacggtcacgaagacttggcacgaattattctaatatgtatgtaagacaaaaggttgtgttgacgtggcaagtgacggtatgctggtgtgttcctcgatgaaaacaacggacagtttagaagcgttggattttgatccaacggtttagattaaagggttgagttttgagagagtggagtcatgaatattggtgcggactggtgagtgtccaatcaaaattaaagaaaagagctgtgtttaaagggtctgtcatggttctgttttgtaactgggtcacccacgtggtccctctgttccacgtggcaccatgagcaaataactgtataaatatagtatttggatttggagtatatagggatacgattttgtcttgtaatatacttttatggaatgtatttcatggtacattagagggtctcattatattagataagtattagggtacgttattattttttaaccctaattacgcctagatcaatctcaaactctcagatcaaataactctacatcacgaaatacatttcgtgaaagtataatcacaagacaaaatcatgtcccggagtatataatagtggataattttatgactatttctattgggtagtctaacacactcaagatttgtcgttttacgattgattagtaataatctttaaaagttattatattaaactatacgggacatgatactttattatattaataatgatattgatacgttaagtatttctctaatatattctctagcatgcacgggatgtactgatatattctctatctaactatttcacaatatagaaagcagtattcgaacaatatatttcactggcgtataaaataaaatattcatatgtataacaccttgtttgaactcttttttaagcgtgttaaatttttaaattttttaaaatttaacaagatgtcttaaacaactatattgtacataactataagaaaaaatttaactaaaaaattatttcagataccaaaatagatagaggtgtatcggtgaatctcttttaagagagtgtattgtaaaattttcaataaatttaagtatttatttgtaaataaaaattaaacttaaaattcattccacaaattacacattttcttttcattatacatttttctagtaataattagaaggggtgaaattcaaagattagactaatttattttatggaaaagaatgttaaattagtataaagaaaaaaggacacctcaattatgaagttgtcaattcgttaagcccaatcatgacgtatgatattgaagcaaggtgggcccccattggttcttttgcatgggcctcactcacacgtctcaccatcacaaagggctatgaaaatatattttatttcttttattttctttgttcccgtttttttttttttttttgacatttcttgtccctctttttaatttaataagttactaaaaatgtcaaatatattaattgctacttgataccattacaataaatgttgatgtactttcacaaaatgtattccgtgatgtacgacaactattagattaggggcttatttgatctgagagttggggttgatataggagtaatcaaggttaaaaaataataacgtaccctgagactcatctaatgtaccatggaatacattccatgaaagtacatcacgggacaaaatcgtatcccataaattatatttttagtcataataaaatttatgaaataaaagtaaaaaagttgtgacaaattacaaattattatttttaaattatgactaaaaaatttgcggctaaaaatattactcacaaaaattataatttattatgactacaggtatttttaatcacaataattattataactaaagttaaataagtattaacttatatctaatagtatgttttaattacaaataatattttgttttgattaaaaataacatttaattataataaatttatatcttgttaaaagattttgtcactaaaataattattttttgtagagtacatgaaatatttgtcataatcataattattacaactttgaggaaagaaaaaaaaaatagccctttttggggtatggtagctgaaaattcattaagaataaattaattaccctttcttgtacattatttttcattggtaaaaaggaaaaagaactaat

SEQ ID NO: 296953 - DNA, 2685 bp, Cannabis indica
aaaagaaaaagagaaataaataagagatttgaattttaaatgtccactcacttggagtccaatgtctatgaattttttgttctcttcatgagtgatgattgtattttacaatcaacattgatcgtttttattttatcttggagcttgaggaagttttttggacaagcttacttgttatctcactctattttagtttgattgaatcatgaatgtgtggagagggagttattgactcttgtgtaacgctcgtgcttcagttttgtagttccatagttacacgtacgttactttgggtgcttcctaaaatgtcgactaatcctataaaccaacacgagtatttccagcatgctttatcctcacttgcacgtttcttaggaaaactttctaggaggtcacccatcttaagagtgctccaattcttaggaaaactttctaggtcacccatcttaagagtgctctaaatcaaacatgcttgactttggagttttcaagtgatgggctaccgaaatgaaaatgcattttgctggcataagtagtatttatcaatccatttaaacctttatagtgaaatatttattctaacacgaaaaatgaaggttaaatagagaaatatttattctaacacaaaaaatgaaggttctttacactaaaatagattaaataaaatttatggtgatatattactcaagcaatagatcacaaactaaaataaataaataatctaatcttttattcattcaagataaaaaaatataatagaaatacttacaataaaactctaactccaaaagaattaactaaatgaaattaaattgacgaggctcattaaacttcttacgtaaaaatcaacttttgagaaagaaaattaaataaagttacacatatattcctcattcggattttcttatggatcctttgttccacatgcttaggatttgttggtggttgtaccgtctgtttaggttcgttagggtcttctatgtcagaccccatcttctaaagtgtctcttgtaattggcttgtaatcaaaattttctggagcaagataaatgcttgctagtgtctttggatggcagtttaagggtcatgatgtttttcatcaagtgaaaggtagtttatggttctaacacattgttcattcattttcaattccaatgtagaaaaagtatcgatgaaacgcttaatcaatgtgtcatacttcaaatattctagatacgaatattcatatttatttactttgatttaagtgagtctttgcctccttcgatttgagcgagtgggacataactaaatatttttcgtgtgttattagcattacccgctctcttttcatagtctctcctatgccttgattgatgctatccatattctttattatcccatgcagttcatttctctcattagactttgataagtatcttaaagcattaatgatcctaactatatttagatccataagctgactttgtataacccacaattaatactcaaaattaactaaatttacgtataatacataacacaactaagtcatacttacttggcaacaagatgatcctttgtaacaatggtgtgtatggtgtgaatttagggtcgatataattgtgactcttaccatgtaactcccccgtcctcagatgtgtaatgctcgtttcagctgggtagtcccatacctaaacagtcttagaatcatcacaactgtgtaacgcagttgaagcaggggcattgtgaatggtattagagccacaattatatcgattccaaattcacacgatatatacaccatatctgcgatgatcaacttgttaccaagtaagtatgatttatttgtgctatgtatatatgttaaatttagttaattttgagaatctattgtgggttgtacaaaattagattatggatccaaatatagtcaggagtattaagactctaagacacttgccaaagcttaatgcgatgactgaacttcatgggataatatagaatatggataacatcaatcgaggcatgagggagattatgagaagagagcgagtattgctgatggcacatttcaatataggactattttaatagaccctcctatgtttggcaccaagaatgtagacttagtgaatgaatttaaacataatatcactgaaagtggtatttgagagaatccatcaaagcccaataagaaatctgtgtatgtattcaaattccacaaggctggattacggaacttgtgggtatacacatcattcgaatcggttttaaacaaatcgaagaatccataaaagaaattgactaacatcagcttgaaggtcccaaatagaggtcaaagatggagaaatgagaaaacttaaagtctttaacaccatattacaatttgaaaggatagacttttgtagagaaggattgagattctattaggccttaatgttagtctcgctagtacaactcattagaattatggaagttgagttgtcaaatctttagcggccgtgttcagcgtttctaagtttgtgtcttctaatttggttggctagttaagattttttgttagtttagcttataaatagagtagtgctagtcttgtgagaggggtgtgaattttgtatgaaatattcagagtaaaatattactcagggagtttaccaagtttctcgaataacttgggattttgtatttgttcttgctcttatt

SEQ ID NO: 296954 - DNA, 5146 bp, Cannabis indica
gtgaaccatgcaacattaaaagttatttctgatctatattaataagtaaatctgattatattaaaatgagttttatttaaggcataaaacccaacagttgggtagagagaaaatgagagcaaatgagagagacagagagagatagattagaaaaatctaataaataagtaaagaaaaaaaaaaagtattatttttatttatgtttaattttaaaataaattttataatatttaagttattaaaattatttgaactaatgaaaacatggcagcatgtctactcctaattggcacttaacatttaaatttaacagatatataaaatttgcaaacagaatcaaagataagaaagatattaacaccaaaaataaaataaaaatattaaggattaagtgtttaataattgaaacatacaagagtttggccataaatttctctaataataataataataatttatatgttttgaaatttgtcaaatattattattaaatattatttgtataaaaaatatgcatttaccttaaaagattattatgcttataaaaaatattaatttatggtttaaattacaatattaaataataactaactttggtgcaaaataataacttattggtaaactaatactaggagcaaatcatctaattgttcatttttaaatgttttgttggagtgagaattaagctgaataataaataaaaaaaaaagctacacagaaactttaataataaataaaagcaaactaacaaacaagaaaaccatgatcgtatatgtaagtgcataagaggctggcatttcttgggtcttgcccatcagatttaagtattgctgttgggatttcaatcaaagacttcttcaagttgaagttattctttctcaatgcattcttttgcttcttcttgttcttttttagtgttgttattattatatccacacctactattttgattagctaacctaaatgactaaagttggttgcagcacttatatgatccacgtgtaaatactacaacataaatacattacgttacaaaatcaagaaagaaacccactactctacaatatctagattcgtgctaaaagacaaaattttcaaactaaaacaatatatttccttttttttcttcgttgtttactatgtcaaacttattgaggtaaccaaaacaactgagttggtaaataaatacttttacttttctgtcagacaaaattgagagagagacataaaaaaggaacaaatcccttaaatataatattatatatagatgtacatatagagaaccaatactatgtacatatacggaatggtgtataatgaatgattccaataagaaaacattttcttagcaaatcttagttacgcccttctcttttcatgttcctatcaattcgccctgtaatattatttaaaaatgtaaaatataaatagagacaaattaacaccaaaccaaactaaaaacccaacaacaatagagagagagagagagagagagagaaaatatctcctctcttcctagctctgtagcttaagagaaaaaatgggaatggaaagagttgaggtaagaggtttgatgatatggtgtatgataatgggtttattagcaaacttggtcacaacccatgtccatggaggggaccagtctcccttggtggcagcagcccattttcggaaaatgaaaactttcgaagcctcggctgtccctgtttcaggatctccattagtttctccttctccttcacaggtaggtaatcatatatatatatatatatatatagtgcactacatattcatattaatgaaatgatggcctttgtcgttgtgttcgattaatttatattggatgattggagagaacagggggagagtcatccacgagtgtatcacgtgacatcgtacggcgctgatccgacggggaaaacggacagtacagacgcacttctggaagcaatgtcggctgcgtttcaaggcccaaccaaagggttcttgatggaagggatagccaatcttggtggcccaaggatcgatcttcaaggtggtcactacctcatcagccgacctcttcgttttccggcagccggcgccggaaatattatggtatgctccctaccctactccctacttccacctgttttttttttttattattattatttttcatgagcataactagttattttgttttttttttaatctgagaaggaagaaatctgttgtgttgctgtaaggaaattaaaatattaaatgaagttactttgtttgaggccacgtgtcatccaattaggggatttgaattaattattattattattacctataatatcataataaatatggagagcaggggttggtacacctcgaacttctttttatagaattaattaattttgtagtgaaattctcattgtgattaattaataatttttttcttccttacggtctaaagtgggattatattgggtttctctttgaaaatcacctatgtttgccaaagaatattcttaactcttttgaagagtcaaattattttaatatgatttattttgtgtcacatatgaatgaaatatattaaaattgtgactttaatttaacaaaacagattcacggaggaacattgaaagcttctgatgatttcccactagacggatatttgattgatttgtcatcatcatcatcatcatccaaagctaaacagagtaacgaaacactaaatgctgaacttgcttcttcttcatcctataactacgagtacattaccataaaggatgtaatgttagactcaaactacagaggaggagccatttcagtcataaactcattaagaacaagcatagacaactgttacattacgcatttcacaactaatggaatcgaagtaagacaaggccatgaaacctacattcgaaactcgtacctcggccagcacatcacggcgggtggcgatccaggggagcgcaacttctctggcacagccatcaccctggacggaaatgacaatgctgtcactgatgttgtcatattttctgcagccacaggaattttgatctctggccaggcaaatgtgctctctggagtccatttgtataataaggccactggtttcggtggcactgggatttacttaaaacttcccggcttagcacaaaccagaattgtgaattgttacttggattacacaggaatcgttgctgaagatccggttcagcttttggtctccaacagtttcttccttggggatgcttatattgtcctgaaatcagtaaatggggttgctaatggggtcaacattgtggacaatatgtttagtgggtctggaaaaggagttgagattgttcagttggaccaatctagagggaaatttaaggacgttgatcaagtttttgtggacaggaacaatgtgaagggaatgaagctcaaggcgacagttgctaagggagctgttcaagggaatggaacatcatggacggtagacttcagtggagttcttcttttccctaatcaaattaggcatgttcaatacactttaagcacatccaatggtggattccctaaccatgtccttcgcaattcgtcagacaatcgagttgttattgagtccaatgtggccattccggccagtgttttcgtaacggttaaccaagtacttgttcaaagctaattaatgtgcttctaatttcctaacctatcaattggaatcagatagtttaatctgcctcagctaaatataagataaaaactctcaattttatgtactacaaccaaaaggaaaattaattgtcttagactatgttgtaaggtttgggaatatactcaataaagtgtaaaatacacaaaagatgttatgaagaaactttctctggtttctcacacaaaaaaaaagaaaaaaatccaatcttctgctttgtctattcaatatgggcaattgacatttctacaaacttttctaagtgatttgcgaagtccaggtttgcttggctgttatcaagtttgtaatggaatcaaaatgctaattccattgtttgtttccactgtaattaatgcgacatcatatacttgaataatgacagagtttaaacttgaaaaagaaagagaggaagaacagagttgtattattgcattgcagagaaaaagaaatacagagtttatatacataggcctaaatcaactaaagacaacagactcaacaactctgtaacagaaataatacaacaaacgaactgaacaactgttaggacagttggcacaacaatcctatgtaacagcgtccttgacagcccccctcaaactgagtgtggatttagaatcgacacacagtttgcttcgaagattagagaagcgagagctagagatgggcttggtgagacaatctgcgatttgagcctgagcaggaacatgtttgacttgtatttgattttgtagcaccttatctcgaacaaaatacaagtttatttcaatgtgtttcgttcgagcgtgtaaaacaggattggcagctaaaagcatggtgcttttattgtcacaccagatagaaggagctgtaggacagtgaatatgcagaaggagagactacagccaagttacctctgaaacagcacttgcaagactctgaaactcagcttcagtggaagacctgctgattgtggcttgtttttgtgatttccaagtgactaaatttccccctagatagatgcaataacctgtcgcggacctcctgtcatctggatcagatgcccaatccgcttcacagaacacttcatgagagaaatccttgactggttttagcaagagaccatagtccaaagtgccagccacatatcttaagattcttttcactgctgtccagtaagaaagcagaggttgatgcatatattgacacactttgtttacacaaaacgctaggtctggccgtgtgacagtggcatactgtaatgctccaacacttgacctgtacaaagtcacatctttgacaagttcacttccacaattcgacagtttgaggccactgttcattgttgtgttttgtgtgtttatattttgcatatcaactttgcaaaggagctcttgatgatacttggtttgggacaaaagtataccttcagaggttcgagtaacttggatgcccaagaagtaattgttggaaatattttac

SEQ ID NO: 296955 - DNA, 9379 bp, Cannabis indica
gattaatttcagagtgcaaacaacaaaaataaaacagaaacaagagatcagattacatggttcagatcatggtggtcctacatccaaggcagggatatactccctagtcaaatgtactatatatttcaaggttatactcactaatcaagggtttactgctctcaatataccagtataacattgcagcacatggtatattcataagaaaaagacagcaatatcctcaataacactttctcgtgtgttgacacctctctcatctatacctcacaaatgaacatccttttataagtgagaacaccagccaattccaaaaagtacaatcttggacaagcttcttgattttaagtaagccaatgagtgagctgcagtttcacacgttaattatgactaacataacagttagttaaattcaattaggggcatatccaataataataaaacgtaaatgatgaataatgatcaagcaaatttattggcaattttaatgtagaatgttgattatgaaccatgattgcagtttgcagagttatctaatcaccatgtagcatcatctgttcaaaatgttttatgaattgttttctgtatgcccaggaagtcttagaaaaaattaacaattatttgcttatttacatctgcacccttaatattcactctattgtattgttattgtgaaattagttcggttttatcatctttttcaattaataataattgagatgctatatttttcttctgaagactttaacttgcatgaagattgagaatgtgaagttttgagtcccagcgttattgttagcgcaattcttctaagggtattgaagaggatctatttgcattttcttaaattttttgtgagaaaatgaattctttttgggctagaaaatgttaacaattcaagaatgttgtaataaaattgtaatggtttttccacatgttgttacatgttttcttatcattgcagtgtttttcattgcttatcatttcaagaaactttatgtacaattgcatgatattgaagagggactaggatttagaaattaactagatttgttacaacaatgctccttttgcagctgttgaaggttcttctgtcgctttctatctggattatgctgatttgcatgctgataattttcatctttgctacacaattattgttcaaggtaaatattttaaaattcttgtaaactggcttgaaaatacttttgaacaaagtgaatgagatgattgtttgcatctgtcttttaggtgcaaaaaatatcatcaacgcttgtcgagaatgcaaattaagaaagttaatatacaacagcactgcagatgtggtttttgatggttcacatgatatagtaaacggagatgaattgttgccataccctgtgaaagtatgttaattccaaatgtgtccttcacttgtcatgtaaaccattcctgatctttctttagtgatgtctctagaatttttttgatgcagtttgataacgtattaactgaccttaaggctcaagcagaagcgcttatcctccttgctaacaatattgatggtcttttaacatgtgcaattcgtccttgcaatgtgtttggacctggggacacaaatcttgtgccatttttcgtgaccttggcacaatctggttggacaaaggtctgaaagcaacttttcacattttatgcgatgaaccagttgagatatgtttcactgtatccactgaacagtttaaatataatgcttgtttttcataatgttggcaccaaagtctctctcctacacttttttatttttccctttttgagtcttttcttcactcataccatttgagatatgtttcagtgtatctactgaacagtttaaataatgcttctttttcataatgttggcattttgcactccaaagtctctctcctactcattttatttttccctttagggtctttgttttactcatacaatcagtaatccaacatgaaaattatttactaatatgctgttgatggttttttcattcatcgtttatatgtatatgtatgtatgtgtgtgtatataatttcaattcttgttcccaaaagttatgatgttaagtagtaaacagcataatatctgtatgtgctcatgcttcactttttatttatgcttttttttaaaataacaaagattctcatttcagtttattatagggaatggtgaaagcatatcagactttacctatgttgagaatgtctctcatgcccttatttgtgtagaagcagctctagattttaggacggcctctatagctggcaaggtactcttccagttgagtctttattttaaagtgttttacaagttgacgttgtatgaatgcatccacatgtaaccatctcattttcatctatttgtaggcttttttcatctcaaatcttcatcccacaaagttctgggactttttattacttattttggaaggcctaggatatcaaaggtaatcatccttatgtcaatatctgatagaatttctattttcttaatgtttgcttttccatattatcagtagaaagtgtgcatccaacttgtataccgattactgacattatagtgatgcaatttttacttgcatcaattcttcatactcagtcgcaaactcattttgactgcagaccattaattaaacttcctgcaaggatggtttggcacattttatcatttataaaatgggcgcatagaaaatggggctttctagaatgcagtcataatctgtttcattatgctcaactagcctcacgctcaagaactttcaactgttctgcagctcagaaacatattgggtactcgccattggtctccaatgaggtaagtttttgttttttctatttgttgtttttatcgtctttatgatatccaactgtgtcgtttgtttaagaaaaagtcacaggaaatctgatgaactgttttatcctctcttgttttttcattttttgggaagggtgatataagacaggatgctctaaagaattccactccttcataaaatatgaaaacaagacattctatagttctttggcactaaatagccacaacgcctacctaattgtcttcataaggaatgaggactttcttcggaagtcttaaaaagaatcctttttcatttcatttagccataattgtagtcatctgtgagctgataaatgcgtacttctttgatgaaccaaactgaaattaaaatctttgacaacttttcttgtacttgcactaaaaatggacagtgcatgaatagatgttccatcatttggcattaagcacgccaaccagaagataagatgcaggacagtattttcattttgaaacacctttttggtgttcaacttcgccattgccaacaaccaataaaaagccctttaccttgaagtgataataaaagattaccataggcccttttgaaaatttctttgtttgggtcaaagcgttactggtgaaacaacatattaaatgttgattatatatatatgtatatacatatatatattaagcactacagctacatgcgactcaagtagatgatataatttaatctgaagttgcttccgctgggaattataattttattggtaaaaccacgttatcactttcgcaataaaaaagtgtttaatatggtcgtacttctattattatatttttcaactttttcttttctttccttttataatcttgaaaactactagtctttatataaactttcttgtctgttgatcggcaatgaacatgcaggaaggtgtctcactaaccattcagtcattctcacatctagctcaagacatcttttattcaagatactgtgatcgtgttgaaccatcaaaagtagagaagcttctaggtggtgggaaaggtaggaagttgttgcactacatattaacctttttgttctagccattttcattttctgcctcactttttctgtaatggtatgaatagttttgttccttctcttttcccttaacattaaagagtacagcagcatccttaggtgaaaatgttttagtcatcttgttcattgttgattgtcgcttataccctggatagctctagctgtttatgctaggattttggttatatgttacatactgagcccagtactgatcatctatttccgtgttaagaagacgtgagcaatcactttcagttgagttcagacaccacgatagttgacctctgttttcatgggttttatttgttttatttagtgccatctaatgcttttagttcagtcattcacagcatcaacagagggctctttttatttctttctagtttttacttagaatgagagagaacatatttttctttatcctaggattaaaacccataaagattgtagttatactttcaaatttgctcatagaatgacctcaaactttgtcattacagttgcagatatattgttgtggcgtgatgagaagaaatcatttgcatgttttcttgctcttgttctgctgttcaactggtttttcctatctggaagaacttttgctgattctgcagccaagctgctgctacttctaacgtttgctctttttggatacagtgtactacctacgaaagtgtaagtaatgatgtttataaggcaagagattcagcagatgctatagttttctggtctctagatattgtagagttaagcaggggggctaatttagaataataatagaaaaaaggcaagagactcagtgttcctctatgtgggtttggaaacattttttagatcttggaatgttttaaaatgtccctttacccttgattgttctttatcccccctagtattttctctttagtttatattacaagaaaaactttcaaaattttccagaggaatcacacacttctcaccaccaacttagatcctatttctatacattttatatggttcccacaaattaatcttggccttttttaatcatgaaacttgtgacaaatatattctatatgattagtgattttaatgcacgactttttttccatctgactagtaaataaaaagtattatgcgaagtttattcattcttaaggaactctggaacatgtgattctttgttttatattctgcttgtctaaaccctcttttgatcatcaagtaattttccaacataaaaaaagttaagcggtcattgcttattccatttggacccaatgtatggtatccattatccaaatttatctgtgcaagttttgtgttgtgagagtgaattatattctttgcatagtatcttatggtctcatgtgttcttttgagggagaattcaagtttccatgaacgccaattcacatggttgctttccttccctcatttttaatgtttatagaagctttaccttatgatgtctcactaataaactactttaataggttttattttctattagattttacgtagcttacgtggttgtaatttaaatattctacctttttttattaataacaaccccgtgttctttttttttaccttttataaatctattttgataacgagactgccttctgctggaattttttagatttctactgactatgatgctattgcaatagatttggtttcgatgtcaagaggttgcctatatcttgttttgagattcatgaagggatattgaaagattcaattacagcagttgcacgtttgtggaacagagggttctattgtgttagatctttggccaatggacacgattgggaacttttctttaaggtatgaactttgttatagattttctgatgttttgttgcatgattatgctttgtcatacatgttttatgtaatatagttatgacttatgaccaatttctttctagcatggcctatggagttgcacaaaagtatttatgcaattagatgcttgtccatattctttttcgtcaatatttgcaaacttttaggtcttgtttgaaccttagatttttctatggaaaatttttatgaggaaaacagtaaggaaaagtgtgcaggaaaatgtaattgtcctaaattttgataaaagacttttttaatatatatttttttgtacatatatatgtaattgtcctaaatttcataagataatactacattcaatccagttttcgaaaaaaaaaaaaaaatattacattcaatcctaacatgaaaaaaatgaaatcttttggaatttatatgatgctactgttttttttatatgctttaaaaattacaatgctatcttggggaagttgcaaattgcaagtcactcatggacatgtgacctttgttaggaaagaaaaggctagtatattatcaccaaatataaggaagtgtctcagcagctgatgaatattgtgtttgatttgggtgcaatttcaccttcaaactatattttaatactctagtggggcagttatatctcatacaaatatcttaaaccacataaataaatatgtgccataaaccatggaaaagtaggtctctttctgatgttttggattataaattataatgaaatcctcggttttcctatgagagaatcaagcatctgatctgatgtcacttgactcatttctacatagctggatataaatgtaattgtaactcttgcacatccatcaaagaaagagtaacttttacttgaatacgcaagttagtacatacttgggtggggacacgacaaagggaaataccaaccgtcagtttaggaaattgattccagttaaatggaacttttggtgttgctagtagacaatcatcatgaaaataatttcttatagctgaaacaacaattgcatttctctcttgaaacttaacatctttattagattttctaactaatatccatattttcactgcaggttgtagcgtctgtatattttctgaagttgatatccatacaatccttgatgatggctatgggcataggtaaggagctgttagtctgctaatttcagtgcgtcattttgtgggtcgatttcttacttactaccattctacttcatgctgacaaattggaacaaatttgcatcgcagctttagcatttgctttcactgcattttttgtttacgaacaatatgaatctgaagtagatggagtatcaaagcttctacacagtggtgtgaaggaagttgtgaaattattgaaaagcctacctcattcagcggcatctattctttgtaagaagaataatcctagagagagagagagagagggtttaatacagtatagtcttgtcagtttcttacctttgttagtgtatagtcttgtctgtttcttaaaccggtatgccataacctaaattaacctatactagtgactagtaactagttattatgaatgtttattggatctgaagtttcatgtcgacaactggtaatttaccgcagttggaaaagaaatcaatgtgctttactatggagtaagggacttgtaagatcaacttattaagtttgattttttaatattttaaagtacaaataaaattataataataattttggccagtcacaatcactctaagtcacactataactacttttaataaatgtgtaacaaaaagtatttttactattaaattttttacttatatgtattaatttgcatcaaagataaatttaaatattattgtcataaaatactttaattgtactaaaaaaatttgataaactatgctaagatgttaaacatgaagaaagaataaactcccataatacacagtaaaaatattgtaatctttcaactaggtttcgaacttattcctcttatttcaacttaaccccattctctctaactcctttctctttgttctctctctgcaaatccaaaccctagatgaaaccaaccaccgctcaccacccaagccccctgtgtattggtgaacccaagccctctgtgaactgggctctattgaaatttggaaaccactcgaacccacacgaaccaaaagctcaatcaaggcccgaatcaccatccaagctctgccaccacctgctgaacccacgagctctgccactgctcgaatcacctagttagttaaaggttagttttgtattttttttttaaaatttatctttttgattctcaataaattagtttatttgaggttagtttattgttttaggaattaaatttgtgattaatgtttggctttgactgcgtggtctagggattttcggggttttgggacgtaaggttttttggttttgtgtctttttgcgatgatttagcgatgatttgctatcagttgtgtatccgaaatgtttttttttttaattttagtgacgttctcacgattattttgctatattttacaattttctacttgttcggtatgaaaacagtgaatttgcaatttgcgtagtaatgttttgcgataattttgtaattttccttttactcgtatgttgtttatgcatgtattgaggttttagcgatgctttcacgatttgtttgcgaaacttatcgatgttgttttgtataacgtttgaatttattttgagagattttgggcgatattttgcgatttcttacagatgctttttagatgattttgcaaaatttaacaatgttatattgaaattcattacttgcttattgttttttttagcaaatggttgtagagctaattttgccagtttcaaatcatttctcttggtgtatcacatacagaggcaatgaattctttgaaacaataaaggagaagctcaaagtgttggttttatgatactaaattaagtatgcagcggaagagttgtttctgattatcattgtaccaaatgccaaaaattaccatatgtatatattaaactgaaagtaaatagatgaaaaaaaatatttacctcttgatgcctatcatggtatccttgatttttttccaaagttttatcctttttgattgattggaaattcacaccatagtcttccagaccttccaccatacaaaaggactaatgtggactagtaggataataatgtagatgaagttcttgtataaatctcaacacatgaacaaaaactatttcttttgtgatagagagaaaaatgttttatggtataatcctttttacgcttttagaagagttacgtaaaaattctatcaaacattgttatacgatatatttaaataaatctaataaaaggttatttaaatttaaatctatttattaaattatatctaattatttgaataaataataaagccaaatcgcttattgatatttatatcttataaccgattgagagaatctttcaaccacttgagagaatatcttacctactttttaattttaaatatttatcttattgaattaattaataaattaattaactcgaaaagataaaactaataggctaattaggatttttgtcccctgaactttgacatgtaccaaatcatgcccctgaactttaaggtcgttaa

SEQ ID NO: 296956 - DNA, 1054 bp, Cannabis indica
cattcatttaagctcaaaaaagggaagaagggtgtatttgctatcaaaattgaccttgctaaagcttgtaataaactaagctggtaatttttagatcaagtgctctgcagttttaaggtccctaataagttttgcaattgggttcaccagtgtatttcgactactacttttaacttacacctcaatgggaaaaaggtgagcagtatagtccctgagtgtggtctaagtcagggggatcctctatctccttatctctttattttggctgcggatatcctctctcggattcttgagaaggcttttgattttggcactattagaggcatcaagttgagcagagatggtcccaaactcacacatctcttcttaggtgatgatctcatccttgtaggaagtgcgacgattgtataggccaagggagtctggcagtgccttgaacggtttgtgcttggtctgggcaacgtgtgtcaataagcttaaaacgtctatatttttcagcaataatactacggagggtatgaaaagaggcatcatacaaaatcttggactcaatatggcctcttccaacattaactacctgggcctcccgctatttagatcaaagcttaaggatgctaatttcaacttcattcttgagaacctagtctcgaagcttcaagagtggaagttgaaatctctatctaaagttaggcgtgctaccttgatcaagtcagttgagctggctatgcatatctatactattcaaactactaaactttcaaaaaaacttacctctacaatagatggaatgatcagagacttctggtagggctgtgaacagggtaatcaagttatttgcttgaaggcttgggaccgcttttgccttccaaaatcaaggggtgaacttggttttcgaaagactcttgagatgaatcaagcgttgcatgccaagtggggatgggctctcctcaatgaagagcaatgcttatgttgtaaagtactaaatgttaagtatctaagacgaaagccattctcgtagtgctcatttaaaagttcaaactcttggttttgaaga

SEQ ID NO: 296957 - DNA, 1486 bp, Cannabis indica
  modified_base (53)..(53): a, c, t, g, unknown or other
cagatatatatatatatataaatatatatatatatatagtagtcaccaaaacnttaaatatgtggttttaatattccctttctaattattatatgggagaaatttgcggtattagtacataaatttgacaagttgttgctctcatattaggaatgacaaaacgtgtcatcgtgtcgtgttcttgtcatattttaatgatttcgcttttatatttcgtgtcaggtgtgtttgactcgtcttttgacttgtgtttaatattctcaatcgttttttggcttgtgttcttgtcatattttaacgagttttaatgtggtctaaaggtacgattttggcctaatcactagaatcgactccgtcatcgttcgacatcacttcaaatccaattgtagtatcacttcaattccaattgtagtatcacttttcccactattgccatcttcaagaggcattgtccaacaatcatcagcaaagcaaccatcaatatacactcattggcaagtcattattagacctatgcgacgaaggttgtcatcagtaaacaaagtcattccatctcttctcgtatattcatatcagtcaacatagtatttgctctacgcttcatgtctattaaaagagcatgtcattttaaagggccgaccttttcaaaggtgacatgtcttgaagggatgacaaaagtatagaagtactctttatggtaaagtctgcgattacttttattgatgttgtcaatatacacactgtactgatgaaagtggtagaatccattcttttttcgagtgagacttctttttagatcacacaagaagtttatctcatgaggagttggaatgggtcagtcccgtagacggtagaagatgaaggaagttgattgaataaggtaaccatttagatttatttgatatgggcagacctcgaagtaatcaacaatcgacacaaatcatgggtgtagaggcaagaatgcacctgcattcatatgaaatcttgaccaagcactacaacaaggatttcgagagccactaggacatccaatcttgggttttctgacggcagtcttaggaagagaatattcatctcaaactaattgaacttggtgctgagtaatggaagtaaagacaagaggtctcaatttgaatgcccgatctcttaggtcttcacttctaatagcagcagtgagcaactcaatggccataacttttccgccgcggaccttatctagatctttagactttggcactgcaagcttagtgcggatggattaggccatgtgttggtaatattcttcaggatttttaaaagttcatctcactcgaggcatatttgctttcaacacagactctcaatctctctttgggcttgtgaagcagcggacaaagaaaatagaagtgttctctatatatagcaattgatcttctttgttcctaagccaacaaggagtggatttaaatttaaattttgaaaagaaagataaagatatatatatata

SEQ ID NO: 296958 - DNA, 4372 bp, Cannabis indica
aataatttccaacagttttctcgttcaataaagatcactgggggtacgagatgtcttcaacccttcttccttaaatggaaggactgcttaaagtctatcctacccctcgtgatactttcccattgatcctttcaagcaaagtctaagcttgaatttttatacaacatcagccttccctctcagaagtcgaagcttgttacataaaaaattcaacatgactctcgccgcccccacagtacattaccctttggtgtttacaagctaagttaatgtctaaatcccttgcaaaattttagcctttctcagtgaaagccgaaagtttgctgcaccgggatctgacatgacccttgcttagtcaaacccctacaatagaaagattatttacacgagggcgcatgcttagctttccttccaggaaaccaacagcttatcgcgccgttagaggtctaggatcccccttacggggtttataccacgatgggattgtgggggactgataatatatgactaggctttcacatttttctgcatagaagctcacaaggtggatgtgcttttctaaaagattcccccagaaaggtgacacatttcttagaacaaggcgaagctacacccgacactcgtcttcaaaaaaaaaggacacaagccagactctaaacaaatgaccgagaatttgagtcccaaaattcctagctcatttagggggtatgatatatccgattgctgacagctacaacatcttatgtccatttgccaaagtcattcagccaaagagtacacatgcaacaaacatggggaacgtcctcaaccaaagtgtccctaggagaaatacacttaagtccttccctcaaaagctaaaatcaagagtgaactcggagaaaggaaacacatttggccaacactttttgaaaaaaaaatgacacgcccaaatcccttgtgacacatctccatgggcttcgcataagtttagcccattaattttcaccacaagctagaatgataggctgacaaggaccaaagtgaggagaatgtttaaatctaaggcaggggcagatatcgctcccgaaactcaactttgtggaagagataaaccctagagaggatacgaaaaatggcaaaggatcttgctttgcagaaaagggccatctcctgcccaaccctgaataaacaacctttcagatggcaggccgagaaaagctacagccccaggaaagaaaggatcacaccaaggatcagtttctaaattaactggaagataattaaggctaaagggaaaaggttgaaacactggctgttggaaacatgtgcttagtaacacaaccagcccatagacagtctatcacaacaagtctccaggaaaggaacagcaaaaaataaaagttcatattcaactactaaaagccccccacggcaagagcaaaatttaaactgtccccgcgcctaaaaaagtatagcgaaaaggggaatatacaaaaaaaacaacaaaacaaacagatttttaaatgggtcggctggaggttcatggttggacgccgcatgatggagaggatgggcctggatcaaacatccgctccatagtctccatataaaggtcgtgaatggccttcatattctggatgaagcgagattggcgggcactttcctcctccagttgttggttggcttgcagcatgccctcaatttgaaacttggcatcaataagctcagtccagagggtatcgttagcaacgcccatgcctcagtttgttgcccaaacctgcttttgctccgtcaccagtgcgcccacttccacggtagccctttttgccagcaaggtcaatgtcagaaaaaataaggccatgttagaaggctaaagtgacaacacatggtacagggcaaatagacacaagtagaataaaaagtaagacatctcgaagtcttaccccgatggcctaccgctttgcaaaatgggccagcgcgaaagcattcgcgctgctgcaagatgcctaatttttcatgggaaattttgatgcgctcctagctacttggtccaagagctctacaacgaaaggagtagcctttcgccccaacctataggccaaccgattctccaaggcttcgacctccacgatctgccccatcgggggcaccacatgcaggtcgtctgcaatctctaccttaccaaccactgacatcacagccgccccccagggaaccatggacgcctctccatctctagacgaatttttagggccctgtttgtttacgtctccctctacatctctagaggatcaaatggaactgccctttttgggaaggtgaaccccaccgaaggtgtcctcgacgaggctgagggaagagaccttggctagtctagccttagttgagaataagggggccagaggtggtcccccattcccctaatttcaagggcagacaccacaagcttttgccttttcattatagaagatttactgcccactgtctcagaaggaccggttctctccggagtagacataatgtacctgtcaaaaatcggcataaaagaaaaaagaagggtcattatttgaccccagaattcccaatggttacactactgaaaccagtatcccagaagcaggagcaccgccgtgatctcatccaaaactcttaataacaaacaaactaagaacttatcgattaaggggaggatgttggaatcgaagattttagtgcaacgctaacatcagtaaaatgcgactatggaagaagggaactcaagggttttgacttgacgggaaacaagggtgaaaaatgaaatgactgctgaagggttgttgtctcggagatgcaggctaccaatcttcataaagactattttgaagatgatgttaaacaagcctttttctcaatttcagatgataaagctctaggtcgtgacagttatagtagtgctctcttcaaagacacttgggtaataactaggaaggatattcaggaagtagttctttcttttttaaagtctaggaagatgttgaaggaaatcaatgctaccgctattacattcattccaaaatctatttgcccaaagtcaattagtgattatagaccaccaattgcttgttgcaatgtggtctataaagtggctactaaaatgatctacaacaggctgagagatgtgcttccagatattattttagaaagccaaagtggctttatcaaaggcaggcaaattattcacagcataatgatttgtcaagatatggttagaggctatgataggaaaacttcaaaatatgcatgtattttcaaaattaatttgtagaaggcgtatgatacagtggactggtagtttctcaaagaaatgcttgaagctcttaacttcccaaagaagtttgtggagcttgttatgatatgtgtctctactcctctcacttcttttatggtgaatggatcgcttcatgtttatcttcactcaaagagaggacttcgttaaggagacccaatgtcacctctcctttatgatcagaatggagtacttatccaaaattatggctatagtatctaggatctatgactttgccttttcacctggatgtaagagattgagcctaaaccatcttcactttgcagatgacttgcttcattttttcaagggagattttaaatcttcccatctccctgtcaggggcttttagtgttttcaaactcttctgagcttaaagctaatgttaggaagtctactgtctatggaccaagtatgggtcttctttccttggataggattattgatttgtctagttttaaaaagagcttgtttacttttaagtatcttggcatgacaatctgttctaaaagaatttcgagagctgattgtgaaggtttggtggagaagatgacagctagaatcaaatcttggagttctagatacctttgcaggaagaaaggttcttatcaactctattttgctatcaattaatactttttggtcccaaattgttattttacctaaaactatggttcataagattactctgatttgccgtaacttcctttggaaaggtgcaaacatgaagaatggaatcgggattgtagcctgggatgatctttgcaaacctaagaaaaaagttggcttgggtttcaaagacatagctttataaaacaaatgtgctattggtaaacatgtgtggactatgtcctccaagaaggacaacctttgggtaatatgtgttaatgaggtgtgtctcaaaaataatgattggttggactgccaagtccctttggaggctagttgatgttgtaagagaatagttgaagtaaacactactacaatgtaagcctttagcttcccttttttcaactcaatttataaaaagggaagctaaagggggtgaaaatatctgcattgacattt

SEQ ID NO: 296959 - DNA, 2821 bp, Cannabis indica
gattgaacctaaccatatcaggattaagatctatagacccaagatcaacaagtgatattgagttagaaagatataacggtaagtttacgatatcttatccaagatcaatattgatccaatccaatgcatactccatacatccagtactgacatactttggtaattccctgaaaggacataacacttatccaaggttaagtataacttatcgctgattatcatgtgagtctaaatccagtgtactgacaaatcatgggacttaaacatttaaatatataatcatgattatattgcactatgttgacatcattataagcatgaataaatatatgttctagacttaataaaatttatacattaaacatataatcatgaaataaatcatgtgaaccatgcaacattaaaataatttttgatcttatattaattagtaaatttgattatgttgaaatgggttttacttagggcagaaaacccaacatcatgaattctgctaaagcttggttcttgattaaaactctttgttgatagtgaatttcgaactagatgagctccatttcccacttcaataatcttttggatgactctggtttctctaacacttggcagagagggtgattcatcagcaactttatgtcatgggcctaaaagtacagtcttagcttctgtgtagcgatgaacaagaaataggaaagtttttccatcattagatatatggattctagacccaaccatatcttacttatgtattacacaagaagttgtaccctccaattttctcgcactaaggtgacgctaagttagtttaacttctagatccctgaatttctagttccaacagtttaagcctttaggatttcaaccaactgcttagactcaaattttctttttaacaaattgttcttacttattccttggaactttgttccaatggtctaaaccttggaattttaacaactcagttttagatctatgaaatccatacacattctccatgttcataacccgaggttgcgtcgaccatctaatcaatttgtggaagtggataacagtattttggacaagcttggtttagatctgtgaaatccatacacttctctatgttccattaggctttgggaccaagaccggatttgctaggcatatgggatataaagcttccctgataaagtcaatatttgccaacttgtctacttctattttcactgcttctgctctcagtggatctagaggtcttcacttcgatcgagctggatctaccttaggatttatgttcagtgcatgaaaaatcacatgaggacagactccagtcatgtcagaatgattccaccaaagtacatcactatttgctttgactgtggagaccatcttttctttaacagctggaggaatattctttcccacgttcataacttttgtaggatcttcatcatcaattcatacttcttctacctcttccatgggctaaattaatcgttctgtacccactcgtggatctagtttatcctctttgtcgaaaatccatagtgctaaatgagaagatgtttcggcttctgctgtgtttccttttaggactgtgagaacagtcttggttgaaacattgtaccagcttcttgcacttctatggttacctatgatcattccaatacttctagtatcactagggaatttaagacatagatggcgcatagatgttactgctctaaaatcaactaaaaatggttgtctaagcatgatgttgtaagtagttgaacaatctaccaccacaaaggcattgacttgaaagaggacaccacatggcttctagagacctctaatgccctaatcattaaggacaacatgtgtgcgttaataaactagtttataatcataaactagcagtttaaacaaaatgtgatttaataaaagctttaccaactaatttaatcataaaatcatggcatagtccctttttacgattgaggatcccctatttaaatattactagacatgccataacaatattattacaaaatacattcaaaagttcagaacatttgaaatacagttcctgacaactcagcaccacatttcgaataagctgatatgtacatttacgagagaagattcttgactgatggttgtccaaacatccctacctattacttgcaccagatagaacctgatagttacgaggactcgacaagaagagtaataatagaaattatatacttcattattcaaatattaatatttatactcagacaataagaaccaaatgatcacacattactcatatgtacaagtccaagtcaatacaaacattcactcaaaattaacattagtataagtatttaatgatataccaatacttatttaataatattaattatatttgttacctcatacagtaaccatctttattacacgacattgcctaattaggaaagtcgatgctttaatttggtaaccatatattgcattgcccaaattaggcaaaatcgtgccatagcctggcactcatatatcaactcaccgcatcacgtaatcaagtgagcccatgccaaaacttggcacccatttattgcatcactgcataacctaattagatgagctgtgccatagcctgacaccaatgcatcacatcgcctaatcaggcaagcacgtatattacaatgcctaatcaggcaaacccatgccagaactgatgtccatattgttggatatattttaccaggatctagatttactaccatgtatgttccattaacatcctaatttgaatataatgactctttccgttcagatatagatttactacaataaaaataaacacatataa

SEQ ID NO: 296960 - DNA, 3343 bp, Cannabis indica
tataataaattctagtgattagctctccttgtatcggttcgtaattaattttggtcaaattgtcgttttatcctttacttctttattctttagtactgttaattaactagtgaaagtataatttagattcaatctaaatttgtgcacaacttttcagttccaaaattaacacttaagggaaccaatattcgattcattagaaaagttaggattctgcaatagtaaaacatattcccagccatccacattattacattctcaaagaaaaagttgtaagaatcatcttctctgtgaaaatttaaagagtgaatcaaagaatctaataatatgaacatgagttcatgattatttaggatttaagccgatctactattggtcattcatatgatatgaattaggtctttatagtaaagggcatgcttgataaagatagcttaattacatatcggtccatgtcatatataatcattattgtacataacatctacttagatatcatactacatcaacaatctgaatcgagattacttgcactgaataacagacattaatgaactgcactagtaactttttattaaagattatataactttaatatgttgctgactattttattcatggctaagtgatatttgtacaatacaagtcacaacctcatatatgaataagaaattttccaatatttatataaattattcaatattaaatattaataatttaatattcaagcatatatgaaaatgttcaagttttatttataaaaaaatatctttacaagttttttaaagacagaaaccctaacatctctccttctattttacagtcaatttttttcattcaagtaagaacattcaaagcttgaactctaaatttgatgaatctgaatctactcctctgaagacaaagttaaaatagaaatgaatgatattgaagaggagattctctatggaaacctgctattttttcttatgttttaggtgttaatacctcactgagtatcctaaaacgctttgctaggagaatttaaaaggattacgggtggataaagtaggatttttttatctcaagtgttctttattattcatgttcatgcacttggaggtttgttctgtggttggtaaacaaaagttcctaactacttttttttatacttttaatgatgaacaaggtagaacaaatctttggaagaatttggaggagtttgcggctgatattgttacacattggattgttcttggtgattttaatgatattttggataacaaaggacgtgttgatcgagctaaaacttaaaaatggtagatcgagtgtgttttagaggtgtgtggagaattgtcacttggaagacataaaatattatggctttttatttacttggaataataagcaggataaagaagatataatttattccaaacttgatcgtatcatggctaatcaagagtggcataataaatacaactcagctgaggtgattctctttcctaaaaaggagttcgatcattgtctggggtgctattagcttatcttgaagttattcttggcaaacccccttttaaatattttagaatgtggcaacaaattgacaaattcttacaatgttggctgtaagagattcaaggaattgagatgtataaagtggttaagaaataaaagagctttaaagttttgataaaagagttgaaccagaatcatacaagcaatgttcaagctagagacaatcaagcttatcgatcattaattgattcttaagaagagcttagaaagattcattatgtggtgattaattgatcaagaaatgcaataagcaaagcacattgctcttctctcttttcttcaccaaaaggccaaattgcattgattaaatgagggagatgaaaataatactatgtttatcgtaagtattagagcaagaaaagtagtaaaccaaatttactctatcatggatataaagggtagatgggtagacaagtcggaagaggtgagttttgcttttttgtcttattttaccaacttactaggcagtaaaatggagaataggaaacatgtaaatattagaattgtttctcttggtctagttgtgtctgacttccattatcatgctttattagcagagtataaaaggaagatgtgatgaaagaaatttttggcatccatggtagcaaggctcctaagccaaatggttatggatgctatttatttcaacataattagaatgtgagtggtgttagatttagtgaagctattctttcctttttgcattctgggaatatgctgtaagaaataaataatatggtaatttctctatccctaaaagaaaatattttgcgaacgttagtgactacaggctaattttttgttgtaatattttgtataaagcggcaacaaagatgatttgtacaagattgaggaagcttctatgatttctcaaaaccaaagtagtttcattcatgggagatatattgcctataatgtgatggtttgtcagacactatgataggaataatgcgtggctgaattgtatgattaaacttgatcttccaaaagcctatgacaccatcgaatggaactttatagaaaaaatgttgttttcttttaagttcccttatgaattcattcagttcatgattatgtcatgtttccgtactcgaagatttagcttagtacttaatggaagaatgcatggtttttttgaagctcaaaaaggtttgtggcaaggagattcaatgtccgccctactttttgtacttggaatgaaatacctgtcaagaattatggttaaagtgggttctcgggctgaatttaagttccataagagatgtcgattgagacattccgttgaatcatctttattttgcagatgatgagttgatatttttcaatggagattttagatccaaatcttatgcttcagggtctgaaattattttcttaattttcaagtctccagccaagtgagtcaagtcagcagtgtattattgtggtatggaacaataggagattaagagaatcttaaatgcttctagttttgtgaagaatactttgtcttttctctacttgggaataacctatttgtgctaaaagattgtcagtttcgaattgtgcaagtatattggagaagatggtagcaataattagagtttagagttctcagaaatatgttggaagaattactctaatcaactcggtcctagtttccacatactcttattgggcacaaattatgttgctttcgaaaattattttgaagcaaattaatgctatttgcagagctttcttatggaagggagtcactacaaaaaatatcacttttaccagcacagttcgctactgtgctggtaaa

SEQ ID NO: 296961 - DNA, 7273 bp, Cannabis indica
taatagtattattcttctttctatgggaagcaaaacgataaaaaaatttagtgttcttatccccaacttgaagccagtaaatcctagccctttgcctccaataaatctcttccttgtaaagaagagcatcaagctaagctgagattgaagattttcaatcttcccagcaacatccctatattcagagggatagtggattggagacaagcaatctcatgctgaagatcactaagtctacatttaaagagatgcttaaaaattaaaaaattttacaaaacacctcctaaaaaattacatattcacaaatatatatactaatatgttgatcaaaatatatatataaactaaaaactattaataagaaaaagttctttttcttttttaaaaaaataagtattcatagattagaaaaaattagacctcgcggtcattacaaagtatgttcttaggaatggacgatatagataaacgaccaaaccagttgtgtgtaaagacccactttactacattatgggtcataaaattacaagttctgacagtattacaaaataaatagtctacaaaggaaagaatgattcttttacaaaacaaagagtagtttctaatttttcatctaggtttcacgccattgatcactattttagaattagtttccacaataataaacttgtagccattatccatcctttgccaactccgaagccaagcaaacacgacatcctcaccacaaagtgcgtctgaaaaattcaattttgttgtattctcccaaaccacctcactaaggtggtctctagcaacaattgcaatacacatgtgctccatccccacttttacatcacaattctgtttgagccagtcttgaggaggagggcaccaatcaaccaagtggagcagagacgaggtagggataatggatgctctgtaatttgtatcagagacagaaaagatacctcacgaggatgaacgccataggtgaaaagccaaattgcaattgaagaacatgtgctcaagagattcctcctttacaacgggatttaggaaggcacaacttgtcccaagccttcagttggatcccgtgattcctttttttaaaatcccaccaaaaatttcgaaccatatcatcaattttcgaaacaagatgattaaagaacttgatagtttgaatgacatacataggcatactgaaaaagcttggtacatgactttttcttattatacattacgagcttttgcctacaaagaagtgaagatcaatggagttaagtagaatctcaatagaccattgtagtcgacgtgattgggtgaataccgagcactcctgttacgctgcaatgaaaaatcgtctcttttcttaaccgaaatgcctctggtctcaccagagtttggattacccaacaaaccatcgattttgcaggtgggttttcgacagctgacactatagctacgtataagcttttgacttactgatccattggtttcaccattagccactctcctcagattctcccaagacttagggaccgtaggatcagccacattccctccaactaaaatatcttcttcgttaacaagactgcattttggctgatcgcctcgctgtatctgcatcaggttcagaccccacaaattccactttctttgccacacgtgatttcttcaaccccttttgagttcgcccaattggaggaaccgaatctgcagcatccttagatgaagttgattcaacactctccaagctctcatcattgacagatttcaacttgcatgacatacacaggcataatgaaaaagcttggtaataagaaaaagcttggtacatgactttttcttattatacattactagattttgcctacaaagaagtgaagatcaatctgcaaaagtgaaaaaagaggatcaattaataattatttcataaagttacaacaaatcttcaattccattttgtaagaataattagatttatgatcatttttctggtacacataattatttcataccttatggttggcttctcacgtggtacagaagcaaagcacttgtttaaaattggtggtgccataagttcagcaggcttcaaaagatcatacaaattttattagtatttttgtaaaattacattgtgataaaacgactattattatactcgcaaaacaactatagattttcactttgcgatcattatggtctaccaaccaccaaaaagaaaaacagattaaaaataacacaatagaaataaatacctttaagcctttcatctcgcatttcactttacttgtatgttccaattccaaatcatcttcaagctcttctaacacagcttgctgtggaggtggtggtggtggtggtggtgaagtattttcagttggcgaactgcttgatgatgatgatgatgatgatacttcactctcaccattctgatatctagtgtttgctaagctgtccatctttatggatgaagaactatcactaataatggaattagagcttgagtgcctagacttcacatttctcatgttgttttcaacaacattatcctcaagatgccttcttttaccacctttattactttcatctgtcttattaactggtgcttgttgtgcatgtccatacgcctttacttccaaagcgcaccttgtatccatacccggctttgagggtaagcgagccaggcgcttagtgccctgaaattgtgaaaaaagaaaattatcactacatacagtgttgtacagtaataattcagttagtatttaacgataaaaattaccttagaagtggtggtagtagggagcacaaaactaggtaagtttttccttttaacatggtgtacacgaatctccattccagacttccaacaagtatagttgttcagtactatccctttaaactctgcaatagttgccctaatatcaaaggttccatcttgatttggcaaaccaggtccttgttgttttcttttcaaacccataaagtagctacattgaaaaggtttggatttgtctgaaaaatcaccaggatgggggtgacattggagcatattcaaagtgtgcttctcaatctgaataatttacaaacatttgatcattagataagagcagaaacagaacatatatatatatatatttatatataggatgtaccttcaatgttagctgacgtatacgagattcaacccaacctttccattgtctcaaatcatcaccattttcagcattgatgtctatttgtagataattattatatgctttgaagaaggaaaatctctcaaacagggtatcccattccaagtcttccttgttcgactccatagccttcaagtgcaattttaaaaaacactaaatttagttatgaaaagtaaaaattttaataaaacttagtaaacaaaaaaactcccacaaataacatgtatttagagtgacaattcgtgttcgtaaattatgtcttatcgagacttaggtatgacctatttattattgtgtcaaaaactaaaactcaagtccatcccatctaaccttacacatgagtttaaccatatatgtaaataaggaattatgtttaatttttgttaatttatcgactcattaacatgtttgtaatcttgttacgaccgatgtatgagcaatttaatatatttatgtcctatttaactaagaaatataatttacatacaataaatataataaatttaagagtgtatactatactcttacaaagtcattttcgggttgagagttttaactcaaaaatgaaccaaactctgtttaactcgtgcaggtttcgaacgtgttatcgtgtctaacttaaattgtcaccctttccatttccgaatataaatgagtgatagccaataaagtgaaaaatggaatactaataccaaaagaaagataaaagaaaagaacttcaaaactgattaattattgcaaatccatattgttaaaggaatgcctaagaatacaatcatgatactaattgcatggagaagaaagccatagagatcaatattcaaagttatcattaatgatcataccacacagatatcatttcccctctgaaattcgtccgaaataatttgcaaagtgcttgacgagacgttatagctggaattcattgcaggataagccggagttattatcggcattaaatgatatctatctctgtgatatcttcttggatcccaaacttgaagccccaaagatccttcttcaatgttgcagagcataactgggttgggccatcgccattgagtatacacccgaaagaatcgggatactaacatgctgggcaatgcattaggatataattggcatattcgagccacaagcaaagcccagtttatcccaccaagaaatcctgtaacctggccatgattaaataaacatactctaattagtaaaaagattgttgttctaaaaaagaccgttgtttttcccgtaataaaacacaaatccgtaaaaaagataaggtgtattgtgtaaatctgaagcatacattagaataaacaccacgacactttgcccataatctcatgcatcttagagtcgtgcgaaaattctgcatacaaaaagaaaacaagataagatcaatgaaacattgtaggtgtatccacacacacgtccaacctaacaagctataaacaaacctgaatatttggaactaatcgtagaatctggtcagtgaccctacaaccattcagactacgaactgtctgctcgtctgcattctccagtattgagttgtgtgataaatctagctcctgttccaaaataactataagtcaccgtagaaacaattgaaatcatcaaatttacttagttaaatccattaccataatttcaccagacaaccattaaacaaaattcaaagccaaattttagcatccctttggacgtgtgtggttaaggtgcatgaacttccatttcaaaactaaatggtaatgatatatggtattatttttccacatattagtaatgttggactatttctaccaaacagtacgaagagaacaatcatcatgaataaaatacttacttcaggaataatccagagtgacagtttagcataaagtaaatctattgaaaccccactaaacttgaacttcataactggaacgtgagcatcaggcactggatgcaactctgtaacttcaggcatggctgccaacattctacctagttcaccaaagaaatcttcctgcatccaataattgataggaccaattttgattatcaagttcagaaaatagtaaaaaagaagtaaatttactagtgtttgtgttacaaaagaggaaactagatctcacttctcttgttgcatatctaggtccaacgcagagagtgtctatatctgcacctggcccatgcacctgtcgaaaaacagagaaaataaataaataaaaggaagatgcataatataaataagttagtgacaagatactactagtgtggtgttaaatgaaacatcaaagacattttaaattaggtgaagaaatatcctaatcaacagtttctacttttacagcaaaataagttttgtaaattgagtacatacaacattgtgtttttgtggtctttttgttattttattctttgttaggccttaggatagatatggtgagctagaatatagtaaataagaagggtatacgtgtcgggtagtgtgagtgaggaattactatatataggtgagtaagagagtaaatttggtatgcaatgtattgaattaagctctatttgcaaaaaaaaaaggccaaagggctcccacattcttgctactgtttcattgatatttctgctacttttctactctgtgtgtgtgtgtgtgtatattttgttaaatttggggctgagttgtcttgttcatagtggatcttatcttagttggtattagatagttctagctattgtctataattagaggaaaggaaggagttcttttgtaaggagagcttgaaattagacaaactgtagactcttgtggacttggagagaccaatccacttgaaaagattgaatatgctggattgaatttctttaaaggtttttattatttatttgtttgtgtcttgattgttgatagaaataaatttatcgaacttgagccattacattttgttttacactaaagtctaaactagaattaagagaaacctgtcattaacctatcaagaaaacaaacagagcagtcataatattcaaatgtgaaaatcgaaaggcttacccccaatctataagagccgaaagtgaaaatctttgcattggcttcacgcaccagttgctcattcaaacccttagctcgactaatacttttaacccatactttcacaatctgttacatttcaaaacaagaagaacactaaggctagagtagaattatgattatcattacaatgtttctttacttttttttctttctttcctcaccgaaatccaaaccttgaaacattataacctaatcaaaactcaaaaaagaaaaatcacctggtctagtctagcgagcacctcctccctggcgagagcctcatcaggagtctcgtacaattgagcattttccaaatactgatcaacatccagtacaaacaaatcaattaatttcacataaaattgagataaaatttaggtgatataaatgataaataaagtaagtacgttttgaagttgtttggttttgcagagatcgaagtaagttggtccagtcaaagagatgggatctgtaatgcctaaacgctgcccctcattcttcctattcgccattattgatattcacagaagtagaaaagcagaagctaattaaactctgatcatatatataggttttcgtggtattttttttttttttattattgataaataaataaaagatattatttcctaaaaaaaatattgaaaataactaatttattgacttaataccaatataggtaggttaagcagggcaaatattcgaatatattaatttttaaagtatatatatatttttttttttttgaaaaatattttttaaagtaattcatcaattcaacaacttattcattatctaattagtataacacacattgaaatatctcaagattttgcagacgaaaaaagaaaatctgtaactagaatagaagtatattaagaaaaaggagagttatatttgcaccccttaaacttataaatacaccctattattaaaaaaaatattaacttaaataatttttaaaaattactcttaatatttttttaaaattttttcttcacattattaattttaaaacttattttgattttatttt

SEQ ID NO: 296962 - DNA, 4424 bp, Cannabis indica
tgtaactagtctacatgaaaaatcgatgctttggaattagaaatctcccccaaacttctccatgccagctattgcattcataagatggtgaaaggagagtagagtagttgaacaccataaactagagaaactttcttctttcacttggactatttgacgccactaccaactgtataagttgtttacagatctttattgaccatttattatgtgttctatgctttctggaatgagtattataacacgcagggttggtcttaggcataggtggactaggtctgcgtttaggccctactgattttatgggcccaaataaaaaaaaatactttttaaaaattatacatattttttttaataatttttaaaaatactatttattttaaagtaagggctcaatttttttttttgtttatagtctatttcaacttagagctagccctaataacatggttggtcgtgttatttctcttatttatgatttaaataatgagattactatatatgtcctaatttttattggaagatcattgattgatgattgtcattagtaggtgaattctgttagatgctcatttggtttggaagcctaatatatacttcacacctctttgatgctcgacaacttgtggcttattgaatctttaagctgttgttagtgttttttttcttcatgtttttgttcttttaattatattttcatgtaatgaattttgtcaaatttacctattattcatcaatagatatttttattttctctaaataataataataatgtatattatagataaatacgtacgagattattacttagtttgatgatatatattccacttttatattttgaactgtgtattcattattctattcataatagcatatttggtctttttttaattaaataataaacaattataatttagtgatatcatatgtgcgtttagcacctaattattgttattccttaaaattgatatatatgaagaatatttatacattaattcaaatgttcataaaactaaaggaagttacacctcaaattatttgtcctacctatatataatatactacaaattcaattctatattttcgatttaaaatctttattttgtggttgcaattaaaaagagaaaaaaaataattatatatttatttatatataatatacaacttaacaaattattcacttcagttgtgctatatataatatatcatagatgccgaacatatacgaagcatataaggtgacgtcataattataaattgaagaaaatattaattaatacatagagatttttattttttcttgaaataataaataaatatcctatatatataaataaatataatgaccgctcattatataatttctagatatattaagtagtcatgtgattagaatcttgctggtcttgacatatagtttattataaactctacactaaattccatgcatatatactactttgctgatgatgtttatatatataatataaaaatttatagcaaatgccacaaaaaaaaataagagaataaagtgtataaaaattaaaacaaaaaaaatttcgcttcaaattactatataatatatattaacattttattattcaagatcatgtgtttcaaccttcaattctaatacttcttcttcttattattattttttttaaaaaaataccatacaccaatagaatgtttcagtttgacgttagaaattttttttttagcctttattataagaatagatagcattttaaaaattattaatgaaatatgtgtattttttaaaataatttttctttcagtacggacccaatccgctttaatttaggaccgatttataaaaatcccacaaaaattaaaaataataatgcatgtaaaagaaaaaattacaattctcatgaaattttttcactcaagtcatgatatccgattaatataaaaacacatgtgtttgattatcttcatttataaaaattccactattattattattattattattttgaaaagatttacacacttcaaagagtatactgatgttgatgtactttttatttgttttggcatttaaaagaattttttaatttttttttttttattaattgtatgcgttataattatttaaggtatattttttaaataactacaacgcacaccattataaaaaaaaattatccaaaatatcaaaataaatagaagtatatttgtcgtttttaaaagaaatttcaagaatgtgtcgtttatgatgattgttctcgttagtccaggggttacaagacttttgtcgttttacaataaaagtgtcgtttacatgattattgtcgttttaataaagtattttaaagtatttacaatgtttatctcaagtagcgtttgtagtccaacggttaggataattgccttccaagcaatagacccgggttcgactcccggcagacgcaatctttttttaatataataattattttgagaaattgattttattattgaagtaaatgcaatttcattaattaatttatgagatactaataaaaactaaagatggaaaagtttggaaaggattttttaaaatggtggatttaatattttaagctcaatttggatagttatattatgaatctaaattaattatgcctatcaaataaagaaataatttaattaaaattaaaatgaaaccataaataataaaattcaaatgaaggcacctatattatattagattggctatttagaatttttactcattgatatatgtattattttgacacttgaattttttagtctattacaaatagattctgaactatttacagtattataaattgttcattcagtcaaattttgtcacacatgataaataaaatgatgacataattacttagtaaattgtcacattagcagtaagtgtataatttaacattaaaaaaataaaaattatgcattttaaaaaaattattaatataaaaatcaattaataattaagaaaattacgtaaaattaaattattttttcaaattaattacaaatgtagtgtttacatgacactgacgtaacaactagttaagcagtcatgtcattattttgtttgttacgtgtgacaaaatttaacaaaatgattaatttacaatattgtgaatagtttatgaaccatatatttttatatttttttgctaattaagattcatatattaaaacaaaaacaaacacgcattagtagccacaaaggggtgctacttccctaacataaccgacaacatggattctcccaacacgggccctacgggcaaggagatccgcaaagaaattaaaagaatgattaatacaagtaaaaacaactgactcaaattctttaatcttagctacacattccgtaaaaaacaagataactgccccatccaattggaaagtttccagtctgcaatccataagttgccgcacacagtccgactcaatagcaaccttaacaaacgcaactctggatcctcaagcttcacccaccatttctcgaactacataatgttgttccaacccacttggtctatctgaataccccatttactcttgaaccaaattccacgcgtaacgttgcattttgcaattaggtgcagcgtgtcatctgtctcttccttgcagaaaacacaagttctgtcattgagattaaggaatcgtagtctgccataagttggtacacaatcaaccatcactttccacatgaggagtaagagtatatttaatgggctaaaaaatatacacaataatgtagatgtccatagcattttcacccttttaactttaccaagttttactccatatgacataggacttgttaataatacctctcaaaatataattttataataatgtggtcattctatcaaattttacttaactgaaatgagtgagttagtagataatattaattgataaatggatataatttaaataccattaattatttttacattaatgattagaaaattaaaaatgaaaatatgaatttataaaaaaattattattatttaaaacttaatgtctaatggggcgttcggtaggttagacttaatggatgagaataaaaatattaaattcaacttatatttagtaaattgaattaaaatgagcaagaagaattcctaccaaaatgtttattttttttcccaaaagtcaatatctaaattttcatataatttatcctaatgagtaatgaacaatgatgtgtaactattataactactcaatttaaaaattttagaaattcacttgacctcttattgcctcttgaccaacccaagcctctttttagagcatctttaaggagacactaaatttggtgttacactatcaccaaatttagtgtacaaaaattatttctactccaaccacaacaccaaaattacaactaaaaaatattcattattattata

SEQ ID NO: 296963 - DNA, 1038 bp, Cannabis indica
agtgttagatgagaagtttgttaatacagttagttagttattttctgttatttcctgtaactacttttcagttgtctctttacttttcctgtgtgtaaataagctgtttctttcctctgcagttgcaaaacttgaataatcaatgaagaaattatttctctttgatctctgtttctctcttttctctcgttcaacatggtattagatgcctgaaacggtcctttcgttccaccatgaccgattctgactcaactcttcgaggtcactcctcaaattcattgccaagaacaactagtatctccttcagccactcgttatctatcaaatttgatgacaaaaactttcttccatggcgtcatcaagtttatgccgccattaaaggccatcgtcttcttaagtttctcgatccaaaatctgttccacctaagttcatcaccgctgcagatgaactcgacaacaatgtctgatgaattcattgaatacgacattcaagatagtctcctggtttcttggcttctctctttaatgtccgaaaagatcctcacgcatatggttggttgcaacacagtagctgcaatctggtccaaccttgaagaatactactctgctcagaatcgtgccaagatcaaccaatttcgcactcaacttcgcaaaagtaagctcaccaattcactcaatgattaccttctcaagatcaagcatcctgttgactcactggcttcaattggtcatgttctctctactcaggatcacatcgaagcaatattcaatggattacctcgagaatactctgtctttattacctcactgtccaccaggaaagatgcatattttgttgctgaagttgaatctttgttgatggcccaagaagtacgaaatgaaatgggtgattctgatcctggcattgcgaaaccttaggtaaatcttgcatctcagactaaatccattaagccaaaaacaagatctgcctacccacaaccagttgcacacaactatggaagaggtatgtcatgtaggatatatattttaccaggatct

SEQ ID NO: 296964 - DNA, 4267 bp, Cannabis indica
atactatatagtataacactacaaaatgatttctaaacaatgtgaaacttatttttaaaatacttatcatcatacttcaaaatttatagatttatataaaattttgtacttttctttatataaatatatagatttcaaaattgtaaagtaatattaaataaatgaatatgatctagtacaattactctaaattaaatttaaattttagatttaacagtataaatgtttatttttgtaatagtattatatttcatgtggaattctttccatatatcatattattttgcattatactgatttaccaaaaaaaaaaaaaagtagcatgctttccatatatcatattgttttgcatttttttttctttttgggatgagattttgaactcttcttagggtagtgaagttaataatattgtttggtgtcagaatgacaattcaggtcataataatatgacggaaacttagtttggaaagtgccaaacacaccaaaaagagaaatctcagctcaaaatgagactaatcaaggacaattcattatgaaggcaattgccatattacaaagcagagaaagaaggacagatggcacaagacctacatattgggaccacactactagagaatcatacaaaagtataacataattgtagtggtgcgtgcccttgtaccaaagctttaagagaatgattaacagcctaaattatgaggtttaattatttcttaattaacaccatccctcaagcaaaagagtgaggaagtcacaccgagcttgtgaaccgagaattggaatcgagagtgagaaagttattttttaaaacagtctacaacttggtcatgagagggtatgtatttgagatcatctgcttttgaatcaccttgtctcgaacataatgtatgcccagttctatatgcttagtcctagcacgatagactggatttgtgcgttcactcatgttatgacaccacactatgggagtagaaggcagaggaaacttgatttctttgagcaaagattttatccaaaaaaaaatttgcagtgacatgagcaagagctctgtacttagattgtgcttgatctggaaacaacagattgctttttggaagactatgagatgagtgtatctccaaaatacacacagtatccacctatggatttttcgtcatcaaggcagcagatctaatatgcatccgagtagcctacaatgccaagtcgatcatagtgttggatgtgaattccataatgtatcgttcctttcaaatatcttaacaccctcttagctggactcatgtgaactgttgttggagctttgaggaattgactcaattagttcactgcaaaggctacatctggccttatatgagtgagatattgcatagctcttttaatgctcatatagtttgaaggattttcaagcacaatgccattatcaaaagatagaggttttcgtccaaccataggagtaggataggatttgatattcttcatgctaagcttaagaaggagatcaattatgtactttcgttgagataagtacattcatgtggagtctctgtagacatctgtttccaagaaatagttcaacactcccaagtctttgagtgaaaacttcctgttcagcttgctgatgaatttattgagttctgtggagttgtttcatgtgatcactatgtcatccacataaataagagccattatcacacattatgttgtcttgagtataaagaatgaggtatctcccttggtattttggaagttccatttgaaaagatttttttcaacttgtcaacccaggaacatggtgcctgcttcaaaccatggagtgatttgtctaatttacaaacaaaatcaggtctgtctttgtcttcaaagccttgtggttgagacatgtatactacttcctcaagatttccattgagaaagacattgtgtatatctaatttcctcactatctagttctttgatactacaattgttaacagaatttgaataatgtaagctttaattactggattgaaagtttctctaaaatcaagcactggtctctaatggaaccattttgccactagtcgagccttataactttagaagcttccatcaatattgtacttgattttaagcacccacttgttcccaactacattgtaatctagtgagggtggaacaagtgtccatgttttgtttctcacctgagccttaaattcatctgtcattgtaatattccagtctatgtgtctcaaggcttcctccactgtgcttggctcttcttgaacgactctccactgagctttactgaggtagactttgggtttaaaaatgtctgctttagatctggttacaatgggatgagatggtcttagagttgtgtgagctggtgcagaacttggtgaatctaaaggaagttcaagagtgtcttatgaatcttgaaccctgaagtttgacacatcagtagcattgaaatctaaataaaaaaataagtttagaaatgtctacctgatcctatggtgttgaacctagtgagatagctgatggtgctgttggagtggcttttgaagtgcttgtacttgatgtgctttctgagtgaagagtatatgcggaatttgaaaagttagtgacattggaaatattttgaaaaattggaagtgaaaaccaagtgttagaggtatcaatggatacattttgttccttttgatgaatgttgaggaaaccagacttgaagggaatttttttttcattaaaatctatattcctggatatgtagaggctccctgtagaactcaaacacatgtatcccttaagagattcactgtagcttaggttataacacacttggttgagtaaaattgaaacttgtgcctttgataaggttgtagacaaggataacaagccataccaaaggtttttaagaattcatagtctgatgtcgtagataattaacaaaacttcaaaaaaggtgttttgccattgagtataggtgttggaagccgattaatgaggtacacaaatgcttggaaagcatccacccaatacttgagtgacttgttatcttgagctaggagtgtgagtcccatttcaacaatgtgtttgtgcttcctttctgcacgacctttttgtgcagaagtatgaggacaaggatggttaaaatctatgccactttcattgactacctgagtgaaggatagatattcacctccccaatcaattcttaggcttttaatttttctttcaaattgatttttcacaagagctttgaattgtgtaaatgtaggcaaagcatatgcttttattttcaaagggtaaatccaagtgtatgtgttgtgatcatcaatcaagtgaatataaaatctaaattttatgtttgacataataggggagggaccttaaatatctatatagattaaatcaagtggtgctttaactctaatattagatagtttgaagttaaggagtgagattttacatattgacaagcttcacaaaatttgtgctgttcattcactgaaagttttacatgagcattgtgtaacacttcagttaaaattttagatgatgggtggccaagcctcctatgccacacatcttttagggaaatacaagattaaacaaataaaggagtactagactcagctacatcgaaaaaaaaaataataaaataaaactagacaataaaaaagaaccgtcattgaattgtgaatgacttggtgaggctgaaaacacactgggatttatgttggaaactttggaagctttgttgtggattgtgtttggacattggagttggtacaccatccttaagcctcccctgcaacactacctgtttcgttgccatgtccttcacaaaacacaaattagcatagaattccacaaaaactttattgtcagatgttaatttggatacactgattaaattcttagtgatttgaggaacatgcaacatgtcttttaagatcagtgatttaccatttttaaattccaacttccagttcctatatgggaaattagcaactgattaccattaccaacaattaatttttcattacctccatggttgtttttaagccatgttgtcagcatctttagtgttgtgattaccattacttcactatctgcataccatccctctgttggggtttattccttgaaaagcctataaagatatttctgattattaattaataagagttgaacattttgatatatgcttgaatgttaaattattaatattcattattggataatttatataaatatcaaaaaattctttattcatata

SEQ ID NO: 296965 - DNA, 1917 bp, Cannabis indica
ttatttatttaatttgttaatgttgcattctttggcacaaaggccttctgagattgagacgtaatcctaggataatgatttgggggttcgcttacataatttgtacatgttttgctatatagtatatacagaatgtctacgttggtagtgtccaatgtgtataaaggaatcatttaattatagggataaaatggtagggttgtttgccagcataatagcttacagttcatcgaatatatcattttcatacctaatttgtttattttaaatagaaaatattgaaactcggccgtatatgagagaaaccgataaaaataaagagaaaaagaattgctttttatttctcagaattgaaattaaagagaatggtacagagccaagtgcttttatagcactaatattcaagaaccaagttggaaaaacaactaacagattagttggttaattaacagaataccaacttgtttaacagacttgtcagactaaataaaagttttttttttttttaatcaatcaatcatgtatttcattacaccaaaacttaattacaaactattggtcccttcagagggagacccgagatttacctatacaatacaatataattacaactcttctttccttgtgtgttatatatatacattcacaactgcaacaatattaaaaaaaacaatcagctacagcacctataaaccagtcggcaagcaccaggcagcagcaacaacaatcagctgctagaggagaacaaaccagtcggcatcagctggtttgtgtttctttggccaattacacaacactctattctttagatcttcctttatagcatggactacaacatcttgtgctattctccttgaattccatagcaaatcattgcgatttgtccaaacatggtacaccagagcagccacagcagcagtgattactgccttccgaaatctgctcatcttcgctctgtccagccacctgcacaatctgctcaagtctgttgtctcaactctccatcctagccaagctttaacttgagatagacaaatagtagagaaaggacaagagaagaaaagatgctctgtagtctcggggtgatccaaacagaacaaacaatgatcttctccaatgatgttgtatttgaacaacctttctctagttttaagtttatcttggattgtaatccacaagcaaaagctatgcctagggatattgagtctattccatatctcatgactccaattcactttgctttgtgcggggcaaagagatttgtagccatttgatatactgtatttggtgctaacaaattgctgaatgtccataacacctttgacttgtgctttaagttcaacttcctccaataccaactagcctgaggtggagcttgataagtccaccaatcctctcctttgatgtatacacagtgaatcaatttaatccacaggttatcgtctttgttcgcaattgcccacacgtattttgtcattgcagcaatattccactttgcaattcttttcaaaccaatccctccagctacttttggttggcacacatgatcccaagcaattggacccgacccttgtgaaacctgatttcctttccataagtatgcttgacagatggcttcaataccccttatagttcgctttggtagcaccataacttggctccaatatgagtgaattgacataagaactgagttaaccagaactgctctccctgccaaagacaagtttctagtactccaaattttgattctggctgtcatcttatctgctaaaaccttacattcttttcctgaaattcgtttcgcactgtaacaccccgatttcccgagatgtcacttaggatagtccgtataaaacaatttaataagatcaagacaatcaaatacttctttattgaaaaatatccaagcatgagatc

SEQ ID NO: 296966 - DNA, 3827 bp, Cannabis indica
atgagattggttattattttgatcagaagttttctccgaagcagaacaagactgggtatctctacttctgctaggttggccaccagtggttgagtgacaccagtagtacaaccatgtcaaaatttggtgggtatggtaagaagtactttattgcttgggccatccaaaggattggacattatgacatctggtgggttccattcttcaaatgctctatcctcacattgcaaatgagggatagggtgaaccacatcatgtctcattcagtgaaaaagagaaacatactcaggttgaccaatatggccaacttccagaaatatggtttgtaccctcctactcctagagttgcaggagccccagctgtagaggaagcttttcctagagatggacaagctcttggcttaaacactgatgtgcctttgtcttgtatagctcacaatctagagaggaaagagaaggtcttatatcgatgcttagccagcgggggttcagttagtgatgcttctctccagatcaggcttggaggtcagacttctgagggacctgctcacactttgcctacatctagaggcaagggtaaggcagttgttgaggattctgacagttcctcttctgagaatggtggtatttgatagttaatggcaccatctcttacattcttgtcttgcattgaatatttatgacttgatttctgactttgcctttgctactttcctttttgtagatatgtcttccaagttgagaggcctcactaggggaccttctgacgagccttcgggttgactgagggccaaggtggcatagacctctcatggtagagatgctactagatcatctctgcctcctcctccatcagagcatgcaccagctgtgcaacctatggtagatgttcctcttgttagaagggaacgaccttgtggctggggtgctccgaggcccagccacagggtagagagccatggaggcagcccacagatgcatagagagatcccttccttttatggatgaggagctcaaggagcttggtgatggtgagctagaaaggctctactccattggccttaggtatctatcaatggtaagttgtacttctagctttgttcatctttttggcactttgtaagttggcgggccaagggatttactgcatgggtctggccagccaaggttgtatctttgaggggctggccggccatggtagcctcagagaggggctggccggccatggtagcctcagagaggggctagccagccagtgctagactttgacattgactttgtctttttgctttcaggccttgatgaacctgagctcttcacgtgatcgctctcggggatcctcaaatgctctttgggagaagatgaagaccatggaggcttgccttctagaaaaggacctagccatatttgagatggagtctctcctcgtggagaagcagagcatgatttttcgcttggagaccatgcttggtacaaggaacaaggagaacaccacgcaagctgcttctatctctacgctaaagtctaaactcccagggcatgaggagaaactgagagtggctcttgatggccagcaaaccataaaggattattacgttagcttgtcctcaaaactcatctatgagttcaagctgcgtaactgctaggctaatctgtggtacataggaagtgaggctttccttgagagcatgttggctcggggaaagatgctatttgagatctagttgggagcagaccagaccaccgcctatatagaggggttttccttagggaatcatgatgaggggctggtcggccatctttctgaggaggtggacggctaggactttgaccaccatgtcagctggcttgtggatgttgtgaccggcctagactccagcaatcatgaccttgcggcttctgacttagctccacctacccctacacacatatagacaatattttcattattagtattctacattatggttgtaaaatatacacaatattttcatgatgtgtatggcctgtagcctcagggccttcatgtttgtatctttgacctataggcccactatttttgaacactactattgtttggccctgttgcttttttatcatggattgtgtgactgaccatgcagtctttaatcgtgtctatcttcttttggccttaacatgtaagtatccatatttactttttttatgtcaagttgaagtatgcctacacttgacttagaagcaagtttagtagctcattctaagtgttcaaatttctatgcataagttctctgtgctagtttgatgcattgtacggtgtgggtgcccccaagtgaacacgtagacttatggtctctttgtcacttgtttcactaagtttcacaaaccttccttcggatttttcttggggtgttgcccattatacgcatgtggaactgaaaaaaagaataactttgagaagttaatcttattagcatgtggtttagacacaataaattgaacataaatattgtttcttattcattaatttgcctttgttgctgttcaacttacataaattgtatctacaagcttacagtacacaattttccttctagatatcaagtggctactgctacctgccttgcatagtagaggccaccattgaagaatgatgggagaccacgccaaaaaggtcgtgggtactagctcttttgtactccaatgttgagtaggtagaattgctactttggagaagtgttctgtaagcttgttactgatagtatttgcgaaggttctctccattccagtatcttggtgggagaaagagcttcatgttctcgttgtaccttcccagctcgtaggctcccttactagttatttgtgtaacatgataggggacttcacagttaggtccgaacactcttgttgttgaatctttagtgctcaagaacactctttagagcaccagaactccaatgatgaatttcctatccttgacttacttgttgaagtgccttgccacctttttctagtaggcctgtagttttaggttgaacttctttcttctactttatcaagggatttcgctagtaggatgttgtttgtttgttggtcataggttgttctcctgtaagatggtggcaccagctctacaggaaacatcgcctcatagccataagctagagcgaatagagtttgcgtggtggccatcttctcagtatcttgtgcaaccataggacctctaggagcaattcaggtcagttgccttttttttcctcaaggtgcttttttagggtgtccttgagggtttttttgacagcttctacatgcccattttcttgaggatgggccacaatagagaagcttttagtgatgccatgtctgatgtagaaatcactgaacatgtcattgtcaaactgctttccattgtctgacgcaatcttttagggaagttcgaatcgacatatgatattcttgacaacaaagtcaaggacatttttggaggtgattattttcaggggttcagcttctgcccacttggtgaagtagtctactgcgactacagtaaactatacctgtctttttccctttaggaattgaccacttatgtatatcccctatactacgaagggctaaggagattgcatcattgtgagctgattgggtggagctcttggaagttttgagaatctttggaacttgtcacatcttttgacgtagtccatcaagtcctcaatcattgttgggcaaaagtatctctattggagtatcttattggattggctttaccccctggtatggttaccacagaagccttcatgcacttctatcattagtcgcttggcttcagccttggtgacacacct

SEQ ID NO: 296967 - DNA, 5246 bp, Cannabis indica
cgacgccggcagtaactccggtgacttttccgatactgacatctacttcggtaacttttttggcactgcaaactccggaagagtcgtcgtaattggcattgtcgccggtaaaattactggaaaaatccccaagaaactggtttcttcatcaagaaaagaaatcggttttttcatctcttggtgatttttcctgtgatttttttgatgacaatgctaattcagataatttttttagcaccgacgacaactccaatgacttttccagcaccggcagctactccgacgatttttctggtgccgatagcaaactccagtgactttttcagtatgagtgacaactccggcgatcactataattttatttttttattttttttaaaaaataaatatgaaaagaattttaatattttttatgttaattcaattaagtttttattttttatgaatcttaaattcagattttatttttaatattttatatgatttgatatttttagtttgattagtttgataatattatatttaatgacacttactttttatgtcatatttatcataactttaataatttttcttgaaataatccttttataaattccaatacgacaatttttattttgaattgaaaggtagtaccaacatttcatgagactttagtggattttcaataattttttaataatgaattatcaactaataatctttttactatatatcttgatatttcttttctttttttttttttcttttttttttaaaatttttgtaaatgggatatcttgatatttcaatcttgaattttttattttttatttttgtttttaattttcaaccttgaattaatttgaaattttcactttaatttatttctttaaaataaattggagtttattatctataaacattataacttgttttttttaatggaaaggtacatatataacatgcaaaccttataccatctaacaaaataattatgaggtgtacgcatttagaaaaaaattgtcacaaattcacaacacaagagattagaaagaaaaaaaaaataagcaagttattaaaaaaaaaaaaaaaagataaaaatgaatagaagtagttagaacactcccaacaaatgttataaatttagtaagatacacattgtcaaaaagatgacatacaataaatattctatttatattaaattttactgcaattaatatataaatattaatattatatatttaaaattttaaattaataaaatatctcttttttttattaaataatgataaaacatattaaaaagatagaataccaccaaaccaaatattttggatctgaataggatttgtatacccatacatatatacttggagtgtgattagaggaattaaagcaatgacctttatattctcaaacgaccaaagtttcttcctttaatccttttttcagaactagaatatcataaattactagtctttgaatcacaatccttttttttgtttcaacaattattaatccagttctagggttttagcaaaagctcaagggtttagttaaatccattacctttgtttatggaacgagaaaaatcagccaagcttcaacacttacaggagtcccttcaggccaatcctgaagattcctctcttcatttcgatctgggagtttttctctgggagaattgggaggaagacaatgaaacactcaaatcattcaaagaaaaagcagctgaacacttcttagcctccgccagactcaacccccaaaacggcgacgcattcagatacttagggcattatactatggcggaggaggaggaggagactccattgttgatccccagagagctgttaagtgttaccaaagggctttatcccttaatcctgacgattctctttctggggaatccttgtgcgatttattcgattcattagggaaagtgaccttagaactcaccgtttgtcgtgatgcttctcagaaatctccaagggccttttgggcatttaggagattgggttatttgcaactccatgaacgtaaatggtcagaagctgtaattagtcttcaacatgccattagagggtacccttcttgtgctgatctttgggaggctcttggtcttgcttacaacagattaggtaggtttacggctgcaattaagtcttatgggagagccattgatttggagcccatgaaagtttttgctttggttgaaagtggaaacatttatgttatgcttggttctttcaaaaagggagttgaacagtttcgtcaagctttagagatttcacctcagtgcatatctgcaaattatgggcttgcttctgggttgtttggttgggctaaggaatgtatttatatgggagcttttcaatggggtgctacattgttagaagaagcatctaaagttgccattggaactacaagcttggctgggaatttatcatgtatttggaagttgcatggtgatattcagcttacatatgctaaatgttatccatggatggaagagagccagagtttagaacttggtgttagtgttgaagattttaatgtctctgtcagtacttggaaacaagcctgttgtttggctgcaacttctgctaaacactcatatcagcgagcattgctcttgactccatgggaagctaatttttatgcagatatagcaataagttcagatattgtcaattctttcaccaaaagttctgatcttgacataaatgtttggcagccaccagagaagatggcattgggggccttgttacttgaacctgaaaatcatgagttctgggtggctttgggatgtttatctaattttaatccactgaaacaacattctttgattaggagtttgcaattggatgtctctcatgctgttgcttggtcatacttgggcaagatttatagggaaatggatgagaagaaactggcaagacttgcttttgattgttcaagaagcatagatccttcacttgcattaccatgggctggcatgtcagctgatttccatggtaaagaggctccggtagatgaagctttcgagagttgtttacgagctgttcagacacttcctcttgcagaattccaaattggtcttgcaaagcttgctgtaatttcgggccacctttcaaatccacaggtttttggagctatcaggcaggctgtgcagcgtgctcctcagtatcccgagtcccataatttaaaagggctggtttgtgaggcacggttcgagtatcaaactgctgctacttcctataggctagcacgttgtgcactcaccaatctttcaacaggttttacaaaatctcaaatcagagatatatcaattaatttggccagatcactttttaaggcagggaatgctcttgatgctgtagaggaatgtgaaaacttaaagaaagaaggattgcttgatggtgaaggtttgcaaatatatgctttatctttatggaaacttggtcaaagtgatttggccctttctgtagctaaaactcttgctgctaatgtttctactatggatcataattttgttgctgcccctattagtttaatctgccgattgctttattacatttctggtcaagattcagcaatcaatattattcttaaaatgccaaaggaactgtttcaaagttcaaaaattagctttgttgtgtctgccattcatgctcttgatggaagtaatcgactagagccagttgtttcgactagtcggaagtttattaaatctcatgaagatatatgtggaatgcattgtctaattgcacttggtaaactgctgaaaaatggatcaggacattctattgggttacagagtggagtggctcatcttaggaaagttattcacatgtatccgaatagttgtttgttaaggaatctactaggctatttattgttatctggtgaagaatggaatgatactcaccttgctactaggtgctgtaacgggaatgcgacttgttctcctatcgacggtttgaaatcagcatatgaaattgttggtgctggagcagttgcttgctatgcaattggcagtagtaatccaaagtttactttcccaacctgcccaaatcaatgtctgaatgaacttggaactgtccagcaactgcagaaacgcttacgccaagaaccatggaataggactctgagatatttacttatcctcaatttactgcagaaagcccgagaagaaagatttcctcgtaatctatgtactatgctcgagcggctaatctctgtggctctttcaaatgaatgttattctgagactactgatctgtcatatcaaatacgaaaaattccaacttctactttgtgcttctgagattagtttgcaaagtgggaatcaaaatggttgtattgagtatgccaaagttgcttcaacgattgcaattcccgatagttatttgtttttcgctcatttgcttttatgccgtgcctatgcatcagatggtgatgttatgaaccttaaaaaagagtacttaagatgtttggagttggagacagattgtgatattggttggatttgtctaaagatgattgaatcgcaatatactttgcaaaatggttcaaatatcttagagttgtacatgaaagattgcttggtgggagagaagaaatcatggaatgcttggatggctctatataatctagtccaaggtttaattgccatacagaagcaggatctttactcagcaaaggagtttcttgaacaagcttgtacattgtcaagcgccgaaagctgcatacaactctgttatggttccacctgtttagaacttgccaaggaatggggtgattcggagttgttattgcttgcaattagaagccttactaaagctcaaaaggcttgtgttattactactccacttcctatcatctcagcattattggcacaagctgagggtagcattggctctgatagcaaagagaaatgggagaaaaacttgcgtttggaatggtatacttggtcaccggagatgagacctgcagagcttttcttccaaatgcatttgcttgcaaaagaatcaagaggtggaccagactcttctttggagtactgtcaaactccattgagatgggttctaagggctgttcatctaatccttcttgcatgagtatattggaaggtgttgcagaagctacttgattgattagtgatatatctctgcctttgaagcctcatcaactttactaatgctaatctcaattgatcattatgtttatgtaaattattcaatgtctatgtaaattatatc

SEQ ID NO: 296968 - DNA, 2563 bp, Cannabis indica
aaaaaattaaaaattaaacattctcattttttccatacgcaagacttgattttcaggcttataagagaaccattaagcatgattttatatacaaatgtatgtatataaaggaaaagctgtgcaagccacatgggtatggttgtacatgagccaagtctaaaatgtttgcttttcaagtaaaaatgacggcaggacacttgcctaaatttaattgctatttgtgcaaaacaaaaaattgtctgcagttcatgtgccaaagccccaccaaactattcatttacaaacaactgacaccaaaaacaccaaatgtgatgctcatgtgcatagagacaaacaaactaaattgtctagtctcaagtaaaattaccatcatcataaaatcaacagtgaagacaacttgctataattctcaccctttggattaggcgaagtgctgaaatccacaaacctaaaaacgtattatgccatgttgcaccattaactacctgcaacgcctttaccaagcctgcaagaagaatattgtttcaataacgctgatttgtatttataatcaacagcttattcagtccacgtattaacaatatggaatgcttaaattgactcgcaccaatgagagtgtcaacagcacttgtagctgccacttgtgacccgtccatagcatcttcaagaaatagatcaacaggaagccaaaaggaggaagaagtagctccatgagattgctgaccagaatatagtgtagttccagaggccaagactgcatgaaaatcatgctgtgatattgttttgcattcacgagtaagtaacctacgagtatcagatgtcaattgtgtaaagacatcgggagttatgtgttttaaactccgcaaaactgatgaatttgcttcaagaaactgcatccgctgaatgaaagatccccagtgcgatggtctaaagcaaaaatcgggttatataaatacagcaagctactatgtaactacaaaaaattattctaaatatacaaacatgtagcagaataaatcctagcatgcatggagagttaaaacaaaatgtgtggtaagtatctagggttcttacatgtttctacgagccaagtacaaaagcctagaggtgactttgtttttaagaaactctacaataatctcaatagccattgcagtatttgctttgtgcaagacttcactatcacttcttttctcaaaaaagcaatcttgaccatctatttccatatcctgtggcctggttggccatctagatttctttccaggggtgagttccagcaacccttcatcatctaatgctgcatcgaccaactgccaaaccattgaaaagacaaattcaacaaccagaacccctggttcagcaacttgaagaccaaataactgggaaagatgtagagcttcatcaatggacttcatgatcctgcaaacacaaaataaaaaacgaaaccaatagaaaagttactaattttttctttaagcaaaaaaacagcatctttaactttattttttatgaaaagacaattaggttgaatggtaaacccctctgcgcaaggaggtcaaacaataaacacaatttcttttctattttgtaagaaacaacaaaacgatatcctatttctaacccttacttttgattataaagtccacttgtttgagaggtgaatgaaaatgaatgtctcttaagaagctccatgtaaagcctgtaagccgtgggatggagctgtcgatttggaatgaccctttacataacaaacaaagtataagatatcaatagtaaccaatcaataataagtgaagaaaaagcaaacccttcaaagattttgataaactatgccacaagacatccgaatctcagttgtaattgactaagaaaaaaaacgccattacaatacaatgcatcatatatatatatgaatttgctttccacgaagtacagaagccaactcttttagagaatttgacaaactccatgtcaatgcaccacaaaaacgaatttttcttcaaaaaaaaaaaaacagaaaaagaaaaaaaggagctgcatggtcaagttaaaggaagagtcagagacagacccattcatcagtggtcccataaatttggtgggaaaaaggagagaagtggggataccttgcggaaagaagagcaaggacgaggatgggagggacgatcatagcagtcaaagctttctcgaggaacttccacgtgatgggcacgtgattagcccagcagatgtgagaaaccaggaggtgagcaagttcaacggagggcaaaggaaccccagccgagttaaggttcgaactcatttgcgttgcccagagttgaggatcgatgttcctttcttgagctgacttggtgatttccagcacggtgtcccacagatgactcgtcggtttctgtacggacaccgccatggcccctagtttctctctctctctctctctataaagaccaaaactttactctattacttctccttcttcctccttaacgaggttgagggagaccttagaatctgagaactcgccactacttcttctactctactcgaatggaaatggaagagt

SEQ ID NO: 296969 - DNA, 3880 bp, Cannabis indica
tgacaaaaaattattttttattctcacttttgaaaacataattttggaaactaaaaacagtcatacaacctctaagtttctcgcttaattgaaagaagaaaaagaaagaaatgtgctctgaacatttacattgattccactagtggaaaaggaagaaagtgtggactctaaaaagttgcaaaatttaccaataattctcaaccaagttaaaatgatactgttgttcccacttacaacttatatagctcatctcaaaccaagccattttcatgaattctcttagaatgtctaactactcaccatttgacatattaaaaaccatcatcatatcacttatcttaatattattgttattggtcttcagctgcagtttcaaaggaatgaagttattgccctgatgaacctactcaatcgactatccgaatcggtaaaattcgtccatgaagtaggaacatcagctgaaattaccatgaaagggcagatttcagcacccactacaccaaattgcccattgcaaagaatatggggttcattatttgaaggacctgcaccaagttgtccattacaaaggttgtggtcttctgtaaatgctcctacaaacaacaattgtcgattgaaaaggatttgggcattgatatttgcagattaggctaagctaactagttgggtttttgaggaaggggaaacaaaacaacattattatagaagagaaaaacaataagaacatgtacaagtatgtttaacatttttgtaaacacctatattttgtaagttttttagagcttatcaaaaattgaaaaagcatatcataatttgcattttaccattaacatctttcatttcaacattgctaaggggaaaacctggatttaaaatgtataggggctttagaaatctgttaagaagggtcttgtacaattgaaaagacaagaatgattaagcaaaatgaagcagcaataataaccagacctctcatgggggttattccaatatgatgacctttcaattaaccacatatacatgtaaaacacaatatagtcagttaacttctttcattgaagaatacaaattgctattgcagtaggcccattgaaatgaaaaatcaggaataaaattgtcagtaaggaaagaaacatgaagaatgtttctacatctgactaaatattactaacagaaacaatgtttttcaaaaggcaaatctttcaaaaagatcaatgcttgcttagcggcctttctttagacgctttggaggtcgcattgtgtctttccttgtatcttctggaattttcaagtcaataaatggctgcaggcatttcgagaaccagttacagtgagaagacataaacaacttatctcaataaaatctctacacattcaagacaagtgcaaatattatgtcactgctcatgatccttttcacatggcatagaataacaaagttatgaaataaaaatcagcagcagaatttaactattatttgatatcatataaagtttttcagtcttctaaactagtagatcaatgttatttgttccgaaaataaaaaagccccccttcacataatgcaacatcaaaagagagtccatttctgctaaggcgtttggagccaataaatggggtgtgaaaaagatacaaggtctgatatttgagtccctcctaagtacgtacataacaattactctttaagctagtcaaagaccgagaaagaaagcatgaattaagagatgcagaatatggtattatatctaacctcattccactttctttggagctctaacagctcttgacagtatgtaaggcaatcggcatggtatacagcagctaattcctttatcaaagccttccttttgatgatgccaatcactgcaaagaaaaatcaaagcaaatacaaatcagaaacttagatggtaagacaaaagcacatttattatacttatggttaagagcaaccatttgttaaaaacatcttttactttttaggctctcagccaatccaatgtgacatgctagaactaaacagattgaacttgacctctacattgtctgcaataaggtgatgcatatgaactactagattgtcagacatgtacacttgcaaagctccattggcagatgggtttactaaaccaacatctagtagttcaaggtttcagaagttgaggaaacctcaaaggacccaacaatgtttttagacaacgcccaatgagcgacgaggagtcttacaaaaggtacaacccaaaaacaagctagagagtttcttacaatccgtgacacagttataaatctcccatctagaaatcaactcattaatagcattgatcactacttcacagtcactctcaaccataacaaaagagtgaccattggaagttgaacttagttattaccttagttcatcatagttagctgtttataaatctcttttctaacatagcttgaaattcattcaatcttctagctcaaaactaactaattaaagaactgtagagtggtgatctatctttacatataattaacttctaatataatgaaatcagaaacttcttcctactttccagattccaatacaactcattctccaactcaatgcacaaaaaaacagtcgaaaggtaaaggctttgaggcaaaagcaaagatatctaattgtgtgattgttgcagagttaaaaaaagtttgctttgaaatcaaaattaacaagttattaaagtaaacccaataatgaaagaaataacagtaaaagaaaaagttgatggaaagaacaattaactgatccaataccaaaaacatactcaaatcaatcacttcaacagatacaattctatacgaatgaaagacaacccagatgccaaaatttctaaaaacataaaacataagacgctataaccaaaattgaaacaatataacgacgacccagatgaccaaacttcaaaaagtgtaaatctttgaaattatacagaaacatatttaatcaaataaaaaattgacccagatgcccaaaattcgaaaaaagaaaaaaaaaacaaatattagagaaaaagagatagaaagagaaaatacttctactgggatcgaagggtggaggaggaagaggaagaggttgagtttgaatttcagatgagtcagggtgagagggcgccgccgcagaagaagaaagagaagggttttgttgttgttgttgttgttcttgacccattgtttgttttctgggttgaactaaaaatttgaactttaattgatttaggaatagtatagtagtattagtataggagtgtttgtgtttgtgtatctatatatgtacatatttataaggaattttggtgtgtttgtgtttttcttgcactgttttcactaacttccctttcattcttttcttccaaattctccagagaaagagaaactcatcagaaattcatccagcaataataggggcctcccatcaaatttaaattcaatgattttacatgtaagtccctttcccatgacccaaattgtaaataaactaaatacgaagggcttataacttataagtgcctttcaactaaattatttcatctaaaaaattaagaaaaattctattatgcaccccttaaaaaaaatgtaccgatatatctttatctattttagtatccgaaataattttttagccaaattttttctcataattatgtaaattatacttatttaagacatcctgtaaaattttaagaaattcaaaacaatttaaaacgccaaaaattacgttcaaacagtgtgttacacacgtgactattttattttatacgcgtgtaaaataaactgtttgaacattattttttatattgtaaattatttcgaatttcttaatattttataagatatcttaaatagttataacgtacat

SEQ ID NO: 296970 - DNA, 6427 bp, Cannabis indica
ttttttttctttctttgttactaatttttatattaattactaccttctcaagcatatcatcccttcacaagccaatgtaccttcaagatctccaataactttagctattctaacctcgagacctcgttgaacatcatggaagagcgttctaacagcatcagcgaagcgtttcatgtcgaagcttcctacaggctcgccaaggtccttgacatcttccgctaaaccagcactaatcttggattgaatttccattagtttctgtcctgttgcaacaatgtatctttgaagctgaaatgtttcttctaagaagtgctctagttttttggtcttttcttttgttcttgttgtgttggagtctcttctgtatagctctagatcactatcatgctgcaatttatgaaatgagtcacataaacattgtaataaatcagttgtgcatgttagcaaatttaaagaaattccaagaaagaaatttcttgtgataaagaaaatggacgtgtttgaaaaatattaaattggattggataggattaaatcgatgtgattctatttagtacaccataactaaatcctactaaagaaattacaaattttttggtaagattcacaatttaaatctacttagatactatacatattttatattttaggaaatttcataagtttttctaataaatcttaaaacattagaagtaaggaaatctcacaagtttctctaatatatataaatatttcccaagaaagaaacttcatctaattataaaaaatggtcatgtttgaaaagaatttaattagagtcgataggatcagatcatgtcaagaaacatgagatttcatttcaaaaccaattggcgatgagaggagtagtccatgcatgttatgtatggtatttaattctgatcacaagtagcacttttgactcatagataggatactttctgataccatgtcaagaaatatggggttctctcttaaaactaattggaaataagaggagtaacccatgtatcttatatatagtatttagtatctacatattatcaatgtcggactctctaatatttttatgaagtgatttcattatgaatctacttagatattatgcatattttatatttaaggaaatctcataagtatatctctaatcaatcttaaaatagcaaaagcaatgaatcttaaaacactagaagtaagaattaccacatagaattagagcttaccatccttttgcaaagatcatcaaccttggtttggagagattggtaccttccaacttgtttgttcagcaaagaaattaatgatattacacttttcaaatcagattctccatcattattattgttgcttttttccttattatcttcaccactttcttgctttcctctcaaactttcaagcataacaagctgttgcttcagcctcttgagcttgtaggcgacaccgagagcatgaagatccattcgccattgagagctatttgttctgctcaaacttttttgagtaaccgattttgttttcaacttctcgccaccatctactccttctgatggactcgaacttcccccttcgggtagaacttcatgcgaaacaaactctttctgctcatcaaactctttgtcaggagattgtactgtcaaaaccatatctgttcttcttgactgatcatcaacaacagatggattttcatctgtgccttcctctgctgacatttcaatggaaactgtctttgtttcttgctctttcgagttaagttgttgtgagcaactggcatgatcatcatatgctgatgttgttgagtcttgtgagcttgaattgaagctgttcttctgaaaatttaatgaccttagatgagccacaaactgttctttcatggaatttagttcctcttcgcgttctgataacaatgctcccatcttcatgttgttatgtctgagttgtgctaattctttgttcaatccctctatatgggattgtaatcttttagactctagttccatacttaacaatctccatctaaaagcttctactttctcatctttgagtctcaattgttctacaaaagcatcaatctctatccgatgcctttgttcgattgcagaagcatacctctctgcttctgaccgaacccaactctcaacctgtttaacatcagctaacataaacaaaagcaagaacaatcagaaagtgcaactcaaaccacaaatttcaatcattttgccaattgtaaaggcgaatgagtacttcgttctttcttacctcggttgctgtcataagggggtgaaaaaccatcagattcattgctgaaatcagcagcatgctcaaaccccataagaacatcacttggttgtgatttggtgtggccaatgtgcaagtgagatgagcctgttggccctctttcactagaattgacttgtttagccaacatattccttagtgaatgcctctcttgtctagactcagaaacagccttccatctttctgtttctaactcagcttgtttccttttagcttttgacaacttaacctctttcaaaagcatttgcttctctgctgaatccatcttgaattttcttaatgttgcagatagaatcttatctttttgttccaaatcatcatgcatcttcacaatctccccagacagtttctgaaccatcaaaacagattcttccttctgcttcaacaccgaatcgagctcccttttcttcccttcaacttgcctaactgctctactcatatcagcctcgagtcgcctttgatttgacacgagctcaatgaatgcagttttgtgctttctaagctcagaagaatgatcctgcgattcttgtttcgctttttctctcaactcttcaaccaaactctcaccatctttaatcttctcttctaactctctcctcttttcactctcttcctccaaaaccttgtccttactttgcaacaaagtctccatttccttaaacttttcattcatctccaaaaccgcttgatccttcttcttctcgagaaatctcaactcgctcatcaacgaaccaatatgctgcctaagtttcctcctttcaaccaaccaattttgctcctgagcagcaaagatgctcacaactttctcatttgcctttgcatcttcgcgccttagtctcttcaactcagtaacttctgcctcagcattctcaagcttaagcaaaagttcagaacttttctcactctcttctctttgaactctccacacaagcaaccccaagagctgtgcacttccttgaagcattttttctctaatgtcacaccatttttcatcttccatattattatgaggtaatgacaagagtctcacagcaaaaaaagcacaagaaacaccaaaatacatgggataaaggccatcactcttatcttctaggattaaagactttgcattggggaccactttctcatccatttactctgattttttcttccacaatcaattctagtttgaaaaacaataacacaaataatcaaatgggaagaaagacatatacagacttagcattaaatgctgaaccagaatccataataacaaaaattgaaaaggaatcattctaattgacaaaaccccattatagattattgataaagattcaaactttgaatataagaaacttacataaggttggaatttcttcttcaattctcagaacaagatcctaaggcatattagccagacccaactctgcataaatgtgatgtgtgagttttccttttcttccattataaatggtcagagaaagccaaaagcaatggtgtttacacgtgtgttactccagaatctgttaaaagttctgtactttaacagtaaaaatatatattgttccctggttttcagtgaaagactgacccctcaagtagaaaaataaaaattaatcaaaaataaatgaataaataaataaacccacttgctcatcctttactctctctcaaattttcatcactgcaataggaagcaaaagtttctagattcctggttgattgtcacaactactgataactgaggttgataggtagaagaaaaataaataataaataggttaattacgatttttacgtccgaactttgacatatatcaaattatgtcttctaaactttggagaccattaaaaattctaactattgagattgttggtttttttttaataaaaaaaaaaagagattgttggttaaggacttttatctaattttaataagaaaattctaacatagatgaaagttcaggaggcatgatttgatacatgtcaaaattcgagtggtataatttggtaaatatcaaagtccagagaatgtgatttagtacatggacaatcaccgaattaataaattaaataaaattagataaaaattcttaaatctaataatttcaatacttcagaaaaaaaaaataattaacaattagaaaagttagagagtatggcaaaaatgctagctaataaatattcatataatcaatcaaatacaaatctgagttttttttttcttttttataatattatttttcaagacttgcttatctgtataaaactacaattaaaaaatgattaaaatgctatggaaaaaagttataccaaaagactacaaacataaagtgcttttattttaatataatgagaaaatggatgtcttgttctcatgtcattacccaaacaaaaaaaaaaatgaaactatttaaaccaaaaggagatatttttcaataatattgttcacctcttaagttaaggctcatgtttgaagaagaaaaaaattatgtatgaaccaaataaacacaatatctcaaacttggaccacattatgatgatgatgttgggggagtattaaacaacatacaacatcaaactaaatatagttgataaattattggatattactcataagaattgacaagttttcaaacttttttccagatgggtattaataaaattaattaaaatacaatatttagattaattgatttagaattaagactaatacccaccgaccccctcattgtgttttctgaaaaaataacatataataatgtaacttaaacaaatgtgtatatatatacaattacaaatacaatgaatgtaaacaaacacataattagtacctgaaaaaacccctaagaaagcaagtcttcatgggtccaaaatgacattaaatcttatcatcttctaattgagttgcttccttagctgagaccctgtaaattgtaaagttggtattttttttttaaggtatacagatacaaacattcattatagtatacatcaaaaaagcaaactagtattatgtctataagctattatatatatatattatgtgtatatagtagctttataacattcaagatctgcccttggaatctgaactttttgatgcttgattcactatttcattataacctaagcaatctctttctttctttctctctctctttctgatatgtctgcaataaagaaaaggaagaagaatagaataagggtcacaatcaagtgaggacattagtgggcacaccccatgttcttcactatgaaattagtaaggaaaagtgaagtttcttctattgggtccaccttacaatatgaatattatttaatggttatggagattgagcttcctaaccccaatatcatcattcataattaaatttaaatgccatgaaaatccacttaaaaaatctatgcttttaatttcatgctattaaaacttaaaccattcatgtgttagtacaacaacaatgtacaatacatcaataatatataaatatagatattgaaaaattgtttggtgagaaaatcagttttctcctaaggacatttctaattttgtgtacatagagaaattataaattattctttttatgtgatggtgtatatagttacactcggaaaaattaacaatcacacaaaaaaatatatatatttaattacacatgtacttattttattttgagtattactattatgtactagtagtgttcaatactttttataagtagtactttataattagttagcgatattacctaaaaattatttttttaaattatatgggacctgattacttttttagtggtataatatcaagaagagtattgggcactaatagtacttttcaacaattctcttttattttatacgcatgtaaaatattcagaagttcagcaataaaaagaatagagaagatgcttattataagagtaaatattattttggaccctatgttttgtaaaaattaccaattagaccttttgttttgttaaatgacaaaatagaccctatatcttccaaaatgataaaaataggatcatgagctcaattttcaataattttattttttaataaaactaattttaatacaatttctaacacgaacagatacagaaaatgtaatcagttttaccataacatctctagattggattat

SEQ ID NO: 296971 - DNA, 2948 bp, Cannabis indica
aaaagagaggtgtgtgtgagtttattttgtggtaagagtgagaaagaagcaaagggtgtattgggatttcggtggagatattgagatagagagcatatgtaattttgaagtgataagtgaaatatatctctctttgtgtgtttggtagttttaccaaactgagtaaattattttacttcgtttctttattatttcgatgcacttgaagtttatcatttttcccaacacttctaatgaatctcctacaacacctgcttttgcatgtgtagtgggaggatttgcatcatccataggagtatccccatcacagatgccaaatttgctaattgcggtccttgttgctaccattgttgcaatatactttgataccaactctttctttaactctcaatgaaaataccaaaatatctactaaaatttttggaaaccaataaaatataataaagctaaagaaatataatataaacaaagaatgaggtaagagtttttaggtggttcgaggattaacgacctctagtccacaactcaatattattatgataaagctggaaaagcccttcggatttacacaagtattttgccaagtgtttgaaccttaaaattttcttgagcactcaaggaatgagattctaagcctttgcatgaatcggttttcttatatttaatagtgcatgagttctcatatgtaaaccttgcccactaatagggtaaatacatataatacattgacttcgagctcatctagtgaagcccggtccatgaggcatttatcttttgctgacatggatgccacatcatgttgataatttttagaccatgtccctacttttgtggataataaagatacattaatacttgattgacaattactttgtttctatattcggaagatatgattcttggacaggatcctcgaaattaagccttaatattgtgggatttgataattaatgaatgtaatacggaactgaatatctggatgtctattaactactgctctggaagctcttcttgggactagccaaacgtgcacaatgttggaagtttatttcgcctagacaagtcatctctccaacatttagaaggtttgacttctctaatagatccagaccattattatggttgggcctgcgattgatcttagaatagttgaagtaaaataatcttggaattacacatgtcctccatccggaaacataaataacaccatggaaaagacattctacttagtcaagtgtaagtagacaacattgatgattatcacaacagtgtaaatctaacgtactgataaatcatgggactaaatagtttgaagtatgcaataataattattttccactgtagtgacaacactataattgtgaataactatatattcaagatttaacataatttatatattaattaaataattaacatatgaatcaaataatatataatagtaataaaataattctaatcttttatggataagtaaataagataacattgaaattgagttttatttagggtataaaaactcatatgttcttaatgtatctctaggtgtccatttctcctacttatctcaaatatcctcaactcctcaaggtatcaatgcacctaatgctaccaccattgatctccaaactcagcagcaagtctcctctattcctcaagttaccaccccactgcaatttgtcactaccagctcgcctccaccttttgtataaatatttattttgtcgcatcttttgttccaggcttacaagctttagctctcacacttgacaatgtcaatattcctgctacaattgaaactactgttgtctcatatgctcctcctatatcatcccaccctatgcaaactaggtccaaaccaggcattcacagaccaaagattcttgcagatgaattacttgatgttcacaatcatattagggagcctaaatcattcaagaaagccttgagtgatcctaggtgtaacaaggctatgacagatgagtttcatgcccttattatgaataaaacctaggtattggttcattatcatgacgatacgaatgtagtacaaaataaatgggtgttcagagaaaaattcaaggcagatggcgctctagacaggttaaaggcatgattagttgctaagagttttcaacggacagttgggattgattattttgatacctttagtcctatggtaaagaccaacactattagaatattgttcacattggttgtcacctatggttgggacattcaataatacattcttgaatgaggacttaaaagaaactatttatatgcaatagccacctagctttgattactccacatatctcatctatgtgtgtaaacttcaaaaaaccttacatggtttgaaacaggcacttagggcctggtatgaaaaactcaaaaaaaaccttactttcttggggttttacaaagtttatctcaaacagtagcctattttttattaataaaaatggtcagttgctttagttttgatctatgttgatgatataccagtgattggatccagtacaagtgatttttctaacattattagtgcatttcaaagcacttttgctcttaaaaacttgggattagtaagctcatttttaggctttcaagcttcaaaagttggagataatttctacttgactcaatctcaatatgctttaacattcttaacaaagccaacatggaaaaattcaagccttgttcaaccccatgtgcgcaggttacaaattgcacactagtgacaatgaagactttcaagatcctacattgttcagaagcattcttggctctctccagtacctcactttgacaggacctactctgaccttgctattaacaagttcaatcgatccatgcaacaccctagtatggctcactagaatcattgtaaaagagttcttcggggaaccatttgtaacaccctaactattttaggcgtattacgt

SEQ ID NO: 296972 - DNA, 2179 bp, Cannabis indica
aaaaaaaactaaaaaaaaataattactattttctgtttccggtctttattaattaatgccccaggaaaaagtatgacatgattagtggatggattaggaatttaatttattcttcaaaactactttccctaagaaaaggcataataagattatgaagaaagaaaaaagagaaaagagagatgggtaattaaagagaataaaatttctgttcattttacatagaaaaaaagagtttctaataaaggaaaccagctaattaattaagattaaaaggtaacattacatgtcatttgtgcatttgcatatcatatatacatctatcatatatatataatttgaaaacctatatacatattggcatattgtaaacagaggtagggtatttttatttatttattttcgtatggaataatggaacataaaacatttccagagtaaaaatgtataggtaccgcttatatgtgtatatcctatttatgtacgtattatgtatatatagatctttgtgatttgaatttggtggagtacgtggcctattgtgtacaatgattatatgtatgtgtgattattataaattaaacttgcatgattggagtagtttcaattatgttgataaaaaacattgcagggatcttagctaatatagatctctaaaggctgcaatttgctggtcattgttaaaagccccccaagagattttccttttcatatatgatcacatacatcaacattaacaaataataaagtacaacaaaagtcatataaataagtatattaaaaaagatttcgtataataataagtataataataaggattttctaaacgttggcacatctggaaatggtttattgggaactacaaagagctagcttgatcaatcgatcctgacccacatgtgcatctcctaataatttatcaaaacaatattaatttcaactctctcctataaatatatagcaaattctagtgtgtgtgtgtatatatattatgtatatatggacccacttatcatgacttggtaatggtggcactattaatgcatatggtccttcgtgtctcctgagttgtgttagtgaaaaaatatatacactttcaaaaccaacatccccagtgctcttacgatctatcttggatattatttctctgatatacgttgattttataaatccactatcattattcattactactcttcccatcattattttattaatcattgattctcttatgttattttgtcccaaaaatattatttctttatgttccaatattcatacgtacaatataatattcactatagctactacttctctgatctatctccagttgttgaagcctttgtattatcttttttttttcattgtactaattaataattggcatgaattaatgttgatgttttggtagcttccttgatctttcgagttagtgaaaaatctccaatcaacattgagattctatatcgttattattcttttcattagttattaattgattttgaatctgggggacttaatatatcagtgatcaattattctaaatttttatcgatcgtgcaaagaaattatacctatatgtatgtatatatatccgttgaattggttacaatccaaaaacaaaatttattggtgtatactctgaggacaacaatatacgtatgtatacatatttacattcaaatattgggatatatacatatgaagagagaagagtacattgggaatattaataataaatatatacttcattattatcttatttttgctttaattctttgaacagaatctgaaactatatagtgatgatgtcatattcctccatgcatagtgagtccataaaattattaatttttttatatacataaattaaatatggatccatctccacggcccatgctccttaattgtttaatttacactcctccttaagaataatatatcagctatatggaatttttctgtgtttattactttaattaattaaaagaaaggggtttcttttgtttattcatgcatgtggtcttattaatttctgcgctattttcatatatattgatccaccattatatcttagggtgattctacaatgcacccccttaaaagggatgtactgatgcacccttaacttgtttcgacatccagaaaaaaaaatttagtctaatttttttttcatattcat

SEQ ID NO: 296973 - DNA, 6147 bp, Cannabis indica
tatcagctgcatgtggtgaacctgtaggcctacaatctcgagtttgagtccttttggatgctcgctcatagcttttttccctaacaattgattgcaccgtatcaggcaaaggtcccatacatccatatatttgagttttagtcattttggatgctcgctcgtattgtactttatatgggaaatcgcagtgcctacttcttattgagtagtggtgtggctaataggagtggtagtgtttctttgcatgttcatcatgtattgcttgcttgaacttatgaattccttttggaacaaagctccgagcaaaaaaagttgaactgtagatggggaactcaaattgtgtctctaaatgaaagcaccaaaatattgacgctaaaaagtatccaacatcagctatgtctacttcgatttttcatttcccataagaattatagaaaaaggctaagtgtttaagctcaagtttctagagagagaagctttgatcttgtgggtaattttctgaatgtgaaaaatgaggtaagggagatatccttttataggtgaaggacgcccacaaaaatagagaaaaattcaaataagatgcttttgaccgttgatgatgatcttattgtgaaaattagctctttgtagtgatggctattttttggagcttaatctgtcccgatgtgggtaactcgaagcttattttcataactccattgggggtaaattttgacaacgatagctttatattatgattgaagtgtaagacatgacttgatatagcactaaattagcttcaaaatgaaagttgatcagatcaaaatggagtatcttatggttgttttactgaaagcagttcatgacccaacgcccaagttgacaaatgacgtcaaccaggacacttggttagtgttgaaacatccaaggattgtaccttaaggtttctaagtgatattttgacatcactttgtcaatttttgtgttctggcaaagctggtcaccagttcccagagatgttactgttctacggaaatgagagactcgaaactattcatttcctagtgagccgaatatgagaaatgaaaagttgtgaatttgacttatccaaacttcatggatcattgttattgtgaaataaaagattgatggtcaaaacgacatcaaaattgtataagcagaaccaagcgcactgggccttttgccaacatggaagttgggtacttactcccgagcttgtgggatcttatttttgttacttccaatggtcgcatcagatttggcatttgagcaattgaaggtagcgtcccaagttaattgtcaacttgggcactagcctatcactagattaacctgggcgatgggccctatttctaggggctcgagtttatagttttctccccaagtttgcttgagtattcattatttttgatgatggaaaaaatttcaggaacactttttagtgaacttgatcaaaaatgacacagtttgacaatatatcaatctgggtgttgggcctagccccaggtgtcaacctaggagttgggtcctaattctagcccttcaaatattttgtttggtcctaggaaatagttgcatctcaatatttttggaaaacagagaagatgctcgaaaaaaattcttgaaaatctccatttaaaattgcactagtttacaaaatgtcaacctgggcgcagggccagcctcaagtgttaacctaggcactgggccctatttttggcaccgaagaagttttgtttcttcttcaaaaggaactatttcctcattttatattaagatgaacaagatgccaaagtcagatctctgatctgatacttggaaggcgcccagattaacacattttcaacctgagcattaggtaatcgggggcccgggtgctaaaaaatgaacatattctgattctaattttgatgcctcaaatatgcctatggtatgtcgagttgatgtccaaatgcatgttttgactcatttgcactaagacagtccaaaaaactgaagccttagttaaggttctcaacttgggcacttgtgaaaccctaggttcccaggttttcttctacgctgcaggttcatgtaatttgagctcctagggattagaataggttgctccttatctttatggtacaaaatactaaaaatagtgagtgggattcaagttatttatgttcaaacttccattccaaagttctcgatgtcaacctgggtgcagggctagggacccctcctaggtctacctgctatgacttttatttctatggcaggaaaattacttagattcagtgtcgaggagtttgtgttagttatgggtctagattgccatttggattttgatattttccagtataaagaggataaaaatatgcttgttaaacattgtttaaaggtgaataaaaaaataaccaagatttttgtccaagttgtatttacggctaataatttaaagggaaatgatgatcttgtagtcaagtgggctattttgtattttgttcagtgttacttgattggtgatccttctggtaaggttatcttgattgaggagcttgatcttgtggacagtggtcgctacagtgagtataggtggggtaaagagtgttttaagatggcggttgaatcgttgacgggtaagatagatgcaagtattaggaaggttatgatgtaggaaatggattgtgggtattataggttgttaggttttcctcttgccttacaaatattgttttttgagtgttgtccgtatgttgttgggaaacttatggtatttgaacattggcattacctcttcccaaagtgctggcactgggtgtccccacatcagggtaagcagtggcaaatctcactgagatttcttcttcctcaagcagaggatcgggatggcgtgacaccaaatcaaagttcaaggcactatcatttttggccgcatttgtgattataacggccaaaattgtggaaattgcctctttcacttccttgggaggttggcgctacctgcagatgctaactgtgtcaatactctgaaattttgtgatcaagtcagacgaagaagttcagttatcaccaggtctttaacctttaattgatcttccgagaagaccctatatcgagcttctttcttgattatctcctctgtcctaacactttgagatagaagcactgctgcaagtcgaaaaatgttagtccaagcacagaaattggcaaagcttaaaaactaacgaaactcaaggtaaattgttagaatacctgagagttggaaactcaactaaagagatggcatcctgctggtaggaaatctagaggaaaagagacaatactcccggaggtcatgggtgcgatccattcagcaaataagcaataggagtccaggcatttatccagtcggaagaaccccagcttggacctatctatcctcataggattggccttgacactatagaagtaagggatttcctccgaggaaggaacttccagtttgttgattttgtagaacacgtaccacccagccaagaggctatatgatgaaggaatcaattggaaaggtgcaatcccaatttttgcaatcaggtttgcgaagtaggttctcaagggaaggtgagcgccactagaaatatgggaccaactccatgcactaaacccattatcactaatggacacagattctcccacgacgaaaagcatgttccacatcagtctagggacattatggaggctggaaacctcagtatacgcttgcagcatcccataagatcgaaagtagttgtcttttctaatccatttcctatatggactcaggacgaacctacatcggcgaaggactttcagcccctttgcatctcctggtatcagttgagacgtctctctcggcgataagcttattttttggaatgttttccaaggccctttaaagcttagattgtccgatgggggccacaatttggtcctatcccatagaagacctttcgacagacgaagtaggttcaactttgacagatacgtctctgcctgagaggggttttttgttcaaatccatggttatgaaggaaaaggagaatcctttaagacaacaaacgggtatgaagacgggctctcttttacccaaactattctgctttatggcatgtgaatagttctagtcctaatctaagcaagaaccttcttgccctaaacgtgaaatgcccaaattcagacagggggttagtatacttacttgtcgaatcagaagaggtaaattgtgtgtccaaaaaacctgcctgaaagctctagagccagtcaatacagcagtcatagttaacctgaaaatcaaatgttcctcgaaggaagaacttcgttggttcagtcgaagggaagcggcgtgtaagaagagttccatgcggatgacgagtaattgctggatcagattttctaacacttcttgcatgcaaaaatggtaggaaaaggaaaaaagaagttgtagagaagttatggagttttgaataaaaagagttaaaatgacaccaccaaaggcagtttacatttcaaaaggaagacagggctatgaaagatcagcggttcaaaatgatcgcaatagaaccaacgactagggagatgagaagtcccgtacgattggcttggggcccaccaaagtgtcgaggtccctttctgcagtcactcaaccgtcatttgcactctaccttttttgctaggcagaccttgccacacatagaaaagggcaaggaatacttcctgatatgtcgcatggttacaacgcaagaggatgcaaatgtcgtatttaccgtcagtagaatacagctcatgtaggagggtccatgacttaaatttgcaacacgtatcaacggttaataccagtggcaataacaagcttttgtgatccaaagaatctcgaaaagcttgggggtaaatgttatccaagttttcgttagtcaaagacgtggcacaagaagagggaaggatatggtcgtaacccgagttattcaaagcaaccaagaaaacgaatcactcccgaacctagaaggcaacgagaggcaaattccttcaggagtaacttccttcgatgaggaacctgcaaagcggtaaaggttttggagacgttggccacatcagcatcttacaaaatatcactccacagatggttccacctttttctgacagaggattagatcttgtcccctgtgccagaccatggtagtgcgcagatgcacccttgagcatgcttgttgcctaacatctttagtagagtgtattttgcaaagaagagacctttgcgcagcatgtgtccagggtcatacgaaagtcctcaccatttgttgtgcaccgcatgatgaagaaggttcctaccagccaatggtcaaattgtcctctcgtgctatagaccttaaaaatgtatggggtacgaaatcctaggtaggtcaagggtatcccctttaccccatgtttgcctataaatagtctcagttttcttcaggtaaggaggagaactattttttacttatagtcactctgcaaaaattccaagcaagctctctcacacagagaagcagagtagtctctactataataccttgtaatctctataatatctgcccaaagaggctaataatatggacttgtggactaaggattattaatgtgcgaaccacttaaaaatctatctatttattatctattatcatttatcttctttaagctctcaaaatatttagtttttaaaaaactcggtaaacaacgtggcatgcttacatggataaaatcagtgccacgtggcagtacagctcaccaataggaaggccaagtcagaacctgaagaaatggagaccccaacactgaaacaggcatcaagtgacaaaccagctccctctcaggagttggccggccctatggttggctagcctggcctccacaaaggcatggacaaccaagaggtgctctgtagggttccctgtgcacttttacacatgaacaacaagtcattggctgcaaattgggccctaaaagcccaacagaatggctgaataatatttagattcaagggcactttggtcttttgtaattatcaaacaaactatgcaaactgttgggttttatgccctaaataaaactcatttcaatataataagatttgcttattaatatagatcagaaataacatttaatgtt

SEQ ID NO: 296974 - DNA, 2092 bp, Cannabis indica
aaaaagaaaactaattatacgtgcattgcacgtaacatcaatttagtataaagatatagatatagatatatttgtcaataatatttttttttttggttgaaaaaagccatatattgcaacaagagaataagaagttagtacaggttacaatatatcaagatttggaacgattccattccaaatggcctcactctcaagtcctaaagttgtcctagctaacttatgaggaataagattcctagaaacatgatgaacagaaacattaggaaaattagagagaggtgatacaatttgattaactaagtctgaaagtgaagacttatccttccacctatgtttaattttacttattaaaaccttacaatcacacttaacaatacacaaaggaaatctaactattgaacaccaattgagagctgtagccaacgcctttgcttcaaccataataggagataagttgccaatcaaaggagaagagattgctgccacaacctccccacttgaattcctaactgctgcaccatcccaattttatttctgctattatccactacaacatccacacttaatttaaaaaaacctgcagcaaaagactggctcactgaactctctaccctttggccttaaaactgaactggtgctgcactttgacccacacgaactgcattataatcttgagcttcatcaaagtcatgtaacaaagcatccacctgaaactcagcagtagacaatatagtcttattcttattaaataaaatagtatttcgcctattccaattttcccagataatacataagaaaattcttaactcctccttagacaaagcatcaaaacccctaagaatgtactccctgatatcatgacatttattattttagtagaaagactcaaatatagaatcactccactcaaaagaagctctagaacactctataagggcatgggaaacaaattctgcatttccagaataaagagaataaagaggagatgttagaactttcctatggaaaagataaagagctacagaaagagtatgatagagagccctccaaataaagtgttttattttctgagggatcttaaggttccagaggactttccaccaacgaaccaaagagtgattgtctgaagaagcaggaagagaagtagagaatttagctaaatgggaagcaaaattcacagtaaaggagccaaagggatgatgctcccaaataaaactatcatgaagagaaggatcaccaattggaacaacaagaataactaagactaactcatgatcaaaaaattccaacaaccgatccttactccaacaaccattatcatcaataaaataagacacagaaggatctaggggttgaacattacctttgtaagggatgaatctccaactaggaatccaataagagtgcacagtggagatagattgaccattgcctactctccacagaagacctctcttaagaaaatcccttccccaaagcaaactttgccatgtaaaagaagcacaatgacctttagatgcattaagaaaggaattgtgtctaaaatacttagctttaaacaacctggacacaagagaatctggcatcatgagaatacgtcaggcttatttagcaaacaaagcttgattatgatgaataaaagagcgaaaactcaacccaccagaaattttgactgacacatgtttccccaatgtttccaatgactttttcttttatcacccaccaactcccaccaaaactgagtcataagactttcaaattttcctaatacagtagaacctctatttaagaatactctattcaagaataacctctaatttgttataaaaaaatcaagtcccaatttgggccagttataaataataataacctctaaattgtaattagttatacattttctaagtcccgtattaacaaagtatacctctatataagaataattacatcttaataaaatatatacatatattttgtaaatttatttatgtaaaattaataattttatttcaaattataatacatgtatgaacattatatttactctaaaataatttttattataatactattaatgattatttattgttat

SEQ ID NO: 296975 - DNA, 5840 bp, Cannabis indica
gattaagaaaataaaaataaataaataaaaaacctaaaaacctcttcctccttcctcttctcaccaccatcatcatcatcatcatctccgggaacgattaggatctgcgaaaccccttttgagctcagctggtaagtttttcatccttctctccattatcattctcattactgttcttcatcttcttcattttgtttgggggaaaatacagtttggatggagtgggtatccgatcttttcttttatcttgtggtcttgcttaaattgatttgagagaatttatacatgtttttgtgaatatgggtgtgattttgtgaggggttttaattgggttttcgttgttgggagtggaagagaattattttggggatggatttgattcgaagtgggtaatatgatttttgtgaaagtaaagattggaaatgtgagagaattgtgtgtatttgcaggttggttgatctggttttctttgtttatgagtttcattttggatttgaagaattgggtaactggaattggatcatcatcatcatcgtcttcgtcttcttctttagctgatggtagtactcttcttcaaccttgttatgtaattcttttcgttctttgggcttggggcggttttcagtctttcttgatccttttttatgtgattcgtgaactgaatttggatagaataagatttttcataacaagagaagaagaaaaggggaagaacataaagagatatgcagagtagtgggagtggttctaggaatagtaatttgccatctttgcgagtgactgtgcctcaacaatctcttcggcgactgggattgtgttctcagattgctacagctgctggaggccaacactcttcccccattgtcttccctgagaagcagaagcgtagcagggtgaagagttcgaggcggggaggtgatgccactgcccctacccctactgatgatcctgagaaacttaatacttttgagcataggattgacattggtggaggaccaggtgctggtggtggagatgaaaagtctaatttgttgggttatgaggtcttctctggaaagctaattttggataagagaaaacctgttaatgttgatgcaacttcatctgaggcacaaacacaaagctcctctagcgatatatctaaccaagaagctgttaatgctaggcttaccagcaaagctttgatatggggttctcacaagcttgctctggaagatgttatctcggtaagaatcaagatctcctacatattataaaactgaggtgatggctatgtgatatgccttatgaatgttctttggaagaggcaagttattaatcatttttatttttcacagatttcatacaatgtgggtctgagacattttactgtgcactcttacccctttaaaaaaggtgcttgtggcttttcttgttttatgaaacctcgaagagcacgcaaggactttcgcttcttggcttctagtgttgatgaggctgttcaatgggttggaggctttgcagatcagcagtgttatgtaaagtgcttgccccatccattgctctcttcaaaaaagcaagcatcttcggaattaattccaattgacactcctacagagttgattttcaaatgtaagagtccaccaaaaatgcttgtcatattaaacccgcgatctggacgtggccggtctagtaaggtttttcacaagattgtcgaacctatatttaaggtatggtttactgacattttcttctggtttcttccaattcctgcttgctgagatgaaattatgacattccaatgctatgcctacttctgcatgtctaccttttcttaatttgataagaaatgagctctattgtattaaattaaggaacaagtaaagcaaaacagaccagctgaggcaaagcacgtaaagctaaactcacaaaacccaaaaaactgacacaacagtagaaatttgcatgtctacctatttgtgaaagcgtaattgttgtcagatttttgatatctttgattaccacgttctttatgatcaaagtgcatttcgtctacatgtttcttctccagcaagttactaatttatgggctgcttcttatgggtacggccaatttccgttagaagagaaggttccataggaactattattttttttcctattttcagggcaatttagcactgattgtctttattgaattttctatcccttgcttttttaagggggagtaatatcagtcagttgtgttttaaatggcactaacatcatgtgatgtttaatcaaagagattattaacagttatggattcttttaatgataatacatcttatacttaccatgcatgcagtatgaagtgtaattaattagttttttttattgcttcccctctatcccatcccaccttaaatcagcaaaggggcagtttctccttctttgattgccatcaattacatatacaattttatcatggacataaaaacaaggggcaggctagtaattttattctggccctctgtcactccttcatgcagttctgttattattaaaatttttgcaaattgatgtagctgtttgcatctaataatttgtaaaacaattattggtagatttacagtttaacaatgtcaaagccttaattattcctactaatgctaaaattgtttgacaactaagccttgcaatgacttcaggaagactattgttacattttctgattaatctttataattgctgaggaagttttttatatttatttccttactttaccttccaaatttcatgtagtttcttaatcatataaaatctctacgtggagctttttcatacttatttttatgcatatattcatattcattttcatattaaagtgtaaactgcgacagcttgcaggtttcaaattggaagtagtcaaaacaacatctgcaggtcatgctagaacacttgcatccaccgttgatatcagcagatgtcctgatggtactaactatactgttttatgacttattttcatctattacatctgatttgtgatttagcaccattaatccatttataccctcagggatcatatgcgttgggggtgatggaatcatcaatgaggtaaaccatttgctgctttaaatcttttagttttcttattctttaaaaaagtgtaggatattcagtgtcttctcgttcattctatgtttcttttctatgataggttttcttttaagccactgtaattttagttaaaccctaggattaatagggtgagctagaagatattaaataacaagggcatttgagtcattgtattggggatggttttgtgagtgagaataggctctatacatatgtaagtatggaaagaattgggtatgcaatgtattgagtaaaactctatttgcatcaaaggggcctaagggctcccatagtttgtaatacaatgactaagtatacccgtttttttttaatatctcctagctcaccctactagtcctagggcctaacaaattctttggcttagacaaagtctacatacttaaacatattcttctcatatttttattattgctagtttctactacctgttcaaagatattttaaaatcaacttatttattgtattgtgaaagatattactttcttttggagcaggtgggattaccattcatgtaggaagaatgtatttattctttactgtttcattaagagaatttcaaaattttgatttagattcgtcgttttatattcaccaaacatgttatcttatataatgtttcctgatgtttctaagtttcttaatcacagtcaagtggttttccacttaggtacacagactgtaattcgtacattttaccactgatagatacacactgtacactgtagagaaatgtgcttgaggtgttatagaagtttaataacatgaatactctttgtcaaatctccctactttgccaaacttaaactttatacttttgtgtttgtttcttagaagttagaattcagtgttcctcttttccttttctaccctgtagctttcacatgaatagtcttatactatatgtgttccgactttacctgttctttgatttgatgttatgaattgtattagatttcatttcactattttctttcttttctgcaagaacttagtgtttctgtcacaggttttaaatggtttactcagtagagacaatcagaaagaaggaatttctataccaattggaattatacccgctggctctgataattcacttgtttggactgttcttggagttagagatccaatttctgctgcaatggctattgttaaggtatccattcagctaaaaaagacaagctattaattttgaatttactttctgtccatttagatttcactgttttcagttatcatatatcataaccttgagtgtggattattctttaaagttggatagctatacaagcacaagtctacatttctatgtaattacttactgctatgcttttatgtggctactgatagacaatgatgtgtttatataattattgataatacaattatgagtacaataaggatgatgctaagtcttaggctttacattatttttattatgtattcctgattaatcctagttagtacttaaatatacttctctctgtctttcacaagtagtgagggcagatctacctcacttgataagtactcttccagacagccaattcctatgataacttttgattattcctagttagtagttaaagtcttgttcaaaaataaattaataaataaataaaatcttctaaaattggcaataaacatgttcttgaaatgtaggtaaaccatcaatagcttttacttgaatatcaagaacaagaagtctgtttctattatagttgatttaggatgatattagtccattagtattctttataaatattttcataaggttaggaattaatttatgaagcttattatgtaaatgggagccttgtgcactgtgcacttttactacaaattggtaagggttttctaattgtaatttaatgattatgctcaattccagtgataatttttacacaattacgaatagttaggtataatatctgtctgaatttctttaaacttgttaagctgtgaaaaagtcttgaatattttttccttaagattttatatatgatatttgccttgtacccagttggaaaatattatgtatttttttgtttgttccagggagggcttactgccactgatgtttttgctgttgagtggattcagactggtgttattcactttgggatgactgtctcatattatggctttgtcagtgatggtatttccttctgccttaagacagtattttctatatgagaatttgttggtttttaggggtcaatgcgaaagaaatttaaaggttctcagtttttgcataattttttagaaattatataaaaatatcacgaggtctaaatttttcaagaaatgtctcaggtttttccatttctacaaaaaatttaacctatccatttgaaagattttagttaggcactgtaaaaaccaaacggcttcattattattattattattattattattattattattattattattattattattattatatacatagtaataaactgatgcaaaatggcatagtttcaaattatcaacaccctatcattaaacagatgttcggtagtgaagataatgacaattattttcataaattaatttattattctcagaatttcctggacaaccccaataacaaatgctataatttcttccaaatattgttagattaggctgggagtctagtttcaaaaaaaacaaaaaagaatttgacttgtgttcaataatgcatatgtttttttggttgaatgaacata

SEQ ID NO: 296976 - DNA, 724 bp, Cannabis indica
cattacttattaataaacatgtcataaaagtgtgtatcttcatgacgacccaataatctagtgttttgattattaccaagtgcttaataatgctcagtaccaaaacctaatataatctttttgtatctcaaaatataatatagtatctaagatttgtgctagctgagatataaaaaaaatataaataaatcaaattatatatgttagtggaagtagtggtaaagaataattatatatttataattatacatatagtggaaaccaactcaacatgtattttactgttttgtatttctattagaattattattattttttcctggaaattcttacattattaataagttgtagctgttatagtatacaaatggttaataatactatttaaaatattatttttaaagtaatataatccttatacaatatattatatttaattttattataaaattagtaaaataataaatgatagttgataaataaacataaaattaaggaataattacataagaaacaatttttttgtaaaatatttacatttttacgttcaaagaatgtttttttacatttttacggttttccaaaaaataacacgaaaacaacataaaatcaacataaaagtaacatgaaaacaacacaaaaaaaaaaaaacaaaaaaaaacatacatataacaaaaaaacaacaacaaatgaacaaaatttcaacataaaaagaccgtatttt

SEQ ID NO: 296977 - DNA, 2417 bp, Cannabis indica
taaagtgtgatacaaaattaagtgaccaattatgttacgtgtatcaaaaaggtattaaattgtcatggaaataatgtgtagataccataagttaatttataatttgttgaggggccaaattataaatacccaagaattattctaagatgactctataaataggtagtggtccccaatgtattctctccttcccataagagaaaatactttattcttggaagatcaaaaccttctctgcaatctccaacaatggtttcaggttagtgcttccgctcatcttttattatcttcttctttaatttagcaaaggctatagatatatgatttagggttttctatatcaaagtacttttagaatatgtttacatctgtgatatgtatatttcttgagtgttttataaattctaacaagtagtatcagagccaccttttgctaaattgattgaagatctaattatttagtttataaaatttggggattttgaaaattaaggttttttaaatattatgatttattgaacttgatgataaatattctgtctctgtcatgaatattttggtttattatacagatttatatattgttcggattaatttatacaatatataatttgatgggtttgatactatttatgtggttgatattaattttgtttctttcgattacgaggatacgtataagtgtatatcgtttttttttatcttatgttttacttactttcaaaagtcaaaccatgattttatgatgtggcttcagaatttgatgtgagtatataaatcgtatatatatgcttctgattacaatcaatcggaacatatatacatacatataagataaaaataattttttacttgtggtttcggttttagtgcatattctgattacatatatatcagtttctttgttttactcgtggtgatacaatacgcactcttcgagtcaatacctaacttcaaattgcctttcagctttgaattacttaacataaaaattgtcattggttacagtcatagatttataccatcccattcaacaaattgtttagcaagagaaaaacaaccgaaattacaacagaaaaatggaaatgtgtgaggctttattcagctcctctccatcctaacaaactccttcaaccaattgggtcttacgcgcttcctctgtcaacgcgctctttctccttcagctgagttttctgctggagccattgttcccgtgttggtatcttccagtaccccttcttctcctgggctaaagtcttgggctgcctcttgtattcctttgatagcctcttttcccacaacttccaagtccaatgtattgggcccccatcttgggccgagtccacttctctaacaatacccgcctcctcaaaaataaccttgtcctcaaggttgtgcaacccataaatattgcaaaacgaatcgaaattctcccgtgtagagtcttctagaggactcatagtccattggactaaaacttgtttgagcggaccggtgcgactttgaatgattcttgtcgccaagatcgcactaggcaacattaccggtttgttggccaccgtgagctcgggtaaaggataacatgctgctagtgtgtttccatgatatggttttaacaacgatacatgaaacgtgggatgaatgcggctgcctggaggaagagccagcttataggcaacttgtcctatctggccgagacggcaaagggtccaaagaagcgtcgacacagcttggcattttatcgcttagccaccatggtctgtctgtatggctgcaacttaacgaggaccaaatcgcctaattgaaactcaatgtctctctgctttttatcagcttgctgctgcattgtattcctggcttgctgcaaatgagtcttcaagtgctatagaatgtcatctcgagtaagcaaatcatcttcaactacttgtattgtagtggccccacgagtgtaggctagaattgttggcggaattcgtccataaacggcttgaaatggtgtcatcccgatgactgagtggtggctagtattataatgatattccgcccataataaaaagtttgcccactgctttggattgtccgctgaaaaagcccgtaaatattgctccaagtatcgatttgtgacttcactttggccatccgtttgaggatgataagaagagctcatatgaagtgaagtacccattaactcaaacaacttcttccaaaaggcacttgtgaatattggatcccgatccgacacaatggttctgggcagctcatgcaattcaatcaccatatttgtaaacaattcggcaactttagtcgctgaatagtggtttggaagtgcaccaaaatgggcatatttagtgaatctatccacaacaaccaaaatgttagtagcaccattcgactttggtaatgttggaaattatttt

SEQ ID NO: 296978 - DNA, 1865 bp, Cannabis indica
tatcaatcaaatagcttgcagcaagctgagtttcacgaatcttgttcctagctttgctatctggaactcccatcttctcaaccaaaaccttaagagctgcttcagtgggcaacccagtagccctgtaaaggttcccatcaaagtaaatcccagcatcattacaaacagcacatatttcagcaatggattgcaaattaggatccatattgtagcatgtccaatcaactatcccaccatctttgggatcataagtagtcccttcaacatgaattattctagaggcagttgtcttccctcccaaagtgaagaattctgtcacagccatctggtttgttgtcaaagtcccagttttgtcagaacaaatcacagttgtgcatcctagtgtttccacacttgggagttttcgtacaatggcattcttctttgccattttcctagttccaagagccaagcatgttgtaataacagcaggaaggccttcagggattgcagccacagcaagagcaacggctatcttgaaatagtaagtacatctctcgaatgaaaaccgaatatttgttggctttccatcaacaagatcccaagacagaaagtttttgtagtttataatccaaactacaagacaaacaaccccaattgcagtagtgagcctgctcccaaattcatcaagctttttcttcaaaggggtgtcactctcttccaaagaagcctcatgtatttgcttctgtattttaccaatctcagtgttcatcccagtgctaaccacaatacacatacagctcccattgacaacagttgtccctgcaaaaaccatgtcttctttagcctgcaattcacaatcatccatgaaaacaggttcagttcctttcaaaacaggattggcttctccagtcaatgagctctgctcaactcttaaagtagaagttttcaaagctgcaactctcatgtcagcagggactttgtcaccaactcgaagctccactatatcaccgggaacaagctccctagcaggcaaatcgggcacgaaatatccgtcccttaaaacttttccagattcacattgcatctctttaagagcttcaagtgctttttcagcattactctcttgccaaactccaacaatagcattgatgactaagatcaagacaatcacaactggttccacataggcctcaaatccagattcttttgattcagttccatgcatataagccaaaataaatgatatgaaggctgcaactaaaagtatcttgacaagcatatcatcaaactgttctaaaaccaaacgccacaacggctttcctttctctttagcaagttcattccagccatacctatcacgacgcttctcaacctcataaccactcagacccttatctagtttcacattgtattcttttaaacactgctcaacagaccaggaccaagctgggaatggcttttcctccattgatgatgcttctttcttctctccttgaagttcaaatttcactccagaacaaaaaagagttaaactttaaaattgactcatcgtgaccatatcaaattcctacagaaaaagccaaaaacatgttacagaaatcaacagctcctgaaacaatcctaactcagtagaatatgaattggtttaattaggagagaagaaaaaataaagtaaacaattttcaaaaatgcaaatgaatgaagaacagtaattaacttttggcatcgtcataaatcaaattcaaaaacgacaaagcaaaagatccaaagacgacataattgtttacagtttttctagtctaccttgattatttttagttatagaaaaaaaaactgctcccgctccattcccaaaaggaacgtttttttttttttttgactaa

SEQ ID NO: 296979 - DNA, 3619 bp, Cannabis indica
tatacttatatatatatgagtaataagtaagttaagtaaactaagtaaaaaaacaaatagtaataataggaaacgtaacgcaaattaaatatagatggctataaaagaattaatatattaaactactactaataattaatataatataaatagtaggccatttatatatatatttacatacaggcactaactattaatttaaacaaacaaacaaaaaaaaaattgacaaagtttgagttgagtgattaatggcttgagacccccattgacgtacgtaggaccattatatagatctcaaatgataaatgggtcagaactcaaaatcatggagtggctataagggattcgggccacacaggcttggaaaaaattaaagggtcatgtcctgatcagccaagttatagtatgtggcattgattttcatttcagacagaaaaagactatatttttatttatatatgttatttacataatacatatgatcaggccacgtgattttactattagagtcttatgtcgtaatcgatgattgatatatataaatttaaatttatatatgcagctggcttttcgcattttgtacaattccagtagtatcatttttttgtcgctcttaagaacttctaattaattaccctttttaccaccccaagcccccgggaaaaattattttctcgtattaatatatccctaattaataatgtatattatttcttaatttttcatatatatacagttgattttagaatttgggaataagaggtgaatgttccatctcaaaaccaattgtagtaacccattattcttatatattttattatcttttcatacattaataatgttggactctcaacagtttataaatattattgtcaggtattgacaaaaatgagcatttaattttcttcatataattatatatagtagttaccaaataccatgcatattgcacattattattttcctttcttatctttagttttttgttatatacatatctcaagttggtgtatcatggaacatttttatagataggggtatcttttttgtttttctaatttttaattatgatatcagcaaaaaatgttgctagctagtaaggaaaataaagagagatccatttggtgttttgttccgagcaatatttaacacaaaaaaaaaattatgaaataaaaaaatataaaaaaaaaactaaaaaggagaagaatccattattagaagggacccaagaaaggttatatataggggtctacatggaaccgatttttctacttaaaatgagaaaatggctctcgtcgccaactaaattcctcatttatgtatatttatataatacaatcgtgcagtttataatatttatatatcgcgatgttatttttttctttgtttttttcttataggtccagagtagctggttcatttattgtggcttttgatgtcatgtataagagataattattagaaaatggtaagttgtacgaatataattcttccataaaaacacacataaatatatgaaaaataaaaagggtcaatcaatcaagcccagctccctcccatataatatatataatctagatgagcgctggggcaagagaggaagggaaaatataaaaataaaaataaaaatctgttgtggggtttattcaaatcttaataaagtcatgagggcttactgtcaagcacaaagtataaaagacaacaaggaagacctagtctccccccaagtaaagcgatatatcaaccctaaaagagtcatataaataataagaatatgatgatgactactgtagattcaatcaaacccatgaatactactgttactatgtatgtgtgtatatatactttcaataattaaactgtacgtaaccaccaaaatatatcttaatactattttcaacctctcttgcatcaccattatctagatcgatcatatgctagctagctagctcgcacacaaatatcctaacaaacatattcatggtaaatagtcctaataattataaggataaaattacaccaaaccattttgcactataacatgtgatttgaaataaggtatgaacgtgtaaaaacttggtacacaaattgatgttactgttatctgtcgttattcgtatgcatgtaagataataataataatatatactattggttttgcttctaatataattaatttatgttattataattaattagctgtctaaatggtcaatcaacgtcgggattgttttctaatacaaactcattattgcatgaaaaccttgtgtgtagcactttatcaatcagttgtcgtgtggaactcgtagtagtgattaatgctttaatttaaaacaaagaaaagatgcccaattctttaaggaaagtttctctgccaaaccatataaatatttatatatatatatatatatatatttgaaatcggttaacaagatgaggattatatttatatatatgtgtcacactagtatagaattctaattaatggataaaatgcatgatttatagagaatagagagagctctgccaaatataataatataatgctttctttcattataatttaggggtttcttcattttcacagtttaaaagagtatttttttatatatatatttttaccgaatattacataaaaattcttattacaattaacgaaacaacttaaatcgtaatcatatagaaacccacataaaaattacccgaaaaaccactttaaaaacctacaccgtaaatttaaaataaaagtgaaaaagaaataatatgtaaagtaattttttttataatttattcaattactttctgctgaaagacactattttcgaccagtattgtccatttttactttatacccttcatttattataatttttaactacttatatatatataaatatatatatatatatatatacagcatatatattttcccaatacagacaaagaaaagctttatatatctcatctattattactttgtaatttgcctacctagctgacccttataaagggtccttttttttgtcaaaatgaaattgttggaactacactagggaaacttatctccatacaatcacgatatatatgtcctctcttctcttgtgtacatgttgagatgaattatgatttatgaatatgaggctgtggaggcttaaggaggacgaccacagccagcttttgtccaactcatgatcaattatgaccacgttaaaacaaaaatatgtatatatataaatataatttatatttatataaaagattgtttaaattttttttttaaaaaaaaaaattgccacacgtaccaatatgacaatcacttatttattattaataattatttttgaaaggacaacacactcgttaagtacaaggagctagctttggtgttactacaactacatggatcaaaactactattacctttttgtaaaatcacactactgtttgttttcctttttatttcttctctctctctctcaacttacacgtacacatacataaagccaactggcagttttgattcattcacaaagagatgaaataattaggccaaaaagatatgaaaaaaggacaaatgtaagtctaggatttgaatgcgtattttcttggtttttctcct

SEQ ID NO: 296980 - DNA, 7100 bp, Cannabis indica
aatacacctcctaacatatacttggaatggaataatataagcactattcagttatatcacagtgtcacttccgtgatcaatctctagatcaactttacagtgacgaaatcgatacacaaaagtaaactcggggcatctctatatatatatttatattatatatatatccataaaactgtaaacgaataataaaggtgtaaagtaacgtagtgaaaacctttaacaacagtagaggacggcttatgcttcttgcttcctttccttctttaaccacttgaccttctttccccattcctccattttaaccttatcatctaacaaatagtatacttctaacatctacaactcccaaaacacgaaaacaaagaacaaagaaagagtcacctattttgcttgcaacgaaaatcagctaaaagggcatacattattacgacgacgatcccaaatcttacgctccaacaagcatcgtgcttgactcgcatctgcccacgaatggtaatgccaagaatgacaacaccgacaaattaggttccaactttagcattgacatctgcaaaaatcacttcttgtacacctcaagaaccatttgagttttttgacgaagagagcatagagtatagccatctctctgtcaggcagcccaaatttgtcagtcactctaagcttaatccagtactattcttattaaatattaaattgtgccgtaatccaaattctcccacttgaagggggcaacggcaccaatgtctggaaggcctcgcaagaacaggcaaacacagacacagacagcagcaattgcaagcattgaatgaacatacggacgctgcagcagaccttgagaagcgggtacccttcgataatactttgttgctgcagctgcgcacttagcacaagatctcctactaccatgttgatattcagtactcattgtatttccaactgttacagtgatttgcccattcgttctgtcatcaagtttcctcgccaccagcttgttgtatgactgattgtttgtcatcacagcatatgcatatggagactgaccgtttgcatcgagaagggaattccaagagttcaagccaatctacagtagacgaaaaggtaagaagcaattactttttgaaaacaaaatttagaatatcttttgttttaacagatttaacggaaactacctcctgtggatcatttgtcaatgcatcaatcatttcatctgaagatgacatacaagcagccaaatggagaggagtaatgtagccaggcccaacatgatttggtggaaaaatatatttcttcgagacaacatcagagccaataactgagtaatttatgagcaggtcaaccatcttcttacacttcctttttactgcacgatgcaggagctgaacctcagaaagcatctccactgtctcccttgatagctcattctcatccatatttctttcaacaagtatgtccagaagtgttttaatcaaagaagaacagtttctttccacagaaaatgtgagcaaaaatttgaaacgtccgagtgaataacaaggaccatttagaaaggatgaggcccttttgcgttggaacagccaaccgagttcatttaagaagtgaagaacttcctcctttgaactcggtcgcccatcatcgtgattttcatcttctgctatgacttcacttacttttctctccccttgaaaagtagactcaagaaccttcaactctttacagatagaagcatcagctattatcactggaaagctattgcccttgaaaccattttccacctgttacatatattgacaaggttcaaaagtggaaaaaaaaaagatagaaactgtacgttttacataaagggtacatcgaaaaaattatcagagttctacctcaatgaaacagcggccaaacaaactgggagatgcatcatgagttctaaaaccacacaagcttatctcctcatacatggtgccttgattagtagataccctaacctccattgtcgtgtaaacacccttgtcagtgcaatgaatcctacaataacacaaactggtaagtctataaactcgcagaagatattaacaatgcaaatccacaaaagcagtctgtacttacttggtgcctagagtgctcagatttcttcctctcaatataagggaggtttctcgcccccctacaacagccaaaggtgtaactgagataagctctggtgaactccatgtcttccatgatttgcacagccgaaacttccctgatgattgatttcacacaaattaacatcaaaaagttagcaatcgtctgtacctcattgattccacaatcctagttctcaattgtaaaatggtataatccagtcagcaaatgaaatgacaaaaagatctaaaagccaccacttcagcttgtccttaccgtctttatgagatgctaattgtctgcctgcatgcaccaaaaatcttccatttctccaaaaatcagaagctgaactatgtaccaaagaactgagacgttgaagaaggttttcttgaagctgcacaaatttcacaatcattccaagtgtcagttaaggaactataaaactactaacaaacttgctatagtatcaactcacttgttcccaggcagctgatggcattgaaacataaactgatagaatgacacatccaggtcgtatgtagctctccatttctgagggactattagaaagccaattgaaaatctgggtggaaaaattgttgaaaagagttaaattaatactagcaaggatgacattatagtagtggtagctaggccaacaattagccacaaactccgcacctgtgtcctcaaagtcccagggaaatggctaggatccttatcgaatagtttaaacaatattcttccagtgcgatcctgttaaaagcacactcattaattcatattgagttaaaaaggtttatcgtaaaagctaaacagatttaaatgattacaccagtattaagtcgatgaaaacaccacctggacatcagagttcaggctagaaggtgaatgatccgacccagaagaggtgtacccagcttgatgaggaacactttggatggaagcagcttcagttcctttgttggaccctctaaaaagatcaaagggcatgttacactcattaatcctgctagattcaacattagcattagtttctctgcttgctgacatcttctcggacttgacagtttctgccatagtctgcatgggaaacagcgtctgcataacaggaggagaagacgacggagatctctcttcaatgggattactgctgtcagatgagaaatacttcctactagatgccagttttggcgggctatcagtctcaggggacgagctaaagagctgtaggggtaagttcacacgtgtttcttgagcctggcaatcagaatcttccatgggagactggtaactggtactgcttctatctcccccaagtgaaggcaactcttgaggagatctcttctgcaaaactaaactgttggcctggtcgtggcagttcaacttagtcttcccgctgtcactgctggggctgctcctttgagataaagttgcaagagcatcgggagcagatggtgctagagtagccgaaagagcagcaagcaagtccatggtagactgagatgctcttccattcaatttatcataatgatctgaagacgtttgatctggaattttcctggacaaacttgccagattatgcaactttgcggctaggtccatcggcaaaggcagtgaatttatcttgctaagaatttgaaggagctgctctttgtccagtaaaggcgagcatatcatatttttgtcatcatttttccctatatcacgaatcgcagcatacaagttcagcacaatatcaacgagaatttagaatacaaagcccagaaaaacacactggagcgtgatggtttaccttgtgcgcgagccacagcagccaacaagttaaagatatccaagtgtccgtttggttttattgtctcgatctccagggagcagaagtctagagccgacatcatctggttgagttttcctcctacgccggttatgcccagcaagcctccttctacaacttcgcttgccctcgtcaaactctgaaaggggatgaaacctgcacggaccaaggaagaagaagatgaacctcgccgtttcaaaacaaaatcacaacagcagaaactaaaagaacaacccaaaaaagaaaaaaacaagacagtcgagataagcaaaaacctgctacactgctggcaaaatctctgcatctggttggcaacaagagctttagtagatttactgtgaagctcacaaaccttatgtcggcgatggtagtcttttgctgcagagagatcttccttgcagttatcgacctggcacatggggtaggtggtgctaccaggagagccagagcggaccctcttattgggtctggatccaggttcgtccccactagtgaaaccacccccaagattgaggcggagggtggcatcagttacctcaggggttttattcttcaaagtgaccggagttgcagaaggttcttccgtcttggccaggtccgcgttgacagtggccgcgccagagccagaatcaaggggcttagcaaggaatctaaccgtgtcccactcccagaccttaggattccagttatcaacaggattggggtttgagaaccgctgctggaaattaggggtctgatatggaagatcgcgtttcttccccataaccgaaagcgttctatgaatgaaaattggaggagcaacttgcgcacccgcctcttccatctctccggttcagtatataaagtttacgatttgtagctagcaaaaatagaaacaggcgttcttcctttatctatatatatatatatatatatacaaaatctctctatgaaagtcaataggagaattgatcgtccttcataacactaacaaagaagcttaattgatctgataataccataccttggatgttcttctcttctcttacttcaattcaattcaattcaacgaaatctggaaaaagccatgccctttctccgatctgacagttattagtaaaaagcttgtgaagtgacagtcaagtctccgataactgaactaaggattggattaccctaaattgaagaagcttagaagatgatctcccatggcgtcaacttaattctctctcttctttctctctctttctttctttctttctccaattcccaaactaataagaaatggctccttctggttgtactatcttgaccttctaacaaaccttgctttcccacaaaggcaaaaatcgtaaattgaagcaactttgtggtttatatataatatctctcctcaccaagaagaatccaaccccctttcctttctttttcttttatttatattaataataataataataatttgtgtactttttttgttttattaaaataaaataagatttagattaaaagaaaattaagtaaagtgaagcagtaaaaatgagtttggcctctgagttgggttggcttcttctgccttgtgctatgtctcgtctcttggtggccctacttttgcttactatactatgtatctagctactatgtactaagtagtttatgggtgttttcagtacgggcggttttaggcgcaatttacactattattattattattattattattatgaaatattataataatatttaaaaaaaaacattcaacttttaagattataacatatagggaaattttataatgcactcccgtaaaaagaatatatcgatatatctctatttattttagcattccaaaataattttttagtcaaattttttcttcaatagttatgtaaattatagttatttaagacatcttgtaaacatgctaaaaattgtgttcaagcagtatagtgcacgcgtgactattttatttatacgcgtgtaaaatagactgtttgaacattattttctatattataaattatttcgaatttctcaaaattttgtaggatatcttaaatagctataacgtacataatatgaaaaaaattaaactaaaatttttttttgatgccaaaataagtaaaaagtgtatcagtacatccattttataggagtgcattatagaatcatcctaacatatatactaatcaaatcattgtattaaatatgccactaaagttagcttagtaacgagagacgagtggaaaaaaaaaaaaaaggcatgaattccaactcgagactattaaattattagttgatagactattacaccacagtaaaaaaaatcaaatcattgtattgaattgtttttgaaaaattatataatgtatatatatcaataataatattataagtaagaataaataagaaataaaaataatttatatgaatgtttctttaaatttaattatatgatttgagtttcgtaaacatataaattattcatatatataaaaaaaatattaaaaattaatattttgtaatatataatgtagtgcaatttgaaatgtaattattaaattcaaaattgcaaactgtaccgtgcaattcaatgaaaaatgcaaaccacaccataaagaattgtaaacggtatttttttatgcagtgtggtactgtggtgtagtgcgggcaacttgtatagtgtagtcgatttgatgaattgttggaaatattttactaggatctagatttactaacaagtatgttgattaacatcctaaatataaatatctctaaaacaatgaaattaaagacataagagtttaagaagaccttacattgattgcagcagaatataatgactctttccgttcaagatctttagcccttgattcctttctgtagcagatttgaaattggatctctttctctctttcgggtttggttaccactgtcttattcactatgattgagtatttgacttgctatgtgtgggcatatgacactctttcactaagggttcgaatatggtgaacaaagaaaaatgtgagttcactatggaaggaactctctcatctactagttgtctgacatagaaaactaggtttgatttgattgaaggcatcaagtaaaattgtcaaaagtggatgagtaagagcatcatgttccttttatagtgtttcaacta

SEQ ID NO: 296981 - DNA, 5016 bp, Cannabis indica
aataagaacagaagaaacaataataaaaaaacaaaaaatcagaagagacaaataattttttatgtggttgaggtattaactagccttagtccacgagtcaattttttttagtgatctatttacttgtaaatgctctgggagatacacacaatgtatgtttgtatgtttgcctgagcaaaaatacgtaagagagttcaacccctaatccataagattaatggggtatttatagtagttggagaattacattaggattttcctttttccctctactagggagtttacaactgaacaatatctttgggctttctcatgaagtccatcccatgaagagtacaatttgttgactaagcgaattggacttaggttgatctggtcaaaatcgtgtccactaatagtgggcagttattttggaataactacaccacacttgttatgggaagttcccctttaatcgcgatatgatattctggagcaatctgacagctggagtttcttaatttatttataagaaggaacgaatagggaaaccggaagggtcttccgagaaggtactatcttatcctttggcctcataatactggaggtgtcttctgggctctatccgtcaagggcggaagactctatgagtacggaaccaagttagctccaagaaggacatacccaggtgggcttggcccactttatcattgatgagggtcccactgattggtcttgaattttcacctagaatccacgtgtccaatggcaaaaatgcggataacatttaccccaagctttcaggatgctgcactaggtggaagcttgctctggtctcttgatttggacatgtggagattggagaatgaagtagtgatatttcacaggctacttgaccatggaactgacctccacttgtgattatgatgtatccacgtggcagtcgagcatgtaaaaaggtgtggttatcgaggagtcatcttctaggaatgactacattttgacgactattcactggctggcatgaaaattgaaaaagagcatcttcatcattacttcacatctttattctatatagcactaaatgtgtggatacacatagattattgatctccctagccgttggatggagatcgtgcttgtgaagaaaagattgcagccgtccactccttcttcacgtggatcgctttcttagggtataaatacccctaatgacctccagttaccacttttagctctctgttcaaattttcaacctttcaaagtgcacaagtcttcttgccaccccaaaacttcaaatttctctcgagaaaaatccttttttatcaatctagaaaatgtcgtggacttctgttttcatctcttactaaaaattagggcacgagaatatcctcatctcctttctctagtgatcaagtcggctacaacaaaggaaattacaagcctgaattttgaagcagaaattgactcgctaatcacctcagtctcttgtcatcgcgaaaggtgcaatcaacttcctgagccaaatccaacaacaatttgaattctccattgtcaacatcaggtatttagatatataaatattttcctatggaatgctttttttggattcatcatttggcattgtgtgtgcatactatgttatgggttaaaattaggatttcttgattgcaattctatccccttaggaagatttagggattatgtattgtacaattttttaaactacttctcgcttagtaagtcctcgagttgatcaatttgcaccatgaatgtttgcaaattcttagattcaccccaaaccactctagttttgggttcgatgttagattttgtcgtctctcttttctcattgttcctgacttcttgtctggaacaaggaacttctagaagttatcatttcttggtagcgagtctagttgggacctcttcaagtagtttatgggggaggacccccagctccctttctatattaggtagttagggtagctaactgcttggatttccttctttctgtacaaaaaccatgactaagcgttctcatcgaaagaaatttgattctgaagtgaagacaatggagcatcaagaagcttcccaattggtcctaaatgacagtccatgggaaatggaccagtatgtctacctgttcataaattacaataacttgaggaagtacgaaactcaacgaggacttgagagtgttctggcactgttctggaataagctctccatgctcggagagagacccaaaaaatgctcagaaggaggctttggcgtatggatttgggttcacgtcgagatgggggcacacctgcccttgaggtgctactttgctgagttctgtgcagtaatgggaatagcacctttctagcttatatctcaagcatacaacctactctccagatggtatgtcttctgtgtcaaacacagcaaatctatgcctacaccggaagaggtcttgtatttttaccaggtcaagtcccaaccaatgagagaccataaggataaggtgggcttctacaggctgcaaagatatagaaaaaatgtctcctgccccaccagttccatgaagtacacacatgacttcagggactattacttttatacttccggcttcacgttaaggagggttcctaccctcagtttagacttcaatcttgcaagtaagttctgactccgcctttgactcacaaaattctgtttttcccttatgtttactgtgttatgatctgccactatttgtatgtgctagactgccttccccaatctgccctaatcccagagttggaagagaaggtcaacttctataagtctttctcacctaaggagttgtagatgaaaaaactagtgactacgacaaatctttaggaattgggtcttatcgccccacactaaatatagatcacctatccgtgacggaatcggtccaagaatccttaagaggggacccgaacgaagtcaaagagaccattgcagtgattactattgtggaggactacttaaaggcgatgaaggaagatgagtagtggaatgaggactagaggagatagttcccaaatagcttgagggaggctgaagagctttccatcagcttcaaggatgtgatgcccaatgaaggtgctccgagagcgagcactttcggtagtggtgagatgccttttcatataattagggctcccactatgtctgatttagagacagttaatcaatgttgatttgatccatatacttcttgagtttagattatatgtattctttcagtagatatgtagatagagtagactctatcattcgaagtcctaaccatttcatccctcctatgcaccatcatgtcagaggggatgcatttagtgaaatctacttcctaagattcttccaatacgaaacaaatttaggttgaaaagatattgctctgtttgccagaggaaaagtcaattatgctaagattaatggtttggaccctcttaataccttgcatgataatgtgttgtaaagttcatgccttttgttataatcttttctttttatgaatgttttgtttgttttgtgcagatcaatcagtcactcttcaaatgggattgctaaacaaattcttgggcagtgtcaagacccaatctgatgagattcgagaaattgcccaaggtggtggtgatggcagaaagaagaactaggcctctgggagcggatctcaagagccagcacctctggccttgaatctggaagttgctccaaaggctctaggcatggaggttgcgtctaccgccatcatagacttaaccaaacctgctctattaatagagtcgttgaatcaagtcccacaaacaaacatacctaagttgttttggctcatctgcagttggctctcttgtatctatctcaaacttcatggctagatgcaagagtctactggagtagaacattttcacaaattaaggtgaaaatacaattagagagacaaatgctcacatggagttacataattgtcatctcttaagaagagatgccttcaacatagtattaaagattaaaggggaaaatacaattagacagacaaatgttgtatttgttttgagtctacaattattcctatttttcaaaataaaataaccattatgtattaatcatattaatattaaaaatattctcataaatattattaaatcaaacaaagaagtattaattaaaatactgacaagtttatgtacctgctttaatcttctcaagtggttagtttacttaatttgtgtttggatttaaacaaccactacaaaaaactgctacttttagtgacaaccttttagtcacaacataaattctttgtgactaaatgtaacttttaggcaaaacaaaaaacttatgactaaaacatattatttagttacaagctgtcactaatttagttttattcataataaatattgtgactaaaaacacatttagtcacaacaaattgtaattttttgtgactaatacttttagccatgggcattttagtcacaacataataatgataatttataattagccacaaatttttttatctttagttacaaattttgttgtgactaaaagtaagattttttatagtgaaaacgaatagactgttgtgagatcaaaatttttaaccaaaaaaaaaatgaaaacaacatcaatgtatattgcttagaatcagtggcggacccagaatttaattggagggtgggcgtaaatttttttcatatataaaaatattccaaaaaaataaataaatataaagaaaaacataattcaatatttcaattcccaactaaaaagatattaaatatcaagcactaaaaatcttctaatagaaaaaaaagcaatctaaaacaatatttaaaatatataacatactcaatatcctaaaattttattaaatatatcaatttttgagctcatatctttagagttgtcctcgacgagttttcatgttttgaaaacgatgaataataagctcgttgtcaatagcattgaatacactctttttgagatatactgtcaaactatcattcaactatt

SEQ ID NO: 296982 - DNA, 2782 bp, Cannabis indica
aaaaataaaaaatttcagcaaagaaatcgaagaagaaaggccctaactctgaatctgatgtcatacgaacgaagtcgattgatgttgtgattggaacaagacctctagaaatgtctgatgaagaggatgaacatctagttgaaatgttggggagaaggattgatgaatcgcacactaaacttcaggatgtgtttcagcctccattgtctcccaaatcctctctgaaagagattagaagaatagatgaagctcaaaaggacttactgcatttcatccacgcaaatgagcaatgtaacaatgctctaatccaaggtaagctttcgactccccctgttcttaaatttggatctattgtacggaatttagagcaatctttgaagcaatctgaaggagctagaaaggttaagatcactctagatgatattgaggaggaggttaatttctggaaaccatccatagtatgttatgtgttgggatcgaaccctctcttacacatattgaaaggttttgctaacagaatctggaatgacaaaattgacaaagtaataatgctaacatatggtatttttatcataaggttcaactctatggaattcagagatcaagtccttaatggtgggtatattttttttcaatagaaggtcggtaataatgaagccatgggatgcaaatacgaactttaaaaaggaagatgtcaagactatccccatctggattcagcttgaggatcttgacctcaaatattggggacatatcactctttaagatagtaaggcagcttggcaatcccataatggttgactctgttactagggacagggatcgacttaatttccccagagttttggtggaagtggtaatgaatgaggagttccctagtatgctggaatttgaagatgaatttggcttgaactctaaagttggtgtcaaatatgaatggaaactagtggtattcttacactgctttggtatggggcacatgacaaaggactgtaaaaagaaatcaggaaccaaacaggagtagatgatcgaagaagatagaaggaaggaaaaacccactacagatgaagatggttctaaagttgtatccaagggggaaaagatcaaagaacaaaagcaagcaataagtgagacaaaggttgttaatggcttccaggtattaacagaggtagctgatgagaatgtgtaaaatgaattggaggtgccagggactgcagaagtttataacacaagacagggggaggtccctctcttggctatggataagtttctagtttggaatgttcgaggagccaacagccagcaaaaacaacaactcatcaagcaattcattagaacacaaggtgttgggtttgttgggcttcttaaaacaagggttaaggttcataagattggaaccttgtacctcaatgtgttcaaaggatggtgctttccactaatatagcttggcacttaggaggaagaattgttatagcttggaagccactttgatttattattgacattatcaagtgcacaagtcaacttatgcaccttaaaatttcaacaataaatggaagttatagcggtttcatgacagtagtttatggctttaatgacagtaatgggaggctggagttatggacggatctttcctctctagagacaaaagaaatttggttgattatgggggactttaatgctataattgccaaggaagagaggattggccacagagtataataccaagttgacactgagtttattgagtgtctgtttgtagcactggcaattggaagatgttagggcttctagatgcttctatacttggtccaacaagcagcatggtcaggatagaatctattcaaaaattgatagaattctagctaatcatgtttagtttgattgctaccctaatgcagaagctctcttcttaaatgaggggacttttgatcacacgccatgaatcttgtctttgtatcctaaatggaactgtggaaaaaagctttcaagtacttttgtatgtggaaaatagatcctgagcacaatagaaggattgctgaagtttgggggaaagaaataagaggcaccaacatgtaccagatagtttgcaaactaaaggctctaaatcctgtcatgaaagagatcaagcttctctgatctgcagactgcttcaatacaagccaaaataaagttagaagatattcaggaaaaactacagaaagagccattaattcctatgctgcatgatcaagaacttactgcaaggactgaactaattactgcatagaaaaactaccaatcattcctgcaataaaaggccaaaattagttggatccgagatggagatagtaacacatctctattgcatgctggtattaaataaatgaacagacagaatcagatcctttcaattgaaacagatgatggaacaagggtatttgaacctggacaagtcacagaagccttcatttcctactacaagatcttgcttggatctaaaatggcaaatagaaggaaggtatctaacaagatactgagcaaaaggactgtattaaatgctgaacaagctgccatgctaacaaagagtttattgaggaagaggtaaagaaatttgttttgagatacctgggcgcaaggctccagatttagatggatactcgagctttcttttttcaagataattgggaacttattaaagaggatatctatagagcagtaacctccttccttgaatcaggcaagattctgaaggaaatcaatacaaatgccctaacaattgtccctaagatgaaatttacgt

SEQ ID NO: 296983 - DNA, 6877 bp, Cannabis indica
taattagttacaacttttttattatttttatttttgtagtggctccatgtttatgatgacgatcaagattgaataaagggctttgtgtattcactcacttgtgtgttcactagttcttgttatgttactcttgttcaagtgtcattttagttctaattgcattctgtttttctagttttggatcaatcttgttatactgttttattgcagaacagtgtgagttcaagggtgaggtttcaccacaaaaatgaccaagattttctctcttttcttgttatggtgttgtcctaactattttgttttcaccaaaatccaaatcctttgttattatttaggtggtaaagtacaacaatgtccttgtatgaaatgattactactgcatatattatacagatagaaattggttgccaattgtgagtaaaatatttctcttcttccaagttccaaatactgtactttgtagtctattctggtactggatttgtcttattcggtctactcacaacagacaaataacaattctatggttccaccaaaaaattattcaaaaagtctgtctttctctctgtcaacacaagtgtctgtgatgacatttttgcccctactccttaatcaatgccttgtttccagctttacattacatgggctctaccacaattttatacttcaaaatcatttcttcatgccttttactttttcacttgaaaactgtttcttattcctttttaaaacaaatcctttatcaaaagacaatgatctaggagaaataataatcacagtggaaaatgcaagaaaaagggaggaaaaaaattattattcccttgtaatactttcaatctaaaagtggtaattctaagtttctataaatataaaatgagtaaataacgatataagtacctaaagttttaaatttataagtggcataaatttaatatttatttttagcagcataagtatccaatatttgtaaaattgtaatttttctctaattttatcggtacaggtacaagctctgttttaaattttttttaaaaactatttaaaaataactgatactacatgtttatgtctaaacccaataacctagaaattgaaccttatatgtgtcatgtttaaaacaataacaaaatttgtaccgattaaattaaaaaaaattataattttacaaatattgaatacttataccgctaaaaataaatattcagtttatgctgcttacaaacttaaaattttaaatatttataccgatattcacccatataaaattgaatctcttaacacttgcctcccttttccatgttaaagaacaaaaaaatcaaattcattttttttctcttaaaaaattgagttgaattccgtttctatcttctgattgtcaccttaaacagaagagaaaaaaaggtccatcagaatcaaaggaaacaaatgtaacagagtgcgtagagtttgataaaatcttcttctcaactttcactggttatacaaagaatcaaacaaaaaaatcatttgggttatacaaagatatcattttggttctgtagaaagttgatttgtacattggtaaagtgtgaaactccaacaaatagttgctgatggccataggaacacctaaagccgctttcttagcaacaagagagataaagtgatgaaaacacttatgtaaaaattcgatttcaagttataatcttgggcttctttcttgtaaacttcttgtgttacttataagctgtatagtcaaatgttagctatgtttatttacttctgattctttcatcaagaaattgaaagccaacaatgctgcaccaacagcaggctccacctgagtttagaaagtcagttcaactccattacaaacctcaaaagaacagtgagaaatgcaaaaataatgctattattatactcgtgtgacggaaatttcaatcatcatcatcgattctttgtctcataactgcagagatttcaaaaatgcagataagggtattcatgtgaagccaatgactaacaagaacatgaaagaaggtacttgaacataataacctcgatatgataaaactatgaggtatttgtaaggcagtaagaagcattggagtgacactctcatgttctaacaagaaactattctgtggatgcaaattatcctttttatttggatgacttcatagaaattaaaagagagaatcgtatcactctcaactcaggtataatttcttaatgctgaccagtgaatgcaaattatttgaactgatgattttaataaaaatgaagaaaaaaatagcatagaatgataacctttggtcgtattggctgagcattagggaagaatttcttgatatagatcacaacttcgtttccgatatcccaagccctcttcgtttcaaggacaccgccaaccatcacaacaggaaatgagccagtactatctgcaatcaaatttcagtatgcatcatgaatgaagtagttaatgtgatcgtcaagtaaaatctgtgctgccattataaaaaaaatacttcagatatcccaactcttcaatctcacttcactttcttaattcaaattgcttaaagctagtaaacagaaaatcatttgagccaactaaataatgatatcatatattaccttcaccacacaagcgaagcctttcaacaacagccttaacactgagagctaattccttgacagcttcagttagaatattatgtgcaatttgatctccagcttctgcacatgacaccacttctggaacaagtgctgcaatgcgagcccacgatcgatcttcataagtccacctaaatttaatgacactgaattcagcctgaaaatatttcttgatcacaatacatgacaataaaaagtcatttatctattagtgaccatgtttttcataagggtagatttctccaatttaaagactaaacattcagacaaagcaaactgactttcattttaattctgcaccaggatgcacgcgaaacattgtgagaccacagacatacttgcagtaggcttggacactacactggtcagccaagaactgaagcataagttcacctactaacaacagcgcagaccactttggcaaagcattaaccttatcaaaaacacataaatactaaggaacgggttctcatatctaagttttctgcgatgcaatttacagcccatatcactactctcacagaaaaaagggctgtagaagtgcagatccaagaaaaaaaaaataataaccagaaatatgacaaagcttttctgttttttaggtctagtcaaacaatccatgtccatgcagataccacgttgcttacgccaatgttattgcatgattgatcttcaaacacttaaatcaccttcaaccgtataaaacaatatcagtttgtttaagcttcatttccactttggaaaagaaaaaatatcaattgagtacaaaaatatgtgaaaaatgatcaatacagtacagaagctgcagatcggctcagcttcgtgagtgaaaatagtttaaatgataattaggtttcgggcttaaatatgcaagaactctctcctctcacagcataacgaatgcatgaacagaaccaatctgttaatgaatgctaaaaatttgttactttattgtagcgggatttcgaaatttaaaacagaaactagttaaatactcccaattttaactagttcagctcttcctagatacatttatgatttatgtagactttaagactctagataaagaaggtcaaaataaacatgaaaccactaagtaccaacacattttcaccaagcagataacagaatttaaacaagcatttaaaattacatttgacagccatagtcataaaatttatggtagacaattttattcaaattaacaaaatcgtaaataaatagaaactttagggatttaatacactagaattcaaattactcaaaatcagataaaacatattaatcaaatgattctaattatgctaagtaattatttgattctgcatcacatacccaattagttcatcaggagaagaaagaccaagggcctttagaattctacttgtaagcattgtctgtgaaccacggccatcattagcccttattactgcagttaatgcttgtgcagcaatcccataaccactgcaattgcaagtgtattattaatcagatcatttactaagaaatccatattataaaccacgatagtctctaaagactagcaaagcctagcaagttgggggctttgaaattaaatttaatttttctatagcttttcatacaacttcactcaaagataaaagccttaacatttccatggagctattcttaatgcaatgataaatcaatattactaatacgtagagaaggagaaaaagctcttccagaataaggcgtattttaatatttcaacataggaagtacaaaatgcacagatatctccagaatctacagaaacaatttctgcataacccacatttcaacaaaaatctagacaatttgaccgattttcctttttttctttaatgaaattttggccctgtcagttcaactggagacctcccagtgacctagtagacaatttgaacaatttcattttctccataaactcaattgtctgtgtctttatctcttttttccccttctaacaatctaatttctatatacacacattcatcttctttaacctgacatctaatgttagcttaataattgcaaactattctttccttttcaaaagcatgttcttataaaaggtgattgtccaaagtcaactctcttatactatgattccattagacgagcttagaacaaaatcctattcttaacaactttattggaagccaataaaaaataaaataaacaagcaatcaaatattgcctaatagtaaagcatctcatatttagaaatttcctttattattaacagagaaaaaaaaaactatagccagttgcaaataaagttaaacaaaaatagcatatcttcttcatttaaaaattaaactcgatagtaaaagtaaagttcataaccttccccaaatcgcctaagataggtccaccacccgcagcacgagcttctttgccatcttcagaaaagccataggcaatgctccctgtaccagcaaccaatacacatccatgaagctttcccatggtcccacttgcaagagctgcgacagcatcattttgaacatatactttaacatgcgaagggaatatatccctgaaaagtcaatcaagcaactccaagggaattagagagtaatatgaatatatttgtaagggaagttatttcgtcctatattaacactatcatgaacttgttttgcattgacatttgtaaattagaatacgtctggataccaggcaatcaacatagtaaaaacaataactataacttctcaagatcacacacataactataaaatacacctagggatcatagaacttaaactccacacgcatgaaacttgtttcatcagcaaatcattataacatcatatgattatatatacattcatcagcaaagcattataacatcttaaatctttctatttgtgatctttctgctttaaatgaaaacatacagaaacacttagtaaaaggtcaactcaaaaatcatgaaatcaaagacattcacattagagctttgacacaaatgaagaccactttgaaagttgaactcttaaaaatcgaatatatgcgaaaggcaatataaatttaattcagcatacaaaaaggtggaaaacatattatgaacagaatattcagattcactcaccttagccatttcagtatcttctcttggtcagttggatggttaacaccagagacacctaaacaaacagcacgaacagcagaccagtttgaaccagattttgtaagggcctctgtgataacctgctccaatgtttccttggcagcattctctgttcaatccaacacatttaatacaactaagataacataataaatatcaaaaagaaaagaacataattaactttaacttaagctccaaaaaacagttaaagattaaatattttcttcaaaatgtgaagaaaatagctaacccttttcccttgagctgataataaattgggcatattcaaaattaaaagcgaaagctaaagtttatgcaacattaaaggaatttgaataaggtttgccaaaccaaacaagatttcccaaaacaagaaggaaaaaaaaagcataactgaatcagtagaaagaaagggaaatgaattgaaacctccaacactgttgtagttagagcaaccactgacagcgcgagcgagaagaggaagagggtcagggagatcattggggtccgccatcaatggaagacatacacagacagtagaggtggtaccaccgtccaaacccaaaacgacgttgggcccatctccattttgacgtgcttcatcttcttccaaagagaaattcccttcaacctcatttgtgccactgttcacgggaatcgaatgagaatggccaaaccctcgatcagccatgattgaatagttttggtttcagacaagaaaaccgaacccagttttctgttaatttgcagctctgccacgcccctaagattgaccaatcgcaatttgctttgattttttttgttttttaatttctatttttttaaattttagaaatattctagtaaatactaaaaataaactagaatgagcactaattacaatctcttagtcaactttgactttcaaaatcacctgaaatatgtttttaattttttttttcataacgatattcattatagttacagtatcatcactgtaaatttttgaaaaatttcgaatagtttacattgttgaaaacaaagtttctgatattccagtttaccatgcgaattcaaaaaacttcaaacgtatttttggca

SEQ ID NO: 296984 - DNA, 8308 bp, Cannabis indica
aaatattatttattttttatataaaaaaatctaaatcagatgcattttttttacaagaatataagatagcttatttttacttgatattaagaattttatttttttattgataatttatgatgaattatttaattaaataatattatttatttacaattttaaatatttttttatttagtatattattttaatgaattgaataaattgataactttatatatacaatgtggctatttaacgttttttgttggtttagaacattttaagaatataagactattctattaaatttaacggtgtaagtaagattagctttataaatatatatatatatatatattaagtaatttattatttgttttaggttaattgaacttatactaattttaaattaatttaaatctatataaatattaatattttatttataatatttttatttttaatgttgagagtttgctcaattttaatattcttcagctttataattattttcctctaatttttaaaattttaaatattgtgtttttataaaaaaaatattataaaataaataagttgtttcctttaatttataaattttaaaaatacatataataaaaataaaaattaaaaatataactaaatatacgtataatatatgtaacaataacttagtaattaaaaatatatgtataaaaatcaaacatgagatattaataatgttcattaacatgtagtgtatgataaatatagtcaacatgtatgtgaatatgataaaggtcagtgcgttgatataaaaagttaaattaaaattgagattttttaacaaaaaataatatatacaatttggtttaagatttatcaaattaaacttgatgttacgttcaatgcacatataattaattttctttttaattaagttcaattaagtgatgttaagtgtaatacgggtatgtaattttttttttaaaattttggaaatagagtttgagattttgatctttaataggttttttttttaactgttgttacattggtgtgtcatttgaatgtaattatatatatgctcaattatatggtggaaggcacatttaacaatgtcaacctagctatggtgaccacaagacaacaatcctatagaagatagaaaattacattttctagtaggtacctttattgtatagaagataattttttttttattttaatttaaagttaaattaataaatttaaaaatataaataatattttaagtattttatataaaatatctatataatttttatttttaaatgtatataataatattataaaattaataaaaaatattatgttaagtaattgaatattttgttaaaattaatgcataaactcaaaaattatcgttaaattagaaatcctgttatataaccacacgttatatagaatagatatgtaaacttgtataacaggatatgataagagatcaccaattatcacctctaactaaatagtctaataactattacaagtaatttatgagtatatattgctaagaattttagggggagtactattaacttcttataccttccaaatcagctaaaacatgagaatcccttctagacctaagtggctaccactattcaatgtttctttttcttcttttttggtacaaagacatcttagtacatcatcatatctctctctttttctttaatatgatatgacaacttcctcactatcttataatgtggttccagttagattttttttgttattggatgcttctagttggttctaattgagttttacaggatctcagttgtgggatttgcctccttcttacctttatgcagaatctatttagggcatctcaatgaaaaaaaaaaattaaaggatgtttaagtggcaacatgttgagatgctatatcactagagagaaaagaatattattctagaaatatgtgtgagagtgtcataccattggccattggagtaattttaaaagtaagagtatctgatgtgaaatgtggagatttttaacatccctaaagaatactatcattagagatgctcttataactttaattatcgaggattttttttacttattattattattgtttgtttatgtacagaattgatcgtattaacagagggaaatattattcttacccaggtgtcacgcctatataagtttgacatatatataaaagactcgtgtaatttttccaaatatgttatcagtttctcatacgagatttacttgtaatgtcaatatatacaagtgaagatgaaaagtggcatttgtacactcttgttccgttcagaatttaggtgccatattctctgcaatacaaatctctccaaattacacttctctaccctatctcaacaattaaaatttggtaattaaatttaattttaattagaatatttttaattatttattaaataattaattatattttataaattaaatattcgatttattattaccatatgaacaatattataacattctctcacttggttaatatttaaattaatttactacttataatccaatgatcatccttactatatcaaacatatgaatcatgacaagtattatttttcatgtattacaatatatttattacataaaaatatactttatgcggctatgtactaaagtgaataaatgctatgtttatattaaaattatgttaagatacaattttctcaaataaaattgagttgcacatgaaaattagaaaatatttacataagagttttattgatagtatatctttaattgtacaattaatgaaaattgtataagggtaattgaatcttatatttaatttacgatcattgaatttatgatacatcatgcctttagtcaatgaatttgcgttcactcaatttattagatgaattacaagtgactaagagaccgtaagtctacgtactcatttggggggcacccacactgtacaagcatcaaactagcacataaaacttatgtagagaaattcaaagcttagtataagcaaaaaattaaaagctaagtcaatgcaggcatacttcgcttgacataaaaaaagtaaatcttgatgcttacatgtctaaacataagaagataaccaggattaaagaccgcctggtaggtcatatgtccatattaaaaggctttaagactaaacaaaagtagtattctaaaatagagggcctataggctaaaagcaagaacatgaaagccttaaggccaaaaataaatgttcaaaagtaaagggccaacatgccatacatgaacatgaaactaataggaaataaaatcataaacataagatactaatagaaagtgtctaatcatgtgtaggtgtatgggagtcgagctgtgagttgcagcttctggattgccaaggagctgtctggccataacctttgtagggtggctggccataacctttgtagggtggctggccatgtggtcagtagcctgaccagccatgtggtcagtagcctggccgaccacctcctccataggttggccagccatagccttgtcaagatggtcagacgatgacctcttaggctggacaatagcctggccaacctggtctatctgcatcctgctatcgtagaactatctcccttgagcaagtgttctttcacgaaaaaaagattccatgtaggagaggtcaaccttagatttatgcagataaacctcatataagaccttggaggacaagctaatatactcgtccttgatgacttgttgcccatcaagagcaagttgcaatgcatggcacttgttctcaagttccatcccaacctggaggtctcaacagccaggttggtcacttctatgttcttaataccaagtaagagttacaggccattgttcgaatcctaggtctttttcaagcaagcctatgtcagggtgtgtgcgtccctctccgtctgaagcttggtctccttaccctttagcttctctcggtgagcgctagaggagcgcttggttctaccatgggtaaggctgaccttcaacatggcctgaattcaaaagaaaaaaccaagttagctgtagaagaagacttggtcggccagctcttgagtggtgcacttctggccggctagcttctcattaatgcaacccttaccagccatcctcccagtagtttaaatctggccggccagcccttgtcattacaaaaatttgagtaaagtcaactatacaacttacaaatgtcaaatcttgaagcccgctggaagtcagacacttcaaatcctcatcctctagctcgtggagctccccatcaatgatgggaagagtcttgccaatgtaactacgggtagcctcatcaatcctctatctggtggctgaataggcccctttcttgaagatctgtgtggggatgaatcccttctctagggaggatttatgatcatcagatgaccatctagagcagaccccggaagaaggggacggaccctgttgtatcactagacctggtagtctgggccaccttggcttaagggcgacctgaagaagttccactagaaggctctccagcaagatccctcaatctggaagtcaatctgcaaaaagaaagtaacaaagtcatattacaagttacacgtatttaattgaagaaaaagaaaagaaaattggtgctatcaactaccatcatccttagagaaggaatcatctgaactactatcgctaccagcagccttgtctttgcctctagaagtaggcaggggacgagtgggcttggaaaaaccttggcttctaggcctaattgatagagcaacatcaccggttgtgcctccgcgtgccaagcactagcggatagccttctctctcttctctagggtcctcacaagcttagagaggggatgtcatcatctagattagatgcatgcccacctcctgggcaagtctcctttactatcgagacatcatctgggcctccagatgagccctcaactccctcaacattagactcgagagggtatagaccacacttccaaaatttggcctcggaagccaacctcaatatattcctcctctcaagagggagggacaggatataattaggtctatccctcatccggagagaggggatggagtgtgagtaggtttgcaccctctagaagtggtggtggacctgcaggatatcccaagcaatgaaataagttctagtatatcctcccacttttgacaaagctgtgttgttaatgtcacctaaccattgatatcccagctgactgaagtagaagtatttggtcctttgcctcgaaatggattttagctcaaaaaagtacccaatctcataaggggagggctaaggccaacccaactctacatacaggacgaacatcgccgaaaggtactttatgcctttcaggttgatctaagttggacacaccttaaagtacatggatatgtctataaagtaatggtgcaggggcagcaccgctccctactcaatgtggcgctccaactaggccatccatttgaaggtcgtttaatgtgcttgttggtctctcaaaggcctatcacaccagacatctcccactagccctcctaccttgatcttgttgagcatctaggtagaaatagaggacaagggagatatccaccagttctattggtccccatgctcgaggactcagggtgttgtagcctcctctaaaatgtggtctatcctaaccttggattgacgactaaggttgttcaaattctgcctgggctcatcatacaaacccaaggggttattggagaatacagtagaagccttgtactacctcctagcaggaataacctcctcaacctcagacgcaatgtttggggtctcttcatctcaatcagctacatgctgctcgaccataggtgtctagcctggtcggcccctggctctccattatattgtggctatgcagcctcttcaacaatgcctactctccctctagtcactagcatagcaatatgtgggtcatagggtggtgccctacaacacgtcggcttggtccttgccataattgaccttgagtgcctagcaacagtaaccatgatctctacagcaagaagatctctcagtgaagaaatttccctaccagcagacaaagtattaggcacaccatcttgaatgatgtaagtccaagaaccaggaagaaattgcctccacttgattctcaactcctagatgaaccagctataagactcactacccatttgctttgaatgccaatgatgctagacctcgagctctggagatacttggatcatttggctcatttttaagggattcctcagtttcgccaggttagtggtggttctccaaagcccgaggtctagcatcatttccattcaaagcaaatggattcctcagtttccccaggtttagcatcatttggctgctcattttcaggggattcctgagttgtcatttccctggttttcggttgatcatttggctactagaccaactagatacttgtcctcgaagagaagactaagtaaatcttcttgacacggttatcacctccccaatagtcactgggatcatttgcacacaaaagacaaggggaggtgagaaacctgacaaagcgacaaggtttagaaaagactctggtcaactatacctaagggtacatgccagataatttcatcgtacaaggctcggtatcaacgaagtacagtgtcaagtataacaacttggacaaatgttgagtattaagttaagtatttaactacaatagactcatcatcaagtgtcatacaaagtttctaagggaaccacatatgaaataaagtttgtataggttaacaaggccatgacaggattcttgccgaggccaaaagaggatagaaaatttgccacctacttaaaaccaaagccctaggctggccaaggtcctaaagcattgagagggccggctagggtcccatgacccatgcaagaatcggccaggggtcacaagacccatgcatgaactgaccagcttcctagggtaaaccccaaaaccagccagccccatgacaaaaccctagacccggctaggtcttaaacaagaccgctagggacgaccagggtgtgttttggattatagtatgcgttttttcaaaactcaaacatcttattcgaggatcaaagagtcaagaatcacaacgaaggtcaaaattaatctttttcatcaataaattacacattatgcatcctaaaactatcatgtagatcaaaatatcaaagagactagaatctggcgtgagaatcaagaatgtatgaagcatggaaaaacttgaacacaacaatggaaaattctataaaacaagtagagaacgagatttgaaagcttttacccactagttaaaaccttcgaggaagccggtgggaagcttggattgtcgaaacaaagcgagactcctgggttttagagaacttaggtgtatcagcctcaaaggggatgtgaagagctcatcttgtttccattttttaagagagagaaaataaagtgtggaatgagaaggtgcttcatcaaataaccttatatgatttctggttggcccctctcatccaacatgcagcaaacaactatgcagcttgcaaaaataacatgcaaaatattatcagttcccttggtgaacgtgagcagtgaaacaagagaaaatatttcattattgaagttattgtataaaacttgcccagtaaagactccaacagttaagattgaagctggaaattcccaatccgtacaaatattcgcatagggacgtgggggcaaatgttttcccaattttttcctacatgatgtgggatgtccacaaaggtaagatcgatgccacgtggagtatagcttatcagcaagaaggccaagtcatcatgcacaacatatcaattgatgaggagtccaaatacttaagcatgacaaagagataatgaactggccaacttaaggggtttgaccggacaccctggccggccctattaccagcataggccagccaggctccaacaaaggaaaggatgaccatcttctcccctagcacgcacattttgtgcctctgcagctttcagcctagacaacacttctaattacgtattgggcttcaataacctacgaaaataggagataaactttagttatttacctattcttggggactaataaatatgttatttatttattattttaatgtgtaacaaataggtgatatctccttattttaagggatatcaacctatcatctcttataaggtctcatatatatagagcactaaactaaacctaatatctctatgtgcagaacacgctctgaagctctaagttctaaaaccctagttctctctct

SEQ ID NO: 296985 - DNA, 3316 bp, Cannabis indica
aaatttaaaaaaaaaaaatataaggtaattctattatttaataacaatataatattattttaataattttgagagataataaaaataaaaagtgtaagtagtaaagaaatatagtagttagtagtagtagtagtatagtagtagtagggggtgagtgatgggggtgatccaccaaaaacgagacctgaaaagagaaagggtctgtcaaaggaatcgggaactgtgtacgattttcttccggacccaaaccaaaccaaagcaaagcaaagcaaagcaagcgacatcgaataaagcctcccccattttgcctcttataattattattattatcattacagttagatatagatagatattaccaatctctaccttcttcaaaacctttactttgctttcagtattattattattctacaaaacaacaacaacaactactactactatctagtccacaacaaacatcaacaactgcatgggaatttagaaacccacaaaacattccctcatcactctattctgtccattattacataaagttggagctttttggaccctccttgattggttcataaataaacaaacacacatccactaattcaataaataaataaataaatacattatatatttattcaatcaattgaactataacgactttcccaactcactcagaacaattgatgggtctttcttttcttttcttcttttccaatttttctcttaattagttatatatatagagaaattgggtccccgcaaactcaccccaccccaattaatcacgtcataaaaaatgtattgattatgttccaacaatttttacatcattaatattatgttcctttttaaaattttactatattaatatgtatccatcaaaaacgcgttttctctatatctgttgtgctttttccttatatcgattttgatggaagtggaaagttactgaaagacttggttaataagtaacctgattatgtgtaacataatatgttgataataccaaaacaaaacaaaaacataaaagtaaatttgtagaccaaataagaaatttcgagttacaatcaaggaccagaaaggttaataaacaaaagaaacttagttcacaaaatgtgaggtgtcagtgtcatatttgttgtgtttgcatatattttcaataaagcttaataataattaagagaaatgctaaagggcaccagtggtgcctagcaccctcctacgtatcaatattggtgcaactaagtatcgggtcccatataatttaatacaatagcttttaagaagtttcgctaatcaatcgcaacgcaacatgtagagaaggtgctaggcaccactggtgtctaatagcaatgctaaataattaaatatatatatatatatatctttcactgaaaatttaattgattaaacaaaatcaaactttgactggtatctttatatatctccaaagagaatgaaggaccaccacttgagactacacaactcatgcacaatatctcctaattaaggaaaggtcattttcatacatagcatattggtgaatgcatatatatatatatataattacatatatagttccaagataatgcaaactctctgatcactatatactataaatatacatatatgccatgggacaagatctcttgttcagcttcagagctgaataatatctaacagtggaggctaatcattaaaataattaacacagcttaaaaaggatcaccttgatttcaaactttgaagatggtcatataattaaataatagtttacctaagagacaaagagtgagatatcaaataagatttattattatcattaattaacatattgttgcagagcttaattttaacaaatttctaaatccaacaaatttcattttcttaagccaaaaaaatttataatattgaccacaccaaatattaattaaaataattttttttacccttctctgtaatatttattcaggcgtgactgcataatgtacctagaaagcagagctagctaaataaacctctgatcactactctactcaccatcttaatctatagtattaatattacttaactctatattgatataaaaactcacaaacgaagaatatataattaatgttcccacaaataacgagagatcttccttttattcctcaatcatcttcgactttcacctacttatttaatttaatgccacgatcaatatttgttcctttttttttcatatataatgttatataagttgttcaaattagagtcttgacgtggcctttgatgatcgaagattataaagtagcgatatatagtttcaaatgaggaaaaaagaaataaaggcagatttttaatgagaaatgctaaagaggatattagtggtgtatcactacttaagttacatagtgtaattaaatataaggtcttatatatattttaactattgtaacgacggttaattatttgcaataaattacctgttaattaattagtgtagtaatatacctaataattaatgatgataataatattaatattcttttaatcatcaacacatgacagagaaagttaactatagcattgaagttgatggtgataattaagaatgaccaacttgacaattattgcataattaacaataagaatgtttctaatcgatcccatcacttttatagatgtgccttccttattaatagtgtactatatatcgatccttattagctctttgatctatgcatatatatgttttaaataattattagagtttctaatgatcagtatatcattttcttttattttaagcaacaaatgatctacaaaatactttggatggatcatatatgtatatacatgcatatgtagtgtgtacacataaacatatttatatatgtgtatattatagatattatatatgatattaaagtttggaaagcaaattaaacggtgcctgcataaaagaacaaaagtaaaatatatatataatcccaaactcatccttattaactgtttattctttctcggagagcattctggggccagtctccagtcaaaaagcttcttctatctttgttggcctaaaaagacatacaaaggcacaaaataatttgaatggaaagcattctgcaaatgctacaaaaggagtgcttgaatatatatggaggaatatcatgtacaattgcttaattagaattaatacacccctagcccactactatacatcaccatatatatatatactttcttgttctctctctctctctctctcgttgccctactgccgccccctcctcctactccttcttcttcttcttcatgctcagttgggggg

SEQ ID NO: 296986 - DNA, 4928 bp, Cannabis indica
catctctctctctctctttttaatttacaatgtataatttgagagatcatccaaaatttccaacacatacagcctttttagctaagcttaagctcaagtggtttagccagccatctctttactgtttagtctttcactcttgaaaagattggagcagtcgcattcaatgacccaaacaaaccaaagtttaccaacaaaaatatttcatttcaacactaccaccataccaataatgtctcatcacttccaagaataattaataacaaacaatgtctgttattaattaatgtacaatattagaatagaacatattcatatataattcaattacgcatgatgttttatataaaaaaaaatattattatatcatttcatattataattaaaatatttaaattaaatttttatttttaataatattaaatttataattttagaatttatgtaaatagttgactattaattattaaagtgataatttttaattagtctaaatcagtaaatttttatttttaatgttttaaaaaataatttaaatatactaataaaaaataacaaatagataatgaatttacatttaatagtcagatactttcaacttaagtattattaaaaatatttattaccgcaacttaagtattattaccgcaaaaaattaaacttaaatatttatttccaactaatacttaaacttaagaatttataactcaaattattttattttttaatatatttttattaataggcatactttaaaattatttaaatattatatttttattagttaaaaaaattaaaaaaaaaaaaataattatagagattggacaaaaacaaaaaaatattagaaatgatggaatgtagtttttgttattttcttatgtattttaaagaaaatagacttttgatgcctctgatggcgatagtgatagcctaaatctgagaagaaactttggcttgttgattggttaatacaaatacgctctgtggttacagttacactagattttattatatacatagcccgtttatttacttctcagttttgaattaacaaaattgactcctttgtatttgtcaaacacactaaccatatctatatgtatgaaaatgaatcttcaatatataatatatataatgccgacccaaatctcttttaaatatgttaaaataatgttaatgtctcgtttgccatccaaaatagtagttagactaattacaaataattgtgacatatatataatttattatatatgtcaaaatacatttaagtaataatttatagcgcactaatgtataggtttgattttctattttttttaatatcagacttcctatttctatatgttaaattggggtacgtatatatactcgcctacgtcctctactgagatttgtaattatatatttgtaacggatacaattggtccattaattgcgtggctttcaaatgataatattgaattcatagccaataacattttgattaaaatcttgattcaattagtatttatatttctctctctatccaattttttttttgtaatatatataatgagaattcatagtacttcaattgagtttgattatttagtttgggttaggtatagcattgttttaggagatcctgtaataactttattttttttaggaaataaacttgttattataaattaaatggtaaagtcatttacaataatagagcttataggtagaagtatacaatctgactaaaaacaagcctcatccacccttaaagcaaacttagtcaaactatcagcagccatgttcactgaacgtttgatatgagagacatttacattagggaaaaatgataaaagaccagaaatattaacaattacatcttaaaaagaagaaattgtagaagaagatttgcacaaagcattaaaaacccgaagagcatccgtttcaattaaagtgtaggctcttgaagttgaagggcccaacatagactatgaaacattacaatacctccatttcatgagattcaaaacacaacctacaactggttttgaaaatgctgcagcaacagtaccatttgaatgccgaattagagatcctgtaacttaagttgtctttgtaaaagatatatttatagctctttttctatattttctaaaacgctcatcgtgctatagttagttttgtacatacacaaaaaagtgaataattgttagagggtcatattgctaatgtatggaaaaataatagaatatataagaagaatgtgctactcctcctattgtcaattcgttttgaaatgtaacctcatttactttattccaaattctagataaactaatttataggtagataacttttcaccatttcttattgcagtactcaaattatttttaataaagagttcattaatattaaaaaatatataaaagggtaaaactttttgttttctttttcatgatcaatagcaccaaacatttaaaatgaaaatggataaaaacaaactataaaaataaatatctatatagatatatatttgcctcccaaatcaaccaatgaattcaaaatttgcagtacttcttttctatcaaaatttttatattttcacttgctactaaatatatatatatatatatagtaagccaaaattaatttaatatttgtaacctctggcacaggcacacaagtaattttttttttaaaaaattaagtgcacaaactacgtacagattgcttaaaaaactccagaatatatatgatacgaacaatatattaatataatggtccccataacatgcacattgatttgaatttctaatttgaaaaaactatagaattgtccttgtgtttttatgttgttttgtccttctctttctctttctgtgctgtatataataattgacctgccttgtcatttctatgaaattaatgaccctttttgtattcatacactacttctattatttatcatttatatgtatttttgctataatgctgccctggcttagtaaattcaggggaaaaagaaaatttaaaacgtactctttggacgtgcatggcagcatcagcatgcacacgtttcttcattgttttatttaaacacagtaattaactgaaagtgaatataattttcaaactcgtattagattaatttattatctaatttagtttagaactccgtgcaattcacgtctcaaattttgtaatttattgtatataaatatacaaggttgtgtcaggtcttcctagtggtccaaaccccctttaatatgatatacatttttggtctgcttagggcttctccaacactaaaattctaagtggagtttagaaacaaaattattctaatgaaacactaaatgctattctatatatttaggagtctactacaccaattttttttttttttttaacattaaaataataggtttatgattaaattttatatttatatacattgtgtgagataatttaataaaataatataataatatagaatatatttttagtggaattttagtgttgtgtttggaattggaaaaaaaaaataatgttgaaatagtattcttttagtattgatttaacactaaatttgaatttttccattaaagttacgtacccttaatctattttttcataagatttgtgtttattattttacttcgggttggatcactcttttatatataaaataaataattattgaaattatgtgtgtatgtattattactcttacttttttatatgtttggtagacactataaattaattattttaattgtcttaaataccaacattatacataattatagaaaaaatagactacaaaaatttctcaaacaaataaggaacaaataaggggtgtataaaaaacttaaaaaacaaaactccaatataaaaagaaattaccacatgtacgtctttttattaattttattttttctacttttacgttatttatttcagtattctatctatatatatataacttttcaatcacatttaagtttaagcataggtcttatttttatttttacggtttcttcataaatcactttcccctttattttttattttctctgtcccgcatttaaacctcctcagccatgtgaccaaaaatgaatatatttcttcttctttctccctcccaatcactctccaccatgaaaaatgaagcttgatttcttcaaaatttaaaaaaaaattcgcaacacatattacaaccctaaaccacgactaaactatatatttcaatcttgaccccttttaatatttcttcttgctctgagtcattttttcttctttttaattatttgagaccaccacatcaagcttttattgatttccaaaacgaaactgaagccacaactgatatcacaaccttaaatcatcattaaactatgtaataatctcaactatatgctctagtcgcaacctaaatcgcgagaacaccacatgaaattttcattatttcctaaagaaaactgaatagtcacaactaatattgcaacacaaattgcaattgatatattgcaactcaaatccaaaccctaaatcaaaattaaatcatattacaatctcaatcatgcttaatcgcaacctaaatcgcaaccaaaggatgattccatacgtgaaacttcataccacttttttcttctttctttctcttctttgttggaatcgtaaactttggggatggtgcgtcggagggactttagcccatgtgtgggctaaagccctcactcaaatatatacatcaaattttgtatatgtagatatatacatatattaattcactttgctcaatttattaaagtccaattcacaaaagctctcactcaatatcataatcatgattcatgagcctactcttattctaatcaagcccattttaagagtagtctaatacaaataataaaaaaaaaaataatactttattaaaaaataaa

SEQ ID NO: 296987 - DNA, 1605 bp, Cannabis indica
aatagttcaggggtaatttttaacgaccttaaaagttcaggaagcataatttagtacatgtcaaagttcgggggaaaaaatttctaattagtcaaaaataaataatagctcaaatttaactcatttgttaaaaggttactttaattatattttctttatattttaaaatatgagctataataactcaactttacctcatttaatagaagtactcttacatatatatgcatgttgtatctaatcataacttaattgaatatcacaaattaactagtgagggagataatgttaaaattgaaacagtacagcacatatagtatatatttttagggagtatttgatatgagaaatttataataatttgattgcctaaaatatatggaaacttgttattgtattgggtttatcatttttgttcaaaaacttatttttatcatatatctaagtactaaaggaaactctagaaaaaagtagttttagaaattatcaagcttttagaattttctaataaagtgtttttttgatcaaatttagatctgtatttatagtgatttaagtgaacacttttgaaattcatttggtaacatttcatggctgttataggctcttacatggatgtacattatcataatggttacataatatagagcacttgaacattttcaccagtaggttgtgctccatgcaacatgttaattttgtggcactaggagatatgtggcctaatgttaccagaatttataaatttgaggtttataagtgatacacgaatatatcaaatcaattctaaaccattttaatctcatttccattaattcaattatcctaagagctatatataaatcatatagcatcgaattttaagaattcaattttataatcactctctttattgtacaaactaaaatggttacaaatcttttactacaacccttctgaaaacaaattatatggtgtactctctgaaaaagtatatatataatatggtacatttattgcactaaataaactatacgttaattaagattttaactttttaggttattaaaaaaaattggactattgagatagttgaatttaaaaaattttgtttaattttattcaattttcttaacatagattgtccatatactatattgtgctcccaaactttgatatatacaaaattatgtacctgaactttaacatgtactaaattatgatccttaaattttaatccatgttagatttttctagtaaaattagaccaaagctcttaaatctaataatttaagggtccgtttggcacaacttttggaaaagctaaaagctgctttttgaaaaaactgtgataaaaatgtatttggtaaacagtcaaaaaacaactttttgaagaatttttggagaagctacagctaaaaactgaagctgctccaacccaacttttagaaaaagctgttttgataataattgtttttgtactaaaaccatatttatttttattatatattaaaaaaaattaaaataaactaattataataaaataaataattatttaatctcttatttttttttaaaaaaaattaatttatattttattttaatattaacaaacaacatcaacct

SEQ ID NO: 296988 - DNA, 766 bp, Cannabis indica
aaaaaaaaaaatgtttagaagtataaaaataaaaaataccctttatttatttacatcacaaaagtgtatattacacgtgcaagatcttaaaaaaaatcacatcagcaccaaaaatattatggattcatgaataataatattatgatagaatttattattaattattaaaaaaataaaaagacataagacataaattgaaacaacaacatatctaaatgggataataaactcccacatgactttgtccttgttcatatggatataaagtaggaatcatatgattaactcccatatttataggactctgtccataataaggggtagaaggaatcataggattaaatctatattcatatggatatggagtaggaattataggattaactcttatattcatagcactctgttcatattcatatggatatgaggtaggaatcataagattataataagacatccaagaaatgggatgaaattggaatgggttgggagtggagtaataaaattgggaagccaaatcgggaagagaatgttgattcaagttgtttgtcacggtaggaacttcgttctttttatttgtcttcgcttcagccatctttatctctatttgttttccttatagattatagaaattattttcaagtaccttttctacagcttcttcagaatcgaaagacacaaacccgaaacccattcccttgttagttattttttcataaagaatatcgatatctaccgggaattttgattttatatgcttaaataa

SEQ ID NO: 296989 - DNA, 4484 bp, Cannabis indica
aaaaaaaaaaaaaacctccagatactaaatgttcacccaattgaattgtctaagattgcttttataaatattagcaaactatgaagcctttcataactaaggcacttgtattataaagaaagaaatgtggcaatagaagtgagctaatcacaaatttcgtcctctcattgctttgggtgttcaagtcgcctgggttgtagaaataataccattagacaaaatactgaaatagttacaaataaatggtatatggctatttaataaaagtgaaaaggcaacaaaagatctctgtatattttcatacgactaaatatcaatgtgtatcattcaaaatatgattgactctcacattctctaacagtagacaagagtacatttaaataaaaagaccttttatctcaaatatctacagattaatctagcacaaacctatttgagataaagattctcttgtaaagcgagtatctatcatcaaaataaacagtttctttagcttgatattaacatttgattaatccaaattacaaattgctcctcgagagaacattttgcaggtagacataaaagagatttttacttatttatttacaatttaaagttgtttgagaagtcagaggaacagatattttaaaacgacagcatctagaatggttattaagcaagaaaaggagaagcaaacatggtataaatacgaccaaacagagtgaaaaagaaaaatgagatcaaatgtgaaacacttcaagctagttcctagcatatttcaactaacagtaatggctatcacaaaaggtgtcaaatttctgggtagaaggtaagcagaaaaatcactattcactaaaagtgcatctgaagatgaagataggtgtataactgtgtgtgatcacataaaagaaaagatatcataatgtccttttagacaatgatagaaagaacacatgggcatctacacagagaactcatgtcactttcacatttttttcccgatacatataataatctatatttgcaagactataaaaacaagtgacagataactcaaaagtgctcaataaaaagagaagaaaaaaaattatgtattctgaatcacctcaaaatcagccatggtgatgcttatcccttccattacttcaggcatcactggttctttcaaccattccatgctttgttcctgatctatagaattcccacatgaattggactttctttcatacaaaatcctctctgctacaaggtgacctgcttcggaagccagggccttcaaatctgctgcaacaaaccctggggtagacctggctattttacgaagatcaaaagagccttcaagtctcatggttcttgtgatgacagaaagaatctctgccctcgcattttcatctggcacacctaactcaatctcatattcaaatcgtccgggcctccttagtgcaggatcaatagcattaggtctattagtggctccaattacaagaacataaccctgtatatcgtcagaagatttggattctgaagatgaatccatacaagtcatcaactgtgtcacaattcgccgctccatctctctttgtaagttttctctttttgacgcaacaacatcaatctcatcaataaatataattgaaggggcagtcttgtgtgctttctgaaaaagctctcttatattttcttcagactcacctaaagtagttattgaaaaagttgaaacatcaatcacaacatcaacatttatatgatgtgaaaataaaagataaaaatttatacctgaaactcctgagacaaaatcagtggcagatatattgtaaaagggatatccagtctggttagcaatggcatgagccaatttggtcttaccacagcccggtggtccatgcaacaaaaggccagaaattggctgaactccaagccactccaatagctgatgctgatagagaggcatgagcaccttcttctcaagctgtttcaaaacccccttcatcccgcccatatcctcaaaccctgatttcactttaacctcactctcaggaacatgatggtccgataccaattccaactctaaattctcatcctcattcttcttcttcttcttcaaattggcggatccagcatatgacactcgaagcatcgacttcgtcaaatcgaaatgtggctccactctctcattgtcccccaacattgatgttgatgttgatgtggacatcgacacaaccccattatcaacatcagactcactcaaacaattctgattgttttcccaactccttccatcatcaacatcccttttgtacttcttccgagagggggaaggggaggtgctcccctgctcattatgctctagagcatcatggagcaatttcatgaaaataggcctcttttgtcgtttgtattcagggtaactagagtacagataattggccatttcatcaacagttgacgaattgaggtttttgaaggattgaagacgcccacgaagaactttctcttctctcgctcctactcttgaccttttccttatcatcttcttaggttttcttaacctaattattatgaaatgatatatatgattattaagggtttcaaacaaatttgaatttaggaaatctaaataaatctgattattttcaaaaccttgatcacaaaaagggtatgtaaacaataaatctaaaaaaccacaacaagaactcatagaaagaaaattaaccacaacaatgaaaccagttaacctttaaataatgcaataacacttaatagtgaactttgaagttgaatccccttgccttgcaggctccagcttaaaattaatctcaaaaaacttagggagaatagcatagtcacatttcactacaatcataattattcctttattgctcaatgttcatatttttttactgatttagcataaatattaatctgataattgtcttactcatacatataccattttgcctctgtgcatattaaaactataccacactcaatttttatttttttttttcaaatggatagaacttgttaattaactcctaaattaataacactttaacaattcattgaggaattacatcaaacattgtgtatgcacacaaaataaaattccacatttatatttatattcaaaagatcctcaagccaaaattataaatcataaacacacacacataccattgaagggggcagtcagcagaggcggggatgaggtgcgccgctaaaagtatcggtgccctaatgagaagatatttttgatataataatttaggaactttattgaataatattcatataattttatatataatacagaaaatcttccatggacaagaaagttttgttgaatgtttggcgcgaagctttacagactaatgagaaatatgaccactccacatatatataatatggctactctaccacgattatggaatttgcataacttttttgtttcattgcaaaaccttgaagtttgaagtatgtaattttttttacggtaatactcaatggacaatattaataagagcattgccataagccaccaactcgacctgtcacgttacgattggttaacgatactctctaaaaattatatgagacccgatacttatttgaactaatagcgatactgacatatatgagggtgctaggcccactggtgcgttcagcatttctctattaataaattataatttttatccaatgtaaaattatgttaacaggacgtatatagtatgagttatttttaaatattctttttttttaaccaaaggagaattttattaaatggcaaaaaagtgaaaaataaaagctcaatgcaaggattagaggcatggtgataaattgggccagcaaatccaagaagagtcaagatataaagtcgaacgtgcaagtgaatgagccgtagcggaccaagcatgtaaaatatcatgaacaataataccaaatttagtgtgatatttattcttgttattaatagcttggataagatgaagatgatctgagaaaataataatggagttgtaccccgaacggtgacacatcaacacccattttagagagttgttgcctccaccacattaggatgaaaggaggttgtcattggattactcgaagaacacaaaaccaccccatcacggtctatcaccactgccccgagacccatacaactgtggtcctcattgatacccgcatccacaaatagaattaaatcatctaacctcaaattctcaaacgagccactagagagcctaaccatagtctctgtcggcttcacatgagcagtcggagccaaattagattgagcatcttgataacgccaaagaaaactcaacgcatgatgagtccatatttgtcttataaatatgatcaatttatgtattaatattcttaaattgattctttaaattattgattagtgtgattttaatttgttaagctattttaaagactacttatgcatttagagtcttttggaaggattttaacatattttggtggaaaat

SEQ ID NO: 296990 - DNA, 5350 bp, Cannabis indica
aaaagatggtaaaaataaaagaggacaatataaaaaaggtataaaaaaggatagagtgtaatttcctattttaagttaggtgaagcctgaagcccaatatggtattgggctgaagcccaacaaaaaggtacagataagtgggccacgtggggctctgagtttgccgcttaaatatagtatcatccgcgttcccgccaaagaaaattggcgccatatagagtacccctctttatcttgccctacccattcagattatcattcccgctctctcctttcaacactgatatttagccctaaactcagtcaagcaattcctcgatctccattttggtgatctgtctttctgaatcagatcttctacctcccgctgagagctagccctaaactcagtcacgcatttcgtcgatccattattttgatttctgaatcagatcctctagtttccggtaagttattttcgtttgatttatttttttcttcttttctggtttggatatctgcaactgaaattattagtttcatcagaatgtgtattcttttcaagtagagatttctaatttcatggcagtctttgtcctttacatgttagcttcttacattcagttgaagaaataagttagaatgttcgtcgttgttttcatcacatcgcaatgaaattgcttctttttcgttgcgttggtgattttttttgtaagttcggtgttcatttttgacaatttttttgcttagctttttattttccaggaactaaataaaaagagaaaaaaaaaagtcaatgaggggtccttgctccccagagggctattttgttgtgcggacttttatattttgcgttggaatcaatatgtatcgtttctaaatcaacttagtttgcaagttaaagataatcttgaaaacaatgatgctaatttctagaaagattatgtggatattaatctactttataggtttttgtagagtttaacttagagactttgtttgatgagtgacaaattaagatttgtttatgctgagtgttacttagaaaatagatcatgttgtgtagattcaagctgttcatttgtagtgatggactgtgcattgtatttaaagtgctattggtctctgcacatcacctatgtacggtcacaagattacctagttacggttaaattggtatattgctaattcttatgaagttggcatctctggttatgtttaccgtttaccacacctgggcatatacacattgagttttggttaattttacttatctaagttgctactagcttgtttttggtcttaaggccaaactactttttgcttctcttacttatttccttgtaaaatatctttccttacaggacaaaaatttcagcaacagtaagaagagcatatcttttattccaatggagttgaggagttgcaacaatttgcattttatcaaagctgcgagaggtgatttggtactaaatactcagaatgtgaaacctggaaggcaagtactcaaagtcaggacgttggaagacatattagacactttagatgcaaaagatcagaatcggattgtcccaagcaggtgtactttagcaaaacgtgttctgataagtgatttagatgcttctgagtttagttgcagtgatgacgatgacggaagtaacagtgacgtggtggatattggttttggtgagatgacactgaagcaaattaaagagaactgcaaaaacaaagaaaagaaaacgttcaaagttgttcattcctaactgacgaagtgcaccgtttcaatttacagaccgatgaagacgactgtgatctcatggaaactctcattaccttgaaatcaaaagtttcaaagaagaaaaagctgaaggcgaaggagaaggcgaaagagaaggagaaggtgaagggtaaacgtcaaagaagtcttgtctctagtcaatctgaaagttctgcatcatatattaaattggaacaagacttaagtgatcaagatgtcatacattctaaaggaggtttccctgtacccatcaccgtcaaagtagaagttcctgaagttgaatctttagaaagcccatgctccatcctttttgccagtgattcctccttgctttatgaagatcaagtggattcttgcgaggttttacagagagaagcaactatgattgcgacggactatgattgcatccaagcactgtgcttagatggccaaaatgctatctgtttccttgtggattcttacggagcagtacacagaaatacgatcgagattacagaagaatgtgatctggatattgtacctctgtgttctgatagacaaaatgcagtctgttcttttgttgatccttctttgattgatgacaatcagagggatactcgtggggtggaactcggggagactgaaatagcctttgaatgtgatcggggaactcaaaaattgatttacgcaacaggaaaacctgaggattctgttgttagtgaagtgtatcgtgagttctcggaacattccactcctgaggctcttcaggctgtagaagactcgatcgattcttgtggagtagtacccgaaaaaatgactgattcagcagctcttcaatgtgttccagagacccagatgttgatctctccgatagaagaaccacaattgtgtgctcaaaatgaagcatgctttgattacatggaaaatcaaagtcctaagccagttcagaatccaagtgcgtcatgtgacgatagtaaaatggttgatattttagaaataaagagtcaacagtgctcagaattgtctgtattagaatctataggagaggaaggagaacctgtgttgtcaaccagtgattgtagtcatgtacttgatgacattccaagtccttccagcaatcatgtaatcccatgtagcacagactgtaaaaccaatgttaatctcccctctatggccatccatgggtgccttcaggacactgagtatacccacgaaagtgaagctaatgtacaaagtgaagacaccataggtgatacagttcataatcttaaaaccagtcctgataggtgggttgctccgtctattgatgaatcacctacaaatgacgataagcaattgggggagcttgtgatttcagaaggtgatgagtcttactaccaaaattcaaagttaaatcctcctcctcaaaggctcctgtcaaccagaaaggtatgtcatctctactggatggttatttgactaattcatgctgtggtggaggttgttttcacatatattccttttatttgttttaggttatttctccagattctcaagaaaaattgtgtcatgctgtggagtcaattgagttacacgaggaggaacattacagtaagtgaacaatcataattgggctcgcgaaccttcatgttgaacttacattggtgtattgtttcaactattatttttgtttaaccagtcaaacttgctctaactctaaagtagatcttctgtttcattgatttctgttggttccttcgtaatttcaggacctaagaagaaactatgctttacacaacagaccgagaagaagaccaaaatctcgaaagctgaaaagtcttgtcaggttgctagagttagatattcagctaaccttaagcaaaacgttgtgaaaccaaagaacgagaagagactcacccaaaccgaaggtgaccataagggtcctcatcgttctaatgtattcccacgctttagtactgggtgcacttccatagaaacttgttcgcaaaatgcaattgctttctcacaacgccagatgcaagacatggaatgtcttgcaacaaagctcaccaatgagttaaagaccctgaaggacattgtagaagataaattgctccctgaagccggtccagcaacgtcctttaaatctaagcccagtgaggtatgcttattatacatttcaggcttttcagcgatacaaactttgcagaacatattgttcttacattcgcttattattgtgtatgaacataaaacttattcttcaacgattcaaactttcttaaatttgagccctgtatatttctcttaatcggaatatatgctctagcattttgtagttattattattattatttctatgtataatgtaaccatacccaattccatgtgattgtatcctgatcatgttttttgatcatctctgattacagttgagaatggccattaagaatgcaaacaaagcggaacaattagctcaaagatggctttctataatggccagggactgcagccgtttctgtaaaatcatggtaacttgattttattgttattaacttctttatttacaagttgattacaaaaatttcttttataaattactcagatataatgtgttatgcctttttttttgtctcactcttgttcatgttctacagagattgactgaaaacgactctggtgctcctgaacgtgaaactactgtaaacaaggagaagaaaaaaataacgtttgctgatgaagctggggaagaactttgtcatattagactttttgaaaatgactcatcatcgttggaaccgaatacccacgaattggtaaataaatgaaacgttaatacccattttgttgtacaattgccctggacctggagcaaataagttccatttctatgctacttttcagatgacctattcaataattcactgttcactatccttttccgtctaatactttgatttgttatctctattgttttccattgagataggaaaaccctgtacgttgctgtagcctgtagtactgtaccaaagaaaagtaatatactgaagcttcttaaccgttgtgctgtgattgctgcctccatttatttctaacatttattactatgggcaagtacttgtgctattttgaatcgatttctctggcttcgcttttttaaaaaaacaaaatttgaatggttctacacttctacttctatcttcaattaattttggcatttatgtgtctgtctcacccccatcgcctctacacccgcacaagactcaaatactctagtaacgtcgtttttaaagctatgctgaatgcactatttcggccaggtttcaaaccattgggcctacgagccagaagcccatgaagtagtctatagtaactagtaagtacaatcaatgtatccaaacaaaattcgaatttgttggtgtttgagctagggtacgcaaaatgggtcacacagaaatctggggaaataaatagaatgagttttcttaaacaggtttgagtaattattgagttgacatcaataatttgcttgttaaactattcattttggggtaaataccattttagaccttgtattttgcaaaagttatagattggaccttgtgttttgttaaatgacaaaatagactttatatt

SEQ ID NO: 296991 - DNA, 1401 bp, Cannabis indica
atatcagtaactctgagtttgatacactgcaattggtatgcaattcgatggcgagctttcaagttcttgattcctcgaaccatcttgcttaaataagcatagaatccaccatgtctcttagattgctcaaatctatacaagaaatcatcaatgatgtcttctgcatcataagcaacctctctaacttgcttaacccaaactttgatttcctcatcatcatcttcggcagtatcagcagatctcaaaaaggctcttatacgatccaactcattcttcacaaaaacaacttcgtttcgaaattggctgatgagtttcacctcatcttccaacaaggttgaaagctttcccagtagaaaactcaccacactctctgccatgacttgctttgatctgttgtagcaagtattgttagatacaatatttgagaattaatatagaactgagtgacaaagattaaatcttttgagtaacaaaatattaaatttagattatgtcatgaaattaaataaattaagagcagaacaagaaatgtaccgtgatatctctatacaagttgattttcagatgagtccaaattggaggaagatgatgaactctctcccatgatttgtttcagtctattgtattatacataatcaataatcatatctgacaagtaatatagaaaattgagttccaaaaattaattcttttgaggaaaaaaaataagggcatgctataagacaaactatatatatagaactgattatgtaacaaaaatcaattcttttgagtaacaaaataagggaaactattaaatttagattaggtaagaaattaagagcaacatataccttttcattggctgaagagctggcatgcaggttcatgaacgagttgaaataatgagtgacaaagaagatgatgaactctgttgcatttgaagtgtggagagagaaaatttgacctcatcttacatgtacagcctgtattggattttttgttttgtctttttacaaggcaattcttcattcctcaagtatatatatggtggtgggtgcacttctatttttatatttcgaaaagaatgtttagtggctaaccctttttcacttgtacttaatttttaaagttaaattttaatagtaaaattttaaattattagtaaataaagtaatttgcgataaaatttttataaatatttagtttattgtaattaatttttaattttaaaattttggtagtaaaaccctctaaactcgtattctgttaacagtttaatatttctatccatttttagctattaaccgtcatggaagaatgtctacgtgtacacagtgcacatgtgacacaattttattagtctacataaataattattttaaaaaataaaaatttaaaaaataatttgaaattaggaaa

SEQ ID NO: 296992 - DNA, 1810 bp, Cannabis indica
ttttattttttttactgtgttttaataagtttcatactgcggtatactatgttaagttttcactggtgttctactggtgttctactgttgttttgagttgttatgttttgtgttttactggtgttttataaaaatacagtatttataaaaagatatccgtgtgacagtatttttgtaaaaattaactcaaattctaatatttttgtatgttttccttttgaaaacgtgttgttttttccacccttcttattccgatcaattttgtttagggctcaaattcaatagctctgcccattctatatggccaaataaaattctaaagtaactaattgttaattttgttaccattaaatatacaaatctattgaaaaatctaaaataattactacaatttgaagccatttggattttaaaggcctaggcccaatgtttgcttgccttagcccgaaatccaaaaacccaagaactttttgattaattatgtctttattttgtgtcaactaagtatggatcgacattaatctcatttaggttcaattagttcaaatataaatggtatttttaaaatttattaaaaacatatgtttattttttaaattaaaggtacttttttatttgaacctctgaagtgagtggaccttaggtacggacctagcctgcctatgcctaaagccaatcttaaatttagttttagtcccaataaatttagtgataacaaattgtaatttttaaaattaatacatttagtcacatggaataacataagaattataatcgatttgtatataaccataaattataagttttattgtgactaattaaaaagatttttgatagtgaaataaatatctatatataatgtgaattaataacatatatgcatatacaacatggatcaaaacataaaatagggattctcccttaatttatttgaaatacatatctaatgaacatcaactacaacaattgattaatacaaaagaaaatcatgaaaataaaatacaacttaaaaaaaaaggccccattaattgtcatgggtcttccctttttcacagataaatattacaattaaaaaaaattataataagagttaggtttttttttagagttgatcaaaagagtccaagctgaatggttgctcctgtagttgagaagaagtagtagtacttaaatctataacattattattattattattattattattattattattattataaatattattattattattattgttattaatattattcctaagttgtaatgccttgagaatgaaagagttcattgatgaagagagattattaatattagggttattaagcaagttagaataattccatgatgatgaagaattaagagatggtattataagaggattaatattattatttatgttgtttaaattcatcatcatattattattgttgatgatgaaatcttgttgttgttgttgatgatgatcaaaattattattagggatgatcatgcgatgatgatgatgatcgatattaatattgtctccaaactcattgatattattgttgtaatttagtatcgagtttgtatcatcacatggtgactcaatcgatagctcgtgtgatgattgtgttttgttgtggttttttcacaccattgctcttttggaaaaccctacataccacccactcttcctgcaaaatattataataaataataatatataaataaatattaagattatatataattagtattaattatcaataattgattataaaagctggcacagctagttctacgtgtgcatgatcttaattattat

SEQ ID NO: 296993 - DNA, 1427 bp, Cannabis indica
ctctctctctctctctccctagtgttggactgtgccacacaggagcgtctttcctcacaccgcgccacatgcacccgagcaagacgagagtcgcgccgcttctaaccacagcaaggctcttgccttgttgacacctcatgccgcgccatcctagctcatagcaggacaagggcctcactaccccttcgatctatccccatctttcagcctccatgtcgtatcacacggaaccaaatagttggaggtttcattcatacgacttgtatagacccggactcaagcttgtcaaaggtataccacatagtactcctgctaagcatgacaagatcagagagacttaaccaaactacaagcatcttgagatacgacgatgaatttttgagggaatcaaaggcacaccaaagtaaggaaggatcaaatggtatggtcacgacgtctgcaaaagtttagacaaagtagtggacacacaagggcatatatttggtacaagtagtggacgcgtgctcgtgtcagtacaacctgacacctgacaaacaatgcatcatatcccattaccacctgccatcataatagtacatggtcccatagggaccacttacaactccttttataaacaaggccaataaagtcccactatatatacccttcaacttcattagaaaggggaagagcctttttcgaagattataattaatctgaagagaaagaaatctgtaattttccctctcacacaatctcttctatatttctttataattatttttgtttaaaatacaagatttctagtcacgatatagttgacgtacgagttcttatcgtgaatatattttttttaatgataaactgtgaaactctcacaaaagttaaaaaataaaagaaaaaaaaaaagatgttatcttaatatttttgtgcattcttgtataaatataaataaacactaatgtttatattgatattatttatatttttacaacttattaacctcttgcttaattctaaactcgtgacaatttatccatacataatttattgaggagtgttaattacgataacttattacaatttttttctcaatctttacgtctaaaaataaatgtcgaaattattttttgttcttacattttttcatgataatattcattataattacaatatcatctgtgtagtttttttaaaaaattctaaatagtgtacattgttaaaaataaatttgaaattttttgaataagtttggtgaagtagcattgtaacgcccgtattttataataataaactcgaaaattaattttaataatttatatattaataatcacatggatcgggatcccgagtttccaaatacaagttaaaagtactttactactatatacatatatatttttttaaaaaaaaaagtttagcggacatgcatcctcaaaatacagact

SEQ ID NO: 296994 - DNA, 3012 bp, Cannabis indica
tctctctctctctctctaaattcaccaccttaatagcctccaaactcactattccaaccaccacgaactccggaggaccacttgacacctgttgtcgtagctcctccatcgtcgatcgaaggcgggaccatgtggaataatgggtaagtattatttaaaatattttgttaaacaattgtaaaagtatagttcatttttcggtatctgtgtgattgttgtttatattggtttgattttgatatttttgttttctttgcaatagcgagatttcattttttggtgtgttttatgggttttcatattgtttttgattgttttacgatatgtaatcgacaggttctcggttttaacaaagcaaggtcagggaagagctttatcaatagttttacaataggtttttgatagtttcttgagcttctgcatatttttttaatttttttttaccatgttatcgatgatatgtccatactatctcaatagatgtatataatttgatatggactatagttcacgatggtttatcgataggtcctcaatgtgttctcgataattttgcctcagtggttttgttacttttgttattctaattcattttcttttggttggtattgaattataagattggttgtgtttctggttttattgtatgatgttgttgggagcgttaagggttttaattgggtttataaaagcgaaggaagtatgatgttgatggttaaaattgacacaaccttacagaaaatgtgcgatattttatacgaagagttggaggttgaatcattggcgtatgatttgaaattggagatttatatgttgtacatgaaaggccaactagtttcgcatgaggttattaagaaagaacgtcaactaagagtgttcttagagaagaaggcaacaatgtcaaacatataatctatgccattatttatgatgaaggtaaaaagggctaggaatctgctgccccctcgtagcatggttgagacttttatccctaaaaaagatattgtggttggtgtgaatgaggaggttcatattaatataggtgaacaccaagaagtttcaggatttggtcagtttgatgagttcgatactccctactacagcaattatcctattatagatttgaatagggatgacgaagatgagttagtagttataaagccgtagaggtaccttccgtgaggttggattgtgcaccaagcaaccattgtggagagagacaatgaagatcccgtgatgaaaatcacaatacacctcaataaggaagattagaagaatatgctcctcgtagtgcactcttcttttcatttgaagtttgtaccaaggtcaaagctcttatgtggacaaagaaagatatacaggaaaatcatgtcctactacttctttacaaagtaagcaatcatgggcgatacaacttggcaatttgtacggaaataagaaagaattaagacaagtagtggggtatgtttgcactgaataacaagttttagtggatggtgaataattccgacaccaatgtgttgtacattacatgcaaggatccaaattgtaaatgaataatgagggggaaaaagaagatgcgttgtgacaactttgaggttgccgtatatcacaacgaacatacttgtatcctagatactaaacattctaattactgtcaagcagcaccgtgggtggttacccaccttattaagggaagtacacccatgatggaactaattataaggctataaacagaaatagggataattattgacgtcatgtgcatgtaggagggaattttgtatcattttgtgcatgtaggagggaatttactttttgtcatcatgtgataattattgatggtgtattcttgaagacgaagtatagtggcttaatgttagttattgtggtatacaattcaactaatcaattgtttctgattgctttggaaatagttgagagtgagaataatgactcttggacatatttcatgcataagttgagggaagcgattgaggtggttgaaaacttaatgtttgtgttgaatatgcatcaaagcattgaacatgttgtaccacttgtttttcttgacgcatgccactgggcgtgctatcacaacattcttatgaatgtgaacgccaagttaaagattgatgcatgtccctccaaaatatatcatgtaccatactcgtggtcgtagatggattgtgataaacaatttaaaaagcttaaagagatggatcctgccatttctgcatatgttaagggtataagatttgaaaactatgctggtccttattgtccaggcgatcggtaaaacataatgaccagcaacactgtcaaaatcttcaacagtgtgacaaaagcatacaataaatattcagtaactacttttactgaatttatcaagttcacactgcaaacttggttcattaaacgccttcaaaaggcagacaaatgtacaacctctttagcaacactttttgaaaatgatttgacaacataacataaggatgtgaggcttaggcgcatccaacaaaatagagccaatttgtttaatgttgaaagaggtggtgatgtgaacctatttgaaaggaaatgcacatacggtgtgtttacattgctaaaagtctctcatgcactcatgcatgtgccatgagattgataatgaatgcgaatgtgtacgctctctgcttcccgaatctggaaaatatttacaataggtggcgttgtgtgacttcatcagaaactagggaatgatttttgcaatgatgtatattctttttaacctaattaaccttaaatattaatttctactgaaattattataaaactataatacagtagaacctctatttaagaatactctactcaagaataacctctaatttgttataaaaaaataaagtcccaatttgggccagttataaataagaataatctctatattgtaattagttatacattttttttaagtcccgtattaataaaataaacctctatataggaataattacatcttaaaaaaat

SEQ ID NO: 296995 - DNA, 2952 bp, Cannabis indica
cttcctctgcttaaatccttcaaatgtaagccatggattagtataaataactttgatttgatacatgtaggttcttaatcttcataataaaaaaagaactttggtctgaatagtttgatacaatcggttattaatcgagtatcactttggccatgggatgtaattggggcttctagataatctatatgcgtaattgacattgttgtttggaccatttattttgtgaaaaataaaaatgcaccatttatattttttataatagtaaaatgatccttgtactttaacaaaaatatttttggccatcagggtaactctctcatgagcatccactttggcttttttgagcttcttgttggcctcttcaagattcttttgggccagttggttagcctcgcgaagctgctcatttttttacttttaaagcttcttttttaattttcaaagccttctcagatttctctaaattatcgacatttgtcttttgtcaagaaatttcttattggacattgttccattgcttagccaagagctcgtgttggttaatggacttgcgaagctcaatgttaagttggctgatgctctgaaaacccttttgttgagccataaaagatagaaaagaagcttgcatagcacgagatcaaagaaagaatttaaaatgaaaaaagtaaagagattaattggggagaaatcactttggtgggaaaatctgggtctcgaagaatttcgtgatgagaactcttggttcgagaggtctgaagcttggcgattctgaatttgagaagtgcagtcgaatgaaatttgaagaaaaaaagtgaaaaacattgaggccatggaacttcaggaaaaaaaaaaagtggctgagaattttttgaattttaaggattttgtaagtgaaaatggcaaaagtaaaggaattttgaaatttatacccaaaaggtgaaaactatttgatagcgatgatgatagatcgaactgatgtgagctattagaaagagaaaggtcaaaacaataaatgctgaaatgatttgcctcgaagttttgaatcaccaaaataaaagcatacaatttttaaatggaaaaagtatgatcgtacccttaaggcaattaagaagtcctttacattttaaaaagtatttttagggggcaattgttatactcatattttaagcagcaatatggagttgacacgtataacatagttgaaatatgaaccgactcaaattatgcatcaatcaatgcattcagatgacttgtctcgagaaatacagttgatagaaatacttgaactcaccatcatgtagataatggcgagacgcgagtaatactaccgactgatgagaccaatgagaggaatgaagaaaagctatctcgggataaatagagtacattatagaattgtttagaacaggtagataattagtttacagctcattgacccacatacacgtgaatttattgaaagaataaagacaacaacttcaacatgattcatctcgtttttgtcatgctgcaataaacatctcacatatatctcactcaacattaacgcgaggaatactacgacatatacttagacgctgtcccacgatggtgtttaagaaaagtattgattgaattgcaagaactactgaagcgtagttagcataaccgtctataaataaggacaaagagcagttacagcgattatttataattattccatgtgatgtaaatatgaaacatattgaatgtttacatttcatgaacaattacaagtaagaagattctaagagaataactgtcattttatactcctataaatagggatagaacccaatgaacaaacatagcgacatttttcaactttggttacaagtttacgctataaacttcctcccatgtcattctgtaacatccaaaaatttattggctgtccaaataatatttgcaatagctataaaacaaatgtagctcatgaatttaagattaagatgtgcaactctcattcacacactttttttgctcaagctcattcacacacttaatatggtgattttacatttaatttttttataaccatgctataataggttgccaatagatcattcacacacttaatatggtgttttttcactatgctctcaacaaaaaaccctacaacgacgaaatcattcatcactttcatgtaaaaatatccatgttgtaaactttttttaagaatatcaccgttataaatttgatgaaatttttttgattaaatctataatcataatgttgtcgctataggtcccagaaaaaaaatatttgtttaataaatttcaagagaaatatttgtttgatatttcatctttagcgatatatgacatgtcgttactgcatggtgttaacatccaaatttcgtaccttctttcagttttgttaaatttcaggtgtgggatttattgttcaattttttcctttgtagtgatgataatgtcgtcacgaaagatctttatttagaaaaataaaacaaataattttggcactatatatcttccaaaaattttagacttgtgacactattgatactgttgcgcaatggcatttatattgtcgcaataaatattgtcacaatataattatttctgtgtaattttttagtactataatgtatataataatttatcatagaaaaaaaaaaaaaccaacagtaatttatcatataaaaccttaagttgtttttttttttgaaaagggggccttaagttgctcaaacttattagaaaaagtatatatttatacattaaaaaaaaatattgagtagaaattatatatatatttataaataggagggagggactataataggatacaaagaaataaccttgttgtggaacacagtctaattgaagcagtacttctaataattattttctccaattatttttgtaatagaattgtatattaaatatatacaaaaataattatattata

SEQ ID NO: 296996 - DNA, 4044 bp, Cannabis indica
aaaaaagaaaaaagaaaaaactgtttccgccaaaattgttttaaataatttagttttggccttgttttattataataaattgaaataaaaaatgaatttatccaattccaatatttttgtttttggtttttttcaaacgtaaatgattattttaatcccaccactcaccatacccctttcttctttctctctctctccacttctttttctcactgttctttctttctttcatttctgtgttctttttttttttttttggcagcgaatacttccacgctttctctgccaaaatatcgctaaaccctagaaaatgcttccaggtaaggcttcggtttcgaattcggtttcagcctgattgccagatctgaaagcgttttctcggtaaagtttttccactgtttcttttttctttttgtcgtttttgtttttgagtttgaatttgtgttcacatttgtttattttttgtaatcattattgccttctttttgggcttagatcgaagttgagcagtgatttttagcttacgcacctgcattttgttgtagatcgaagtatgatctttgtgcttgaggaattggtgttttgtttgtgaaaagctttgagtttttggtacttttggagtggtgactggtgagtagctctgaatgatattatgtcttttttggggtttaaaagaaggtgataaggtttatgggctttttgttaatgtagttgatgtttgaacttaagaccagtgagaaaatggtgaaacagagttagcattgagcttagttgagctcccagtctttgatgtttttatgtttcttttgccgtttctttggaaccaaacagattgttctgtagtgtttgatttgtttttgttggaccaggggagctttcctttgtttctgaacttcatttcagggtgaactgaaatggaggagcctgtagtacaaactggggaagagccaggagagaaaatccaagttgccgaaaagcaagtttcagataattcatcattaggagagaagaaagttgcgaaaactgtgaatcctggttcttctgctgtgacttcaaaggcctcggtaccgacgggtgttagtaggaaaagggtgattgaccaaaaaaccagttcggatgtgaggaaatcatctgtgactggttcgtcacacagttcgaattcgggtcccgggacaaggcgaaacagcactggaggattggccgagaagccaactgttgcgtctgctgcaaaacagagcaatgccactactgtggctgggaaaaagacaacagagccatcaaggcggtctctccccgagctcaggaggagttcgctgccttcagtggctactaaacctttgaacagaagcagtatttcagaaactaaaaaatcaactccggtggcttcaccagccgaccgtagtctgagaagatctagtgagtctgttgtaactaagcaagcaacaacagtcagtggtaggtcaacagtaaggcaatcattatccgtttcatctccttcatcttctacttcttcaagaagagtgacttcgacttcattagatagttctgggggaagcgcgataaggaagacggtttctaagctttcttctccatcttctcggtctcctacagtctccacaggattgagatcttcgtctctgtctttatctcaggatcgaagttctactctatctggacgtaggaaaacgggtactcctgatagcagggattccaagttcattgttcttccgcaggtggagataaaagctagtgatgatgtggtgagtactacggttatctaaatcgatatttaggggcttttagctcatacccatctcaaatttctgataatgcttcacttagttaatcttaatgatactcagatagtggttcatcttcattcacaatcaatgggaaaagtattttcctttactttaaaacttaaattttcactcttctcaaataatgaaaaagataagctttataagaccatattttgtttgaaaattttggaaaattaataatttaaaatacacgctgaaaaatggctatgcttggctatctgttcattcaatctccgatcattgccaacttaattcaattctacatcatttaaattttacacaaagacatacatttgcgttcattctgcagccacatggtgtatgtatcgtgcttagaatcagagcactgaagttgagtagtgttggtctcattgcatgctttacaaaaattgaatatgctattactctggttttagttctacacatgtatgtatggtttctagtgtaattgtagcagtggtaatcgtcctcatagtctttacttatcacaactcttaaacttatttcagaggttggatctcagaggtcacagggttcgcagtctcacagccaatgggctgaacttgtcatcaaatttagaggtaaacttgtgttatatatggtaattattaattatagaaagttgttactgttatgttactaaatgccagtaaaatctatccggcttgtgttttttgattccttgcctgttgtgttaagactgttatcactggtcactgaatttccttggatgagtcatacttctgattttagaagtatattgtattataaactattgtcttatggtgagctgcttcatgtgcattagtgtttatcccaatttcaaccccttgccaaacttgaagcctttgggttgtgcatgttcatttatggaaagaagttttcaactagcagttttttatactcaaatattgtatcatacgaagtctgaaactggagtattttaaagggttttcgggaaatataaccccttaagatgttattatgcgtcaacagttttttttttccttgaaaggctttacgaattgtcattaggagtagaattatgaccaaaaggttaagtgacttgcatgaaattctgagccactacttttttctaagtgatttttgtttgttcattaaaatgacattctttgttggcagtttctttatcttagagacaatgcattgtctacattggaaggagtggagattttatcacgggtgaaggtatattacaagtgcctgagaagctttcctgttattatgatcacacctgttataagaataagtaactaatggagttataaaattttataacaatgaacatgtaagcactgtagcttgttaattgatctataattatttcttttaaccaggttcttgatttaagtttcaacgatttcaaagggcctggttttgaacctcttgagaattgcaaagccctacaggtaaaacactaagctgcctatgaattgtcatgtattaaatgctgactcatccatttgtatgttctgaaggttttttttcccacttatgtagcaactttatctagctggaaatcaaatcacatcacttgcaagtcttccccagcttcctaatttggaggtaagagcagactataataagtcttatattgctgatcaggtttcttaatagtaaacttgtagtggtcttttcaatctgtcttagtgattctttattcttgtttgtttcatgtcccttatagttcctctcagttgctcaaaataagctgaagtctttatcaatggcaagtcaaccacgactacaggtctagtttctttggctgttgcaagctaattcaccttttcgttctttgtttgacgaagtgcttctcacttataaatcatttattgcatttgcaggtcttagctgctagcagaaataaaatttcaactctaaagggttttccttatttacctgtccttgaggtcagtatagcatcttatgttatttgattcaggctagattttagttcactttctctgtactctaagaacacattggaaatatatgaatgctccaccattggttatttgcttcatctgcagcatttacgagttgaagagaatccagttcttaaaatgcctcatttagaagcagcatgcattttgcttgttggacctaccttgaaaaagttcaatgacagaggtattcttcggcactatttatcttattgatttttatgaattggcataatgttgtgtgtgtgtgtgtgtgt

SEQ ID NO: 296997 - DNA, 6849 bp, Cannabis indica
aacaagaaacaaataacagaaaagcagttacaactaataacagaattgtaacaaacaaaaattgttgttggtttagtcattactgtcattggtttcctcaatatgccccctcaagctgcacgggaagagttccagttaatgcttgctacacaggaaattaaactgtgggaaagtaaaggcttttgtgaacatgtatgttggttgttcctctgtgggaatataggagacattaagtttgttctgtagcattaattctcgaacataatggacatccacttcaatgtgctttgttctggagtgaaaaacaggattggaagctagtatttgagcaccttgattatcacaccatatcattggtttgctgaacaatttaatgccaagttcttggagtacagaggttatccacacaatctctgtagctgtcgtggggagggctctatactcactctttgtactcgaacgtgacacagtcctttgttttcgagagccccgtgagactaaatttccaccaagcatgacacaaaatccagttatagatttttcgatcatgaatgtcacaagcccagtcagcatctgaaaattcctcaagtagcagtctagatgctggtttaaatattaggcctcaattgagagtgcctttaacataccccaggacacgtttgcaggcacaccaatgagcaacaattggtgattgcatgaactggctcagtttattaacaacaaaagataggtctggtcttgtgagcgtgagatattgtagagaaccaatgatgctcctataaagagtggggtcttcaaacaactcactgtcagtagtgtataatttgtggacagggcaaattggagttgtacacggtttggaatccaccaagtttgttctctgtaggatgtccattgcatattttgtctggcagagagaaatgttcccaccactggtattagcttcaagaccaagaaagtaaccaattttactaagagtctttaaggcaaacttagtttgaagttgagagataatttgttgaacatccagtagttcagctccagtaactagaatattgtcaacgtagacaagaaccagaagaagattgccatttttgtgtttgaaaaagagagaagtatccaaagcagagttttcgaaaccccaagacacaagagccaactttaacttgtcatacaaagctcttggagcttgcttcagtccatagagagctttgtttaacttacacacatgattaggatagttaggatcctcaaacccttttggttggaccatgtagatatttcttttagatccccattcaagaaagcattatcaacatctatttgttgaatttcccaaccaaaagtcacagcaagtgtaaacacaatttgaatggtagtggctttgacaactggactgaaagtgtcaaaatagtcaatacctggagtttgttgaaatcccttagccaccaatcgtgctttgtacttattaatggtacgatcagcattaagttttagtttgtagacccatttattttgcaccagaggcatgccatcaacataaggaaccattctccatgttttattttttacaagagctatacgttcagtgtccattgctgccctccatttgggatgtgcaagagcttgctgcaaagtaagaggctcacaaaaatcattagatctagttagttctgctgctaacaattttggttttaaagacccaattttggaacgagtttgtatgggatgagtggacaccacaggaacatgtggattaatggtaataggggttggggatgctggccgtgtgggaagattggtggtgacaggggctggtgcagtaggggaaatagtgtgtgactcatgaactgacatagtaggactgttaggaaaaggagggtaaactggtattgggaaaccaggtggtggtgaatctgttgaagcaacaatagtatgtgagtgaactggggtcattgtgtgggttggagactcatttgaatgttgaataacatgtggaggagttgatgcagaaacagggtgtgaaaattgtggtacaggtatgtactgacaggagggagaaggggtgttgtggtaatggttgagatgtagcaaacagtttggagtagggaaaattttgttcattaaaagacacactctgagctatgtaaatacggccagagggatgaagacatttgtaccatttgtgagagggattgtaccctagaaaaatgcaggtgctagttttgaagttaaacttctgagtctgatatggtttaagcaaaggaaaacacgcgcacccaaacacttttagaaagatatagtcaggtttcttagaaaacaacagctcaaagggagtgatgtaattttgtttttgagcaggtaacctattaatcaaataggttcagtcacatgtatatgcatccgttcaacccttccttattgttgatgagtatgggggcagggatgtcgaaaaacaatcccaagttttgcaagaattagtgcaaggagacgatattcccctccctaatataactgaatagacttaattttagtggaaaagtgtctttcaacataggagttgaactgaagaaaggtggaagtggtatcaaatttgactttcaagggaaaaatccaagtgtactttgtaaaatcatcaagaaaatgtatgtagtacttgtacccttcagtggatacatgaggtgaggggccccataagtcagtgtggatgatttcaaatggagaggttgttttgtatctggataaaggaaaatgaatttgatctagcttgtcgaattgacatgcatgacaaaaggagggatcagtaggagaaacatgtaaatgatgcaaaactttattcaacacaactttattagggtggccaagtcttttgccacaaatttacaacaagttagtttttagtaaaatctttatgtggacactgatgtacagactcaaaaacactagcagtattggcataagattgaaaagaagaattatgctgagatctggtgttggaaacatagatgagtggaatctggtacaagccttctttatcagttccttgaagaagaggcttcttcgtgatctgatctttgacagaacaagaattaggggtaaattctattgtcacaacattatctttagttaacttggatatactaattagattcttggtaatagagggaacatgaagaatattattaaggtgtaatggtctgttagcagcaataccactagaaccaatattggaaatagaaagttttgagccattaccaacaacaactttttccttgactttgtaggaatgtttatgagtcatttgagttgagtcaaaggtcatgtgattggttgacccactatccatgtaccaagcattgtcctggacagttgaaggagtggcaatgtaagcctgtgaattaggtcttgtggggaagcagatgactcctctggacctgtatagctgacatcgaatcttttgtaacatttgagagtagtgtgccctggacgcccacaaagttgacagatcacacgactgccattgttgtaaccacgtccacggctggaaggatttcctctcccacgacctctgttttggttgggagggaagggtggtcgactatttgaggaggatgttggcttcttggattgagcaagattggccattggttgactgagttcaagaagtgaggcagattgggtgagctctagacgcatcttgtgattttgaagcatatattgaacttcttgaagactcagttgatcacgagacgtgagattcaccacgacagagtcatattcagagccaacaccagtaagaatatacaagatcagctaatcttcagagacaggatttccagcaacacgcaggccatccacaaatcctttcatctttaacatatattcatcaatggtcatggaccctttcttggtgttctgtaacaaggacatgaggtgaatcatccgagcttttgagcgtgtagtgaagagttgctccagtgtgaacaatatctcagtagaagattcacaattaacagcatgccctcattgatttagatatggaagatagtaaccaggaaataagaaattgatctagtctcatccaacggacaaagttaggattacgtaccatggtggtagatccctctgtttcagggaagagaggagcagggcgaggaagacgatgaagaagaatgtcttccaaatcatgagctctaatggcgggaagcacttgtgaccgccaaaaaaattagttgttctgatctaaacgtaaaggaggtaaaagcataatcgtgggaacacgccagaggagctccagagtcacctggaggtcgccatgaacgacttgctctgataccaagttgaacttttaaacacaaagaaagaactaaaagaaacacaaaagagattttgagtgaatgattttcattgatacaaagagaaccaacaaaggaggtatatatagtacctcgatataaaagcaagaaacaagaaacaaataacagaaaaatagttacaactaataacaaattgtaacaaataaaggttgctactggtttagtcattgctgtcattggtttcctcaatactctttagtgtggtgtatttatttctcatatttttctttatttgtaaccaaaatcttactcaaccacgaatgaattaggcttcttcttctattaggaaaaacaggggattgaatatactctattttgttttattatttgtaaaactatgtattacaaaggagaaagagctctatacatataggctcattgatagaggtaatacaatgtaacaaactctctgactaataagagaacctaactagctaaactctaatagcccccttcaagttggagtgtaaaagttctttacacctaacttggatacaacttcattgaaatgagctgggaagagcgactttgtgaagatttcagctaaattcatcttggaagggacatggttgagatttaaggttccatttgtgatcttctcgcatactatgtgaccgtcaatcttgacgtgtttggtgcgctcatgaaacacaagatcattgataggggatcattggttatttagatttaaataataaataactaaaagtgtatctattcttggagaatagagcgttctatgtaatcaagagtgcaattctgaatctgtagtggagtcagaaagaattaataaattaaatttatttggtaaatttcaaatctacttattaggagtttgcttacataagtccatggtccccgtactaactgggataatattattttgtagtctcaattaattgatttatttaattaattagaattctaaataatgactatgtcttatttatgaattttactaaagaaaggcataattgagagtttgtttattaattaagagacattgcagggtctaattaataaatatatttaaatgtaaatccctgatgtcttttttatttatcgcaattttatttagccaaattaattcattcgagtcctcttatttttacgatcttgaaaaaaaaatgtgtcaatatatatattatattaatattacgtgtaatgcacgcgtacttagttatattcttaatttttttttttaaattttagttatgtatatttttagttgtataattaattttttttttatcattgcctagaatttttcccaaaatacgtggcagataagaagctagacaaatggaaacgggacccacgttacccatacactcccggagtcttatcatttcaaaagagtaatgataaagcattcatctttagaagggtcttcctgaacaataaatatgtcctgtcttttcctctttgtgagtaaagtcagcctggagaagggtacaggagagctgatgacacataacacttagcacgatgatcaaaacactgtatacacatttaatgcggcatggggaagagaatctgacaccttaatctaatagacgtgttgaagggtttaaactcattccctgatttcacaagaccacccacatcaattaatagctgtataaatgagtcgtcaagtcataaataagggataaattaaatctcatcgaatacctatagataatccaaaattcatcgtaaaaataggcaattataccctaaaatcacttgggaaattgtgcaagatatggtgtaaacaaacaccacaatggtggccttgtatcaccattgcaagcttataaatatccttagtaatataaagcaaatggggatcggttggaaaactctttgtaataaatactctcataaatatagtgactcgtgagctaagactcattaataccccaataatgtaaaaaatttctcatctaatctttattaattacttcatgtagctttaattattgctggttgaaaatctcagtcaacaatgatgttattcaataagcaacattattttttattaaaaaatatttactttaagtgatatttatgtaagaaaatattataatatttaaaatttgttgttaattataattttattttaacagtaatacttttaattttataatatacatttttaaaacaataataataaaaagatattttttataattaattttttgtgtggatatgattcattaaataacataattttttattaaaaatatttaatttgagtgatatttatatataaaaaaatataacaatattcaaaatttattgttaattataattttagtgtaatgtacttttaattttataatacttttaataattttaaaaatatcaaacttttttttatttttttaaataataattaaaatataattttttgataactgggaaactagtaatagtgattctttaagaaacataactattttttctattttattattttaaaaaaact

SEQ ID NO: 296998 - DNA, 2080 bp, Cannabis indica
atttaagttatattttaataaataaattaaatttagacatttaaaatatccttttaaaaaaataataattaattaattaatttaacaatgttaattttaacagaaaaaaaattaaactaaaaaaataataatcacatttaatataaaaaatatatatataacgagtaagtctcatcaatattaattaaccacattactaattactctacaaaataatgtttagaactatatatacaatattaattactagataattatatacttaatacaactactaatcaacctggtcttggttttagaagctataacttaaaatatgtgaattttcggggcggggcggggcggccacctattcaaattagattttcatatccgataaatatataaatataagttgaatatgagagctcaatttataactacgcgtttaagaataaaaaaataatcacgagtgtaataaaatatttttgagccgataaaaatttacaaagagagtcctaaataactacagactacagtatgcatgtatacgatcatgaaagacaaaatagattaaaaaatctctcctgaataccgaaacagataaattatatactagagcgaccttaatttttaaggaatgtactatacaattcaattaccaacttcattgtttggttatatttggagtattatattaaaatgcgaatcaaagccgactcgtacttaaggttcacactttttggaagcccaaaataaaaaataaaacacatcattagatttttatttaagtaaaatattgtgaacaaccaaatattcataaattagttgattgagatgtattacacattatacaatggtgtgggttcaagtctcttaacactttttctcaatattttttttatatatttctgaaaggactctaaaatttaaatcgtcttaggccatgtattctcatcaccaaccctaacataaatatagtacaaaattattaattgcatctcaaatttcaaaaaagtaacatatagttttgctcttcttcagcatgaaaatgaagaccatatagtatatatatattatatatatatatatagttggtcaatatcatgataacaattaggttaccataactaatatattcttttaaaaaaaatgttaatattattattatataattttgtggccaaaacatatttaggaccaggagatccacgtgacaaaattaataatataattagggcacgatcgatatatgaaatattttatagcaaacaatcttaataattaatatttttttgagagattaataattaatattaatttaaacaaattgatgaaaattaattaattaattgatgaaataattaatatgtatatatatatttatagcaaagcaaatcaatcttggtcggttggttaggtaaagttttttttagtaaggtctcaatctatgaaaaatatttatttattatcttaattaattggacaaaaaagaatgtctgtctctgtcctcatcgaatgtttcatgacttaattaattaggaaataaattaattaaatttgtaataatattgtattatattagaagaatatatctctatattgtatttaatttgtaataataaattaattaatgtttaaataagtgaaactaatagtgtcatttattgcgctttaatattagattaattaatgttaaaaaataagaaaataaaataaataattaagaaataaatttacctaatatactcttgttttttatctgatgagtaattttaaagtattattaccatatcaaaaattaaattttaaatatttatctgtaatcgatatagttaaacttaaatatttatatcgtaaattattttatattttttatataatcatactctgatattggtaagattttaattttttttggtgggaaaaacaaaacttaattgagcaaaagagacctaataaatttaactaggttattatactattatgaaaagggcaaaaagggcattttaactttatttcagcggaattatcttatatattattttttttatagtttggattgctccgatagtttctatgtgggttgctatttgtgtat

SEQ ID NO: 296999 - DNA, 2703 bp, Cannabis indica
aactgaaccactataattcactgtcttactgttattttccagtttcgttgattgttttcccattcccagtcgagtactcgccattctaggttgaatactcgcacttgtcattacccataaaattctctttcgtattaataaaataatataatttggtgttgcgaaattcactcgacaacactaagcttcatcgttgctttggatcagcttattagtaaaacttatatgaatttttctttcccttcatttaactgggcacaagaacactctctgaacctttgttcccaccaaccatcgttataaaaccaaaacacttatgtttagggctatattgcttttaatgagattgcaggaacaaagacaaggaacccagggtgctaaagcacatgtttagcgtgttagggtttatgctctaaaatgtcagtaaagataattctgtttataaatataagtttgacatttttatatatgcttaaatgttaaattataaatatttaatattgaatgatctatatataaatatcgaaaagttcattattcatacttgatgttgtgacttatactgtacagagaattaaaatcactaagccatgaataaaatagtcagcaacatattaaagttacagaatctttaatcaatggttactagtgcagttcactgttgcttgtatttagtgcaagcaatctcgattcggattactgatgtagtatgacatctaagtgaatgtggtgtatataatcgacactatatatgacaaggacctatatatatgtagattggcctgaatattgagtaatcatgcatgaactcttgtccatgttattagcttctttgattcactcattaaagctttcagagaagatgattctgacaacttctatttttggaatctagtaacgtagatggtggagaacatgatctacaattatggaatactaactttccttaatgatcaaatgttggtcccctttaagtgttaattctggaaaaaaaaaatttgttcacaaatttatattggatctaaattatactctaattagtgaattaatggtactaaaggataaggaactaattagaaggtaaaaaagtaatttaaccaaaactaattacgaactaatacaaggagggctaaccactggaattgattatatcaatggacactgcagtaaaactcagtaaatataattctacaattactaagatttcaactcaatatttatagttgagtaatcatggaactaataaacatgagtatttgattgatgagattcaataaatcaacaagtttattagagcttagaattataggtctatggtccttggattgccatcttgaaacactatcaagggtagagataaaagttgcgtatggaagttcagaaaaatctattttgatttgtcaaaatagtaattatttattttgtaataaataacttattaataaatagattgggaaaaagataaaagttttctggacaaaagaaactgccaaagtctcattaagatttaggtgtcgccgctatcattgtgtcctgacacaatgataggcgctctatttataaggttgtccccacttgatttgtttttgggttaattaattcaaaagataaatatttatttaaatttgaatttaaaaagtagttatagatatttttattggtttagatattctctcaagatagttaagagattccctcaagtaattgagagattctctcaatcagttatacggaataatcatctataatataatttagttatattatttattcaaataattaaatatgatttaaatttaaataatcatttaaataaatattttattgttttttatttaaatacatcgtattaaccaaaaactgatacatattatttttggtaagccgaaaaagaattaatctgattaatattttttctccataattaatatagaataattcttgctcatgtgttaagaattaaataagaactttgtaaacactttatcctactagcttacactagtcctagtgtgtggttaaagatctgaaagactgcggtgtgagtatatcgagattagctaaggatatatacaacatacaaaaagactcgaggataccctgataggcttcgagagaaaaaaaaaattcttctattttactttagatataatatatatgtaatcctgagaatatgatacaataatatttgaaaaacatttatcctctatgcacctgatttagtacataaaaccatgatagccctggttggtcttcgtggatttttttctttcccctgatcgattctccatgatatctcagctactgtagaatttttaatgcttttgctttcgaatcagatgaaagaataaaagtttaaggcttcaagaattctataatagatttttcatctttgagagagtttgaagaacatttgaagaagttttttgaaagaataattggattttgagaatgtagcagaaatgatgcctataatgaagctttcaccttccttttataggtcatttaattcataagaaacacacttaattaaaaaaaatctaaagaattttaataaccaattcctaaaattcctcaacttaattttgaaatttaaaattcaaaagatattcagatttaagttgattagttagagataactaattttcaacttaaataggaatatttaataaaaaattttaattaaacttcaaaaagaatcta

SEQ ID NO: 297000 - DNA, 5204 bp, Cannabis indica
tcacttttaggctaggacatgtccaaagagcatgcccaatcgtttcgtctttgctccaacaaccgaacacgtttgatcaatttaatgcctcttttaaccaactcagtcttagtaggaatccagttatgacaaactctccaaatgaaattcttcatcttcggagttaagtttgagttccaaatccccttccaccaattcctcaccattactttgttggatgtctcgggtccctgtttctcaacacagtttaacatatacccactagagaccttgtattctccatttgttgaatcatgccacactaattcatcctctccaccatctcagtttgcttgaattcccaaaatccagggaatatcttccctatgcattttctcttttatgtttcttatatcccagctcccattttcatcaaggaaagagcctataagtgtatgaggagggaccgggaccttggcccttagtcgaaaaggatagccacgagggatccacctatcttcgtttattcttactttgttcccgttggtcacacgccatcttaaccccttcataagaagctcacggccccataagatgcccctccacacattagagcaccaagttccaagacaagcacctaggaaatcagtatttgggtagtatagagcctttaaaacttgagccaccaagctatccgggttagtgacgagtttccagccttgttttgcgagtaatgcttgattaaagtcctcaagatctcgaaatcccatacccccagaccacttgtccttacacaatttctcccaattaccccaatggatttgatgtttggttgtcgaagatccccaccagaatctagcaataagagcttgaatctcacttaagaggcctttagaaattcgaaatcagctcattacgtacaccggaattgcttgaatgattgattttatcaacacctcacggccggcttgggagaatagacccattttccatccttggagtttttcccacactttgttccgtaccaaaccaaaagcttctttcttgtttttaccaacaaatgcaggaagaccaagatatttcgaatggttctcagtaaaagtaactcccaaagctgatgcaagtcgttggccatccgtgttcttaatcttattcccaacacataaattggatttggtgaagttaatgcattgtccagataaggccgagtaactatcaagcacttcctttatagctttgctttcctccattgtcgcatctacaaatattaagcaatcatccgcgaacaatagatgtgtcaaccttcttcctagatttccaaaacgtaggccatgaattttatttgctctacttgcttcatttaacaaacatgacagcccctccgagcaaattagaaataagaatggcgaaaggggatctccttgcctcaatcctctctttggaactatgtttcccttagcttctccatttagcaaaacagagaaagtaaccgtcttcacacatcccataatcttgctaatccattgttcctcataacccaaacatctcatcatctcttctatgaaatcccattccactcgatcataggcttttgacatatccaatttaagagccatcttctttccattcccaaaacgacccttcttcatacaatgtaagctctcgaaccctataatggcgttatcttgaatttgtctccctttaatgaatgcactttggttttccgagatcaccttctccatacttagtttcattctattagccaaacatttggatatcaccttatatatgacattgcataaacttaagggcctatagtcactcaccttagttggatccgtaattttgggaataaggcaaagtaaggtgtcatttaggcagctgcaatccatcttattatttagcacctccaaacatatagcaataacctcatgtcccacttcctcccaatgattgtggtagaataatcccggtagaccgtcctttcccggagctttgagagggtgaatttgatcaagagcttcctttacctgttccttggtgaagtcttccattagcatgtcattgtcttggctggatactcgattcggtacacaccggtttaggacatccatcatatttggttcggtcttgaagatgaaaagagttctatgtatgaatgaatcaatatgtgttctatttcttcctctttgttgcaccatttcatattgtcatcgaagaggccattgatcttgtttttcttttttctttgagaggccttgtaatgaaagtatttcgtattgcgatccccatgagtaagccaaagagctcggcttctttgcttccataacagttcctccttggcttcggctacattcaggtctttctctactcttcttcgattcacccaatctatctctccacttgaagaagagagatatttcaattcctctttgagtttctttgttttagccccaagttcagccttctttcctttattccactcattgagaacctccccacagtggttaatgcgcccccttatacccttggccgaaccccaatttgatccatcaagccaaacattgttcacaattttaccacactcctcttcaccagcccacgcttgttcgtagtgaaaccgagatttccacttgagatccgatttagagggttgtgttctattgctgaaattgaggattaatggccggtggtccgagttccaccaaggaaggagggtgactttagatgcaccgaatttcctataccactctggattcgacaaaaactctatccaatttttcaaagaccaagttgttttgacgccattgcaccagtaaactctccccctccatcttaacctctttgaagtttgcaatatgatatggccttttgaaactcccttatctgagaagcttgttttaaacagccccctttcttctccttctccctcatgatttcattgaagtctccaccacatatccaagggccttgtcgcatgtctcgaagtctttccatgagtagccatgattgttttctcccaccggggtccggactcccgtaaaacccagtaaaactccaaaaaaaccccagcccattttccactttcgcatctatgtgagaaaccgtaaacgagttgatggtgacctcccaactatctttccacaaagagccaaaccaccactcttccctctggccgccacaacaaagcaactatcgaaacccaaaacaattctaattctttccatagccgcttcattgagtctcgtttctgccaagaaaatcatcccgggatgatgatctttaacatgggagcaaagagtttttaatgtccaagggttcccaagcccctgaacattccaaagtaagatattcatttctctcggcgacccagctccgctgagttcgccgcttccaaattcaccccagagatcaaatccgaaacactagaaattttctctggttttaccactttagctgtcttctctatgcttccaatcggttttccttcctggttcgttggtgggagattattcttatcatcacccttgtttttcctcttagccatcacccttggttttcgtccacctttctttcctgaattggcatttccatctgttgtcccaaagttgattggaatgtctttccaatcgttcccagtttcagagttatccatcggtgctttcaattttgaattatggttctccctgtgaattcttttcccgttttccttctctggctcatcttcatttcttccaaaatcccaacaatcagccttcttttaatgcctgaactacttccccccacagattttcctttggttctatcttcattaatcaattccataaggttagtataatcaaaaggtaggaaggagttagaaattggtacctccacaagattggaattcttgttagtgattctcggcactggtttagctctttgaatatccgaagtagaagtcccagccgtttcctttgatatattagtcgcaggatcctggttcttcttggataaattaccgtcttctttgccaatctccatatcgtgtctgtggttgaattcagagttcatagtgaccttctttatctccttctccttattgatttggggtttatcttcaaatttcagccatgctccataggctgggaagcaattcccctctccatcgataacattcacttgtttcttggcacatgacttgtagtcgtgacccacaatcccacagctgaaacacatgaagggtaatcgctcgtatcggaacggtagccaaaccttgtcccctgaattaggaaaaagaaacccagggcacaatggtttatctatcgaaacccagaccttgaaccagaaaaagccattcaacgttatctttgggacatcttctttctgaatttcaatgacctcgcctgccattgaagccaatcgacgcatattcctcgcagatattgatcgggtaggaagattcaacaccctcccagttagtgggaatcgattcaattcgatttcccatttcgtcggaatctttgtgagcctttgtagaatcaagattccattgttcaagagccaaggtgatttattaacaattctgaataaatccccctctttcttgaacgagaataccataaaagtggcctctgttgtactcttcttaatcttcactccccaatcaacttccgataaaccccatactctaccagaattgttctaatgagagtcctattcatggttttgttgaagcagaacctccccatgagacaggacgtttccatctcctgagcttcgtttatctcccgtccatcttcgtcctccatccgaaggttattcgttcgatcaagcagatcatccatgggcaattcaggcatttgaggcattcctacaggaaaggctcttctccaggagagagcaaaaaaaaattatattttgtctccaattttcaattatatctaaattagtgcatttttttttcttttctttgtagaaaggaaatgagggaaaattataagagattacttttatatgtataaataaacggaaattttcccaattgcactaaaatagaaaaaatttaacaaaaatacggttacaccctaaatacaatttatatacggtaagtctaatctaaattacagaaaatacgaattcagcttcttcaacaccttaagcattctcgtctgactgaaaaaaaaaaaaaaaaaaaacaaaaaaaaacaagaagcaccattgatgctcgacaaagcttgctgaaa

SEQ ID NO: 297001 - DNA, 2500 bp, Cannabis indica
taattggtttatgttcattattgctgtcaaagttgtaagtttattgcagattttatgattgaatcctcaatgttatttccgctggaattacaacactatacaattataaattcttaaactattttgtgtcaatagcgctaacactctttagccaaatcaataaattctacatttaatgatattttatatcttctgtagatttacctcaaatcttttaaattttgctctaaaagacctcattcctaacccgctaaagatgatgctattttagtacaatctttggagctacaaccttcaacatcaatttctgcctcgtctactgtatcttcctcatggtgatctccgtcagccataataagttctaaaaagagaaagaaaaaaaaaccaaataattaattacccatactaaaagaagatatcagagatgaaagagagtcttatcctataattgcttggagaggtctccattgaatcttacatccaaaattaaatctctcatggagtatccattccaaatggttagattgattatgacaaaggccaatcgaaaggaagataaaaacatcattcaaagccataaaggtaccggacagaggaataaaaattttgccagcatttttgctgcaatgtggatattatcccaaaggaattgaatgaacaatctacttttcactatatttgaagcatgttcaaagaaatatccaaaatatcctatttctactaaataatcagatttcaatcacaggcctaagttctactcttcgaataactaataaagcagctgtagtcccaaaacaggatactaatttcaagtacttataaagattcaagaagttaaagaaaagaaattcacttggcgatgaattgattgacgattgtagagttgaaaaaaatacagccttggggaacaaacactaatgccgaataacggcgttaagctaaactctgataaagatagacgctcaagaagatcagacctttcttaaagagcatagacatgatcaatcaaagaatcaatttttgagtttaaatccttcattaacaactgtctcggggatgcacaaatgatcaaagggggtgtagcgtctgggtactctcttgttttgatttggaaaaggattttgatggcttcctcaaagagtttgttcattcactgaagaaactttcactggttttcgctttctaaaacatcgatttattttggtatatttaaaaaattgagaaaaaatggtaaatggtggtgttactacgtatttatactttggagaagtgatccgcatgatacccaaatcaatggcttagatttattttcaagaaacaaaatacagatccaacagtctgaaatgccatcagtcaagcattaaatgttatatttgggatcgagggaaactgcatgatgatattctgctcaagaatcgcaataatcagctgccaatttaataactctattccacacacatcctcgataagcgttaatcccacaaactagttaagcaatgccacatatcgccttaattaaaaaaaaatggaagatatcaaccacctctaaagataatatggaattcctaaagatttcacaccctccacctgtccatctgtgcagtttggaacaagcctccacaacccttagagttttagaagcttggggaaaaatgttatttgtgtttctggataaggacgcgtagaatttccatattaaatgcagctcaaatatataaggcataattgagataactgggttggatccataaatcaccagtccttctagatgaataaggaataactcgtccaagcaagatcccatccggcatggtcagtatttgaaagacataaaatcgtgttaccagacaaagtttttaacatgtatctagaagcccaatatagttgcccatttattaccagattgcacataatcagggattgtcttccaataatctcaaagaaaagattatatctttctaaataagggaagatggtaattggcaatcaagtaatttatgtgtcattaatttccacaaagataggacacagttttgacaaccagcatcatgatgtgacattcacatcaatatatacaaggaaccccatgggttggacttcaccaaataagctcaaagttaatattttatttgtaaactccccattaaagggaaaagggtaactagtatggtctctatactctataaatattacacaaactctacatgtacaggattggaatttcttggctcatttgtttcggaaaaaaatatagtgttcataccttttgtaatccctaaggcttttttagtctctcttattaatattgactcgtggactaaggctagttaacgctccaatcacgtaaaaatcttgagtgttcttatttcttttaattctaaatttttattctttggctcttacatttaaattatttgaaacgccctcaatatttaggcacgctacccaaaatatttatgcaaacccaaatcccctaagcgggattactaatcaaaatagc

SEQ ID NO: 297002 - DNA, 7646 bp, Cannabis indica
tttttttttttttttggatttaaatgtgcaaaagtcagcttttttgctgttttttctgtaagtttggttttcttttcatgctgatgcggttaaagaaaactttgttctcaaattttcaatgttggattggtaggaattgtgtctattgttgttgtttagaattaattccttttttttttctcttcggttctttagtttcttatatgctgttgaagtcattagatatatttttattagtgcagaaagcagtaaaactttatttaagtgtgataaactaaattatttgttttttttcctgttatgcagcccgttaaaagtcctgtgaccatttgtggtgatattcatgggcagtttcatgatcttgctgaactttttcgaattggagggaaggtatctgtttgattcagatctttattgtaccttttattaaaaataagaaataatagtaacactaataattattatttttaataccctggagttatgttttctctttgggcttcactatttacattttgttttgacttttttgtaagtcaatttcttcaataaatgttcttttgttagtaatctttttaaatatatttcttttatgagagtggcccttatgactacaagttgcacttctaacagtttggtaagaaaagaaatagttttagatagaaagttgaaaaagaacagaaacgaaagagtccacgttcccaaacgaatttggcttatctatgtaattgatctttttcttttttatttagttaaacaagtccacattcaagtaaaattcatccaactaattttatgcaataattttcattggcagtgtctggatactaattatttgtttatgggagactatgtggaccgtggatattattctgttgaaactgtgacggtacgtgaaagttctcaggattagttgctttaatttatactattcttaacgaagcatcaatgtaaattttgtggtttcattgtttttactatgtgaaattggatgccaagtatcgaatgacctattcagcaagcatattaattatcaataagtaaatgtacgtgcacgattggaaaagagcaagtggtttctctgatattttatgcttctataaaaaaaccttggcactcatgcagtgtttgctgcattcttcagcttctggtggccttaaaagtgcgttatccacagcgcatcaccattcttagaggaaaccatgaaagtcgtcaggtttgtatgttgatttttatctatctatttttctctttcctctaatagtaatagaggcttggatgataatggttacaaggtcaatattttcgacattaaactatccgatttaagattcagaagttcttttatatgctgggtttcatggtttttttttttttgcctaattagcccttatgctgcatataggcttggtggaagaagttaaaatttaagttgctcaaatttggacaaaatacctcaaaataaatttttatttatttatttttgctgtgggaagcttctatactgaacattgaactaatccttactattttgtggcagattactcaagtttatgggttttatgatgaatgtctacgaaagtaagttttctatacatgactttgctttagattgctaaccagagtatcactataaatttaatgctcttaatgttacttatgatgatttatttacttgcataagcattcatattgttcctttatgcttattttgaaaacatttgctgaagtttgaaagcttgtatagaagatctttgttctttaggtgcttaaatttgatgtcactggacataaggaaggatagtgtatggatgccttgattctacattagaatattgaatcatgtgggtcaccttgatgcatttcttagtcatactttgtactttctgttttgcaaatcaatgacatcatttttgatcatttatttacaggtatggaaatgccaatgtctggaagacttttacagacctctttgactattttccgttgactgcattggttagtgaatttacaactaattgaaaaatggaaatggcatgaaaattgtgaatattttctgtctaaattatttgtttgtactcttaaaaaaatgtttctgttgaacattatagtgctgtgcctactgcctcgtttcagattagtatgaacatgtacttaattcctaagtagtcagaaaacgtgaaatgatccaacatgtttaactggaccgaaatagtagcggtcagttagctgcacatttcgagtagtaattacatttccaggtcttttcttttctaggttgaatcggaaattttttgtctgcatggtggtttgtccccttccattgaaacccttgacagcatacgtaattttgatcgtgttcaagaggttcctcacgaaggaccaatgtgtgatctgttatggtctgacccagatgatcgatgtggttggggtatttctcctcgaggtgctggatatacttttggccaggtgaataataaatcctattatattcttgcaaccgttacctcactttcacatgctcggttattctgattttaagattgacataatgacattttcattatgcaggatatttctgaacaatttaatcatactaacagcttaaagctgattgccagagctcatcagttggtcatggatggatacaactgggcacatgtaattgccatataaatataatttctattcttacattgttgctatttttaacacagggtaagtaaatcgttgctttgttggaacaggagcaaaaggttgttactatatttagtgcacccaattattgctaccgttgtggcaacatggcctctattttggaagtcgatgactgcaagaaccacactttcattcaggttttcttccctcattatatgtgtttatagaagctaaatagcataactagttgcaatttttataaatggcatgaaatctgatataatgtcaattgcttgacgttgcagtttgagccagctcctaggagaggggagccagatgttactcgtagaacacctgattacttcttataaatcagttggaattctctatattctatttacttactactggttccactcacgttctggtggttgtgcaagatgactgtcaggtttagaatctacaattctaccttctgatgcatttttgatggtttgtgggataggatctgtcatagaacataagctgcctactgatttgtcttacacttgaacatcgcctggattttgcgtccgagagattgccaaaagctgattgttttagtctgattgtatcatatatccatcacttctcttgttttgtttctaatatcttctcacccttaccattcttatgggtttaaatttgggtgaatggatttcattagtggatactttgccctcttttttctttcttcccttttttcaaaatgtctcattaaacagtaatttacatgatcagcagcgttctggttgttatttttgactcttccatagttatctcatatcatgatagacagacagtacagttacaaacggtttcttatagactgaaatattttatcttcttctactgttcttggtggaaaaccctgctgtgttcttgtattcactcaaatttgaaattactcgagtttaccaacttcgatatacctttttacttaagaatggggctatatgaccccaccaagtgccggttatggttgggcatttcacgagttatatcacatggacagctgttccttcctatataatatgacaataatatgtatggttgctaacttttatgttgtgttacaaggcatgtatgtggattcatgatggcaaacattgctcagcaactttcgtttgaagtcacattctatttaagaatggattcccttttccatttccaacgtcatgtggtacactcgtaccaaaaaatgcattagttttgagaaaaagagatgataaggtttaattccaaaactgttaaggtctctgcacgccaaaataggaagaggaagttggtgaagaataggtccacatattggtgttttggcacgagaaatgctaaagggcaccagtggtgcctagcatcttcctatgtgttaatatcgctattgatccaactaaatatcaggtttcatataatttaatataatagtttttagggaatatcgctagccaaccgcaacgtgacatgtcgagaaggtattaggtaccactggtgcctaatagcaatgctcttttggcacatagataatttagcaaattaatcacaatcttttttagtttggtgcagtgccttttgagttttggccatattttgaaggctaaatggtatgcttgcactagctagctagctatgatctgacggcatttacaatatccacaaaaagatttccactttgtgtagaaataaaaatgcaataaacagcaaaaactatatacgatttacaaaattgaagtggcagcatattccatccggaacttttgctgctaagagcacattaatagttgttgtacaagaatgaccaagctttataagctcaggtgagagaaaagggtgggaactaaatccaccacagaccatgcaagcccagcatactggaggaatcttatgccggtatcaacatcaaatgtaccttgattcgagaagaaaaacaacttctgcagggtgcctgcttgcttgagctcttctggttttttcggttttgtcccgttgctggctttagttagtgctggaatgtaggtggttgatctgattggaatgccgagggtgtttgacacaatgggaagtatccattttgctagaaccttgctacagaacttcacaagaagtattgttggtattccaacaagcattcttcccagaaaagaagggattgaaagttgtggggtaaatatgcgtgggactccttcatggtgaaactggtggaatgtttgctggacgccggttacctgaggagacatcgattcttctaatcgtaaattttataagaaagaaatatagttctgttcgtgaatcatagattcttatgctaaatgctcagcttttctactctaaattcagaaaaacacacttgccatcctgttaactgtctataacgaaagaagtgaaatgaagcaaaaatatcagattatgttaaagatcgcttacaattcccaacgcaacaccattgaaagctgtgtggaactcaaaacttggagttgggaactcgggagttggatatgcaaagagaagtacaacacttaaggcgctccagaaggttgtaactgcaacaggaacagtagaagagaagtaaaaatttaggaataacgctttgtcaatttacatgttgaaatttcagtcatttaactgcaacatgtagaaaagggaattcacaaactagaagtaggcataccattttgtcccgagacaataaaattgtcaatatattcatgaattgtcagccaaaatgaaagaatcaccaaccccagagtaagtcctcctatgatatcaatcaaactgtgcatgcccaggtaaattcttcctaccaaggaatataattatataagttaggaagtttaccaagcgagctggaaaaaacacaagagaaataaaacagatcaacttaccaaaaccaatgaggcccacaagcaagcacacaaggaatactccaaccaatttcaaaggaccatcttcaagttgagagtaagatagaacatagtgcaacaggtatctaaaataaacaccattgggaagaattcaatccaaatgaatgagatgctaaaggaggattaagctgagggaaagtcctcaacttgtaaaatgaagcttgactaagaacgtttccaccacttttcacattatgactcgggcatggtttagcctataagataacttcaaattgctattcatgatatctatatctttatgtttcaaatataagaaccccatcaaaagtataaccaacataactgtctgggctgctatgcataaaagaagagaaaagtgaagaaaactcaatacccagataagcaaactgtgttaagagtgtgagaagatggaaatccatattccattgcattttcctcttcatcctttgtagcggtaactcttcttataggtgggcaacttggtctaggagctgatacaacatcctatacacacacacacacaccaaataacaaaactaagtagcttaacaagaaacccattttccaaataggaagactgcgattgtatcaatattagtaattacctttatacagtttcctagataatcacaaaacgccatcagaagagtcatctggcgtgccaattttccatgcccggtctacaaagaaattgtgcaatatccacttgagcaatatccttcaaatactaataatgatgaatcgaatccaaactcaaaacagcaaaattgaattatttcaaagaaagagaaagtttacccagaaaagcaaaggaagaaaggcagtgtagaaaggtacagaaacaacacaagataacccagagaagagagcatccaataacccatgctggtaattctgaataagaaaaacccatcaaattcaaattagaaaacgtctttaatacataaattcaaagtacaagaatgattttttaataaaattatgatctggggtgttcttctttttgtttaaattgaactaaatcgttcgaacctggatctggataatgaaaggtgttcctgtgaggacatggtgagtcacccatggttgaatcaaagatctaagcttttgggtaacattgaggtacgaagctatggcaatccatgaaatgagtccacagagagtccccgtttgccacactgctatactctccattcctttccctctcttcctttgcccagagagaataccagaacgaaaacagacaactatggacgcagaaaactaagaatggaatgacttggacataggaggaggaaactaaaggtttttttttttattattatttatatttgaaattatattttgagaataattaataatgtttgttgtgttgtttgtattgatgttgctggattttggctggcggagaaagtaggatcagaatccagcaactctggagaaagaactttctatctacacaaaatcaaaccttaaaccaatcctacaaaatttatttatttattaaaatatatggaatgataatatttcacttattaataattaaaaacttcattaatgttgtaactaatctttgaatcacataaatttattatttatgaccacacatttgagtttatttttaattaggtaatagtagtagtattactatgctactagtaaactattgttttttttatataaaaaaaataataaacaaagataaattatatgctatggtggcgtttggtaacactttttaatcagttttctgtttttaaaagtggaaaattgaaaatatttttcaaaacatgctctataaaactgtttttacttttcaattttataattagaaatcaaaattttaaaaacaacaaaaatcactttcaatatttttttaaacaatttttttttcttaatcaatcttttggattacgtccagacccggatccaaatcccctccccacagccctggcactgaacccggcttttgacttgaacccgaatccgaccccagacctagactcgactttaataaaatcaaaaaataaaaataaaaatgaactttac

SEQ ID NO: 297003 - DNA, 1620 bp, Cannabis indica
tttgtacaattttaaaaaatacattgttcattttatcatttaacaaaacaaagaatctaattaataacttttacaaaacacaagatccaaaatagtattcacccttattataactatattatacaatatcattaaaaaaaaaaggtaggatataattttttaaagagaaatgctaaagagcactagtggtgtctagcacactcctatgtatcaatatcgttattggttcaactaagtatcggatcccatataatttaatataatagcttttagggggtatcgctagccaatcgcaacgcgacatgtcgagaaagtgctagacaccactgtgcctaataaaaatgttcttttttaaaaggagcaacctaaaatctaaaatgctatcaatatataaaattattattgttgaaatgtgggagtgggacagtcacacacatagttttctttctttgcacagtgttttataaaaaggttattcttttcacagtcacaaagccaattgagttgagttgagttttttaattcatttttgccttcttgtaacttccttttgtcttctagtttttcaacatcaattattattattatttgttccataaatgaatgaggtgttctattttcacaattctcatcacttaatcaaagtaaacaaataattgaatgagaggaattactttgcacgagggtgcaatagtaagtaagtaatagtacccaaataattggctaaggctaataaatatatatttggtccatattaaagaacatctcattttcaattatgtcccactataatggctataatttcaagtacaatagttgtgttgtgaaaccaacttgtgtcaatttatgacaaaatcatattcatgtatttgacaaattttccataataataaaatcttaattgtattattgttaaccaacttccttttttttgttatcaattatggataaaatttcaattcacttaaatgaaaattttcatgctattgttagtatttaaagttaatgttaaaaaataatcctccacttaaactgatattcagaccagatacaaaggacagaaaaggaaatatatacaaaatccctaagttggccttcggcctctaattccctaactgaaattagttagaatggattaggaaaatccatacctaactaatatcagtaactaacaatattaaacacatgctgaaattaaaatacaaaccctagatctataaatatacctcaagcaaatcaaccagattaagttggttgagggtgttcttcaagatccagaactttgaagcttgaagaaccagagattgaagctcgtacatgcaaagaaaaacaacagagggttagatctagagagagagagggattaaacacagaataaacacataaacacttgtattaaacttaagattaccagtcaaaatttacctgtgacttggaatcttcatgattgtacttcagatcgacttgatatagtggaatcgagctctcatatttgaggagcagctcaaacggagacgtagccaatttattggtgaacttcgggaaaatctggtgttttctaaacttagatctttctgttttttttgtgtgtgtatgggtgtaaagatcagatcattttag

SEQ ID NO: 297004 - DNA, 8401 bp, Cannabis indica
ttaattttttgtggtaataatacatatgttataattttggaacttcagtacgtagatggttgttaagtgaattaacttgtcacgtgacaatttctgattgattcaagtcattaaatttttatattttgtaaagaaatagtctaaatatactaataagaaaataatatgtcgacttaacacttaaggatttatatagtttctttttttaaggatttatatacttagagagttgtaaaaaatataatttaagtattattactgttaaaaatatatttaataagagttgaatgcatgcttgcgtgtgatgtgtcattgtcatatattttttttattaaaccaaaaagtttaaaaaattattttttaataaaacattttaaaaaataataattaatagtactaaaaattaagttcaaacaatagctcatataaatataacaaaaaatagtctggaataaaatatttaaacattatttttaaaattataaaccattcaaatttttttaaaatttgcaaataattatgaataactacaacaaacataattatttgataaaattagagtaaaaattattctaaatgttaaaatagataaatgatatgttaaaagagtatactataaacgtaccttatactattgccgaacaaatctctattagttaaatgacaattaaaaaaagaaaaaaaaaatcctcaaatgacatgctttttgatatatgatctagtttgatccactccatactagcaaaaagaattaataattttatttaaagtatccaacacaatataaaaaaaattttatataaattattaaattaaaattcatcggtatggtgttggacacctgtcctttagcaattctcattatttttgggtgaaataccaaaatgatggagaaacaatttattactttgtattagcaattccaatactttaatttctaaccaaacacaaatagagcaaacaaagatttctttccattctatgggaatctccacccaattgaggcattatttctttaaaagctccattccattaatgttgtattgtagtttggtgttcttaaggtttgattttttgtaatatatgattgctatttcttcttacaataatcataccataagcctcacatttcctattttatgaactaactcattattcaaaagatgatacaactccccaacacttcttcaattagtgtcaaaaaaaattcttactaaaatgtaagaaaaagataaatttcggtccaaaccaagaggcgaaaaacctcaacatatgtcgaaaaggttgaaatggaactcaaaaagaaaccccatttttctgattatcgaattttaagggtatacatcatctttaaaatcatcaaatgttaaagaatggtataaaaatgtagtaaggtatttgttatacactcacctcctcctcctcctcctcctcctcagtctgtctcgactcgaagaaatgttccatgaatttgaaactatgtatctattgaacacaaaaaacatcaagggcgaaaaatggattcgctacctaaagtctttcgtagaataagatataggcttcagagcgaagaacctcatctaaggatgtttggcgcacataagcatcactagcatgaaaccacactgaatcgccattttcattcttccctttgctgctattttcattgcctctcacatacgcaatgtagtgaccgcctctcatgcttccttggtgttccacaaccccaatgaggcgaaaatcgtaacttccttcatctgtgcaactgtaaatgcaaaaaagaaacacaattgttaatcaaatatggccaaaaagctcatcttcaagattgtatttttatcttgttcttcagaaactcgaaacaaaattctttttggttccttggatttttattaggatccttagtgatcatcatcaccatgtttcataatcctaatgtaagtacccaagtgagactcgaaactcagacttgtgggagcaaaccaaccatatgcattaagcatattcatctgattctaacaaatgaggcattgcataatgctcttggttaaggatcaaaatactaaaaggctaaaggatagaccaattttactaatgggatgatcggttgacatctaatgcagtgaattcaaacacatacacaaaatggaaagatacaatttttcatccaaaatcaagaaaaattgctagtaatgaacaaaatggctagtaatgaacaagatgataatggtaaagaatttataccttgcatccatgtatggtttaagatcaataatttctttgaaagtaacatggccattcaatttgcttaaccgaccccgagcatcttggctgaacctcttaagatgaatcgtcaaaataggtggaactttgttgataaggacccttttggtagcatccctcttgaccttcaccaatttagaatttatttcctcatcatcatcattttcctcggtttcagggttcggggctgataccttagactcgccctgctgaactttatcaccgatagaaccagcactactagctccatcaacacagcatggatctattgcttgaccaattaagctttcttgcttgcaagtgtgataggaggagcctgaagaatccgattgctcttgtgcatttttcatcacaacatttccttctcccggttgaggaactaaagaaggcaactcatctgcatgaccattctccttttttatgtgattttgactagagcagtcgatttttgaatccacattgttcaaattagaaacacattcgatattggtatgctcgggatcactttggaatgttgtttcacatccatttaccacagcttcgggagcagattttaactgcttaccagcatccaatttttggcgtataagagctttggaacagttttcacaatgccaagcattttcattggagagaagctctggctttgtgtaatgagacaaacaagtctcaacagaaactggggaattcgaatcatcaacttcatcgggatcagactcgctgctgttacttttcgtgacatcattcttaagagatggaccaatcataggccctgtagttacttcaggctcgtcaaataagccaccgaagccttcaaaatcttcctgaacaaccgcacaagctgacgaagaaacctcccctacttcaaactccacagcagtagagtcctcctctttataaggaagcaataaaacctcagaactttgaacttgtaaagggacttcatcctcccaaggattgacattagaaaactggactgttgcaactggctccccactaggtggtagaatcggtagactagattcaaaatcattctgtcgttgttcggcctctataaatgtatctttgttttctaaatcatgatgagtttgtgatgcaatatcatatgaagtcaaattatagtcatccaatggagcttctggctcaaggtaatccaaccatgaagaaatatccattggagctgatgttttctcagctacatcctcaaccacttgtttattttcactttcctcaatgactgaggaatcctgtacaaccgaactgttttcttcagccaacgaagtagggccaaccgagccaatttgtggctggcaagaagaaatttcattgctagttgaaacagctgaaatcaaatctttattaacttttggccggggctttccagctctcttcggaggcaatttagctttctttgcacgggaagactgctgagccttggccttcttgcctgtgggcttcttagttggcacaggcagtgagagatctaaaaatggctcgtatacagttgaagaatgtccacattcagtacagcaaacagtactcgatacttgacctccaaatacagcatccacgaaagtaggacccgggccattttcattttccttggaagaattactttgctttctcaaccccaactcctctgaagatagtccatctagtaagcaacgaagcaactcatgactatcgtgttgttgaaaccccttaaattgaggagccttggaacaaacacacccgaaaaaagctctaggatttatcacatttttgaagcctgcctctggttttgtttcgttatagatcttcttcaaagccatagtgagaggtccaacagatacatccaacttgaaaaagaaatcccgcaacttatccatagcaataaggttttgtaaaaccgaattaaagaaacaagtatttccaagattaactaaacctcttacaacataacctccttgtccatctaaatcacccgacacaacactagatttgatttcagctataacactaccagtccctaaccatgaattctcaacatttacatcttcaccctcctctgttgtatgccctttaatcaatttcacaacatcagaaaacacatccttttgttcttcatcaccattttcctcactcttttcaacagtaacaagcgtgttacacgggaaacaccatctcatctgaggtttctcaaactgaataaccaatggatgacgagtctgtcgggtatgtctaagcgcatgacattgaggattagttggcaatccaacacctccacaagcataatgcccacattccaaacaaacccaagtagctttagaatcaacagaaccaccccctttcttcttcccatgtttagcctttcccttactcgcccttcgatcaactaccccttccctacaatcttcacacctaacatgttctcttaactcaattttagcagaaagtttctcaagattaatacctttatcaagatgagtacaaggtttggtttttctcactactatagttgcactatctacattctcagcactttgatcaattgattgagaattagttgtaactttcttctccttttgaggaattctactcttcttcttaactttcttccccatcactacctaaaacatactcaaattacaccaaaatgacaccagtaattaaaacaaacacttaataatcaatacaggcaaaactgaaacaaaacccatcacagatttatcaaaatatgaaataaagcaaaagaatttaacaataattcgagattctaaacaaaacccagaaactgattttaactaaaacagctgaaaaaaaaaacaagttgtgaagatttacacaaacttttaaccaagaaacgaaagaaaataaaaagagtgttggatttgaataacgtttcttacctaaaaaaaagttggaagagaagaagaagaccctggattggtggagtcacatgagagagtgaaaatggtggatgttgaaagaagattgattaagatctaaggagatggagatgaagcgccgcaagcaaagcaaaggttgagtttttattttattttttttattttttctggttatttgatgatgtaatagtctcttttcattggaagaaaagaaaagaaagaagaaaagttagtgaaatacagcaaatatggtaatgaaatgaatgattcaatctggtctactctaccaatacaatcaatacagattggattacagaggaagaggaagagtttgagttagagaatagagagagatgaaagggtttttatttatctatcaaaatagtaaaaattaataaaagaatacacttaagttttttttttttttgtgtaaatatttaagtttaaatttcaattagaaatttttctaaaaaaaaaaatattagttagagataaatatttaagtgttaatatgttaagttatatttctacaacattctactaactctttaagtatcgaattattatttttattagtatatttaaattaatttttaaataaaaaaaaataaaaacttacaagaattattatggttattgacttaatacttatacttacgaaagtttcaaaaatataacttaagtaccataaattattaaaaaaaatattttttaagtaatttgtggcgtaaatactaagtttaatttcaagtcaagaatagacctatatagaagcgagggagacagtagcctttaaaaaaatcggaaaaaatatatacgtacatattagttagttacgacgtatatttataataaaatataatatttatatacatgatattagttttcgtacaataattaagttaaataacatatatattagaggataatggttaaatcccaccaataatatttttttaagtttacttttgtccttactttataaaaaaaattaagtctccctcactttaaattttgagttccccaactacatataaatatctaagtttaatttttaacggtaaaaatacttaagttatattttaaggtctactatgtggcattagcttacacttaacaatcaaggacgtacaaaaatttcataaatataacttaaatatttttactaaaatatataatacatatattactaagataagaataaaatattgctttgaagaaaagataggaataaaattatactataatatttttaaaggatggatagtatttttctacatatagagaaacactttaacattctctaaataagcctctaaaatgtattacttaacaacgttctttttataaacttcggcgaaaaaaaaataaaaaataattatctcaattaagtatgtagacgagacaagaggtgtttccttcgtttcattaagaattttagtctttattatcgtatttatttctctatatatttcctatcaagaacaaggtaatgagtatcattcccatttccgtcacgtttaatattcgaccagagacaagaaataattctcgtctctcatgtgcttccctaattatgctcgtcctcgtctctaaaatgtgcaaccctaattatgctcgccctcgtcctaattctcgactaagtagcaacctcatcatcctaatttctaggtaacctttgtgcttatagcaacacttattctattgtgattgaagtgtttctatctctcatactagtttcacatttctttctcaactcctctcccaacaatctttcaaattcttctccaagttagagagaaaatcaaataatctatagaaaagtgaagaaaaagaccaattaataacatgaatatattagtagtacaacccttgcattgcaacaattcaaagtaatttttacataacaatgaatcttactaaataaataagtatcaatctgaatggatgatcaatttcttggcgaccaatcgaacgcctgcattttgctgataatcgtatggatctaacgagaaaaatgcatcgacaaaggttcccggtgggagcaaggaattgagctctgcagcatcgaatttactaaacaccaacctctgaaccgagccgctactttccttttgatagatttcggttgcatatatggcaatctcaccgcatacagcggttggtatgctgcaagtttaggattaggttagttaagtaaggtttccaaaccgaaattgaaattgttgaaagaaaataaaataacttactgcaatctgattgtagggttgttgggtgggcaaaattttcgattcacaacaggtctccattcagagttgctctcagattccacagtcatcttttggacgatgttgttacacgaatcaagaactgtacacaaactcggtggtgcatcaacgacaaaattcaacttaggtcgtccagcaagatcgatgaacttagtacttattccaaaacgaactttcagacgagcacattgaagctgcaaagtgttatctccatgcatcaacttgatcttcttgctcccgcgaataaatggaacaaaggaaccacttatgaaaggaatagaaaccgaatcaggctcgagaaattccccggtggatgacaaatcagatgagaccgaaatggatctctcgtccatgttaacatctgtctgctgggaatttgcggtctctaccatgatttcggttgtgagttgagccatattaaaaggatcttgctgaggttggttagattcggcctctctgttaggagccacaagagatgatattgggtgattctcaatcatcatttgatttgtggaagttaatgtttgcatatttccattgtttaaactagctgggcgaagatttacgttcgagcttgtcccctcaggagataattttccattactgctacggcttcgtgttatcgcatttggagaaatccaactgtttgtggtaagtatctccggtaggcttgactcctgtaatcattcgtgtgatcattagaattagttttcatatatttgtgctataacatatacttctatagatcggtttggctttatcataaggctgcaaatcaatcaacaatatcaaaatctgataaatcagcccaagtcgacttactaagggggcggcccttctatgttacaagatttcattttaaccaacgattcattcaaagaactagttgtatcgatattcttcatagcattatctattaaaaatgaattttctagcatttga

SEQ ID NO: 297005 - DNA, 9885 bp, Cannabis indica
cttccagccgctggaccctaccttcggctgagccgtttccacataagattcatgactacaagtcaattcttttgaaatatgatcaaagtgcaacgaactcatacatgtctatccaatagttgggttgggttgaatgaaaaccatttttagcgagttaagccaacgggagactttacaatttttatgataacctctttttcatatgatgattgatgcttactctagcatttctttcattttattcttctttctaaaatttctatttcttaaatctttctatcatatgttggtctcaaatgaaagacctatggaaaagagagaggctcctgcagtaactttatatgtgagtaacaatatgtacacacatgaatcacacatttatgtggcaactaatttcaactaattatctttatttttaaggtggatctcacctatcaaaaatgatttaccgcatatgttttgtactaagtatgcaaatacattatatgctcactcagccttaaatttatcatgattatattcttgcctatcaaaaaacaaatcgaaaacaaaggcaaaacaagagaaagatttgagaagcatcaagatcaatgcataatgcactgtgacattgtgtatagttatgttgcacactgtattgccactatattacaagagtacatttctcaaatttgtgtgtcaaaactctatatatagcctgcaaattcatagttgaactccaatagaaacatgctcatatatcacttcatatatatatatatagatattaaaaaaattgtgctgaattttgggttatttgactttaactttgtaacccttttaaatacaaataaaactacaacttctaaatacatggataacatttgcaaaaacagtttcacgagtattatactcatgaacaaccgacgacaccagagaattttcacgacagtgcaagtagattcatcttaaaatacaacagttttgagctagtttccaccaccaaagccacgaggacttggccttgacgatccagagtctgcaaactgtctccttgactctgatcttcgctttctcctagcagtaccaggaggagcctaaaaacaaaacaaaacaaatccaaaacaatgtcaacatgtcacaaaacaccaactcaaaaagtgttacttgcatttgtttctggtgtaaaaactatgatataatgaaatagagtatgaacaaggcaccttctgttcagatttcattgcttcctcgagattgctgagtgtaggcatcgatccgccttccattacacccatcaaatttttcatacgaacacgcatttggaagagttgagcaacaagttggctcacctaccattcattagcaaatatatcatgtgatttatttatgaaatctaattaacttaattcaataaatttcattagttatcaaggagctactgtagaggtacctgctgttctgattttccagaatcctgagcaactctttttcttctcacaggagactctgccaaaagttctggcttttctctttcctctgcacattgacatgataatgagaaaggttccaatgggaatagaatacacattaaagagtattgttaattcacatgtcaaaatatacaaaaaactggtgagaagaagaagagaccaggggtcatcacttcaatcatggattccatcatctttacattcttttctgcatcacgaatttgtgcaggagtaacctgtttgcatgcatgtctaaaagttacgactacagatatgaatacaactgaaacatggggtgactttccaatcaatatggaaaatgtggagaaaagttttcataccttccccattccaggaatcatcccaataacacgactcatggatcccatacgtgcaacagcgcgtgtttgcttgaggaaatcattgaagtcgaactttgcactcattatcttcttttgcagatcttcagcatcttcttgtttcatctacacacagaactcaattaataaagtacatgaagtgctttccaatatgtgaatctatgatcggattgttataaaacttacgatttcttgtgccttctcaacaaatgagagaacatctcccattcctaatatgcggcccgccattcgatctgggtaaaaaggttcgaggtcttccatccgctcacctcgcccaactagcttgataggctttcctgatacctgaaatcacagaacttaaatgtgaatttgatacaaactactaaacatatgagcaataaaccaagtgaactttgaacttaaacaccagacaatctgcataacaacactcacaaaataaataagaaaactatgtgatgccaaaaatggagccattataagttattcatccaagaaaaatagtccatactccatatactaggcaatgacaaaacaaacctctttaacactcaaagctgctccacccctggagtctccatctagctttgtcaaaatagctccagtgatcccgatctctacgttgaatgtcgtcactaaggctgtagagaaagttgaagtccacaccttaagaaaataataaaaatagactagaagtgtcataataacttgcaagggaaactaaattaaggctttgttaacaaatactaaaaaaaaagctggctcataaattcatatcaagaaattaaagtctcaacacgtttcaccctcaggcaagtcaaatgaaaaatataaatacctgcagcttcttggccagtcattgcatccacaacaagcaaaacttctgtgggattcagtactcgctttacatcttttaattcatccatcatagctttatcgatctgatttcaaaagggcaacaaacatcatacaagtaaaatcaatatctggagtaaaattggcagaaagtgtagaaagcccaacacaaaattagtcattagaaatataaatgtattacctgaagtctcccagcagtgtctactatcaccacatctatgttcttctttttggcctcctctagaccttgcttagctatttgtgagggtttcacatctgttcccgcagtgtatacaggaacacccacctgtcgcaagctagattttagtataagaataaaatcaaagacaaagttagttgagaaacaaaaattgcttacctgtttacccaaaatttcaagttggtcaatagcagcaggcctgtaaacatctccagcaactagcatgcacttctttccctgcagttgactcgacattgtattagtaaacaagcgaaaatagtgtacacttgacatgtctataacacacaatgggaatcataaaagagatggtgtttgccgaaatgcacctgttttttaagataagaagccagcttggcacacacagtggtttttccaactccttgtaaaccagccaacaaaataacagtagggggatttttcgcataaacgagttcagaaacctcaccgcccattagtttcaccagctcatcatgcacaatctgcaaaaattagtaattcgaaacctttgttgttcatcaccaattataattcagcagactacattttcaggaatttattttcagagttaacaatctcttctcttccataaaaatatactgtgcttactgacaagcaaattcggtcacattgtattatcttttgatcatcaacaacagcgaaaatttaaagtcaagaacagaatgatacattaaattatccagaatcacaccttgaccaattgctgatctggtttgacaccgcgaataaggccaactccaacagcttggtcactaacagcttgcacaaatcttctcacaacaggaagactcacctattagaagaacaacatttattgaatatcttattagaaagtgtaaaaattaacaaaaattacaagacatcagcaactcacatcagcttccaataacgccctcctaatatctctcataggctccacaatattttccttagtcaaaacctctgaaacccaagaaatccacaaataagtacaattcacagtaaaattcaacttcgttcttacaaacaaaaaacaataacaaaccttctcctttaagcttgttccaagctgattcaaggccactggttaattgtccaaacatctctgctcttataattccacgcatttcccttttatggctaacatgttttgaattcaccaaaccccatatctccctctgaataaaatatacacaccacacacatatatatatcacgaaaaagaagaaagcaaattttgggttttcgagtttaaactgaagaaaccaaaatccaagagtaattcagttaccgtgaataaattcctggaagagagcgcagtggagaggtgtgaaccagtccaagctgagcaaaatctagctgaagaagccttggaattgttgcaaagggttttagttttgctggtcgaaagagaagagaaatggcgggaagccactgcctgaaactgtacggcttccatggcaaagtgaccaaaggttagctctgaaattctgagataaaaaaaaaatctaatcgttatatgcaattctatccgttttagtgaaaaaggtttaaatacggcgcaggtctaccatattactgtgctccctcattaaacgactctttaaaaacaaaacgacgataacgataaagactgaagacgccatagcttgcatgactgttcatgttcaggccgccatagccaaaagcttagctcctccaacctcaactttatggaacacccagttgagagagttcgccaagcaatgtctattctccgatgctctccatctttatcgtcggatgctacgttccggtcaatcccccaacgttttcacattccctttcgttctcaagtcttcagcagccctttcgttctccgtcactggagccctcctccatggccatgttctcaaaactgggtgtgagcccgaaccatttgtgcagacttctttgatatcaatgtactgtagattctctcaagttgagaatgcgcgtaaagtgtttgatgaaaatcctgagtcgagaaagcttactgtttgttataatgctttgatatctgggtacattttgaactcaaagtttttggatgcggttgtgttgttttgtaggatgagggaggaagttgtgtcagttaattcagttaccttgttgggtttgatccctggttgtttttcacctgtggatttagatcttgggaagagtcttcattgttgtagtatcaaaattggattggaacttgactcgtctgttggaaattgtttgcttacaatgtatgtaaaatgtggctcagttgagtatgctcgaaaagtgtttgatgaaatgcctgagaagggtttaattacttggaatgccatgatatctgggtactcacaaaacggattcgccacccgagttttggatctttacagggagatgaagcttgttggtgtttctcctgaccctgtgactcttgttggggttctgtcttcttgtactcaccttggtgcccatggtgttggccgtgaggttgaacaacgaattgagctatgtggctttggttccaatccctttttgatgaattccttggttaacatgtatgctagatgtggaaatttggtaaaagctcattcaattttttcttcaatgaaagaaagaagtttagtatcatggacagcaatcatagggggatatggaatgcatggacacggggagcttgctgtgaaactctttgaagaaatgataaaagctggaatcaaaccagataaaacattgtttgtaaccattctttctgcctgcagccattccggattaactgatagggggctagaatattttgctacaatggagagaagctatggcttgcagccaggttcagagcattactcttgcgtggttgatttgttaggccgagcagggcgattaaaggaagccgaggaactcattcggtcaatgaaggtaaagccagatggtgcagtgtggggagccctcttgaatgcttgtaaaattcacaaaaacgtaaagctagcagagttagcttttgaaagagttattgagcttgaacctgccaatataggttactatgttttgttatcgaatatatattcggatgcagagaattcagagggtgtattaaaggttagaacgatgatgagggagcgaaagcttagaaaggaaccaggttacagctatgtcgaattcaaaggagaagttcatattttcttggctggtgacagaactcatcaacaaacagatgacatatatagaatgttggctgaactagaaagtttagtaagaaaactttgtgagtctaatgggattggtggcaaaatgaaaaacgaacaacatttgatcggtgagaataatgttcatagcgagaaactggcgattgcattcgggcttttgaatactcttcctgggatggagatcattgtgataaagaacttgagggcatgtgatgactgtcacttgtttttaaagttggttagtaaaatagcagaccgtgagtttattgttagagatgcaactcgtttccaccatttcaaagatggggtttgttcttgtagagattactggtaaaaacataaatgtttacttacaatacaaactacccatgtttgtttgtgataaaaaagaaactacccttgtttgttatgtatgatgaagcaattaactctgttatcattaccccaacctgaaaactatgcaatgcaagttttatgtgcacatatcattatttttactctaattaagatttttgtcccttgaactttgacatgtaccaaatcataccccttgaacttttaaggtcgttaaaaatacaccgtgaattattgaaattgttgaatttaaaagcttttgtctaattttattgaattttactatttcagttattgtttatatactaaactatgcttcccgaactttgatatctaccaaatcatacccattgaattttgacatgtactaaatcatggtccttgaacttttcatccatgttagacttttttattaaaaatcgaaaaaaaatccttaaatccaacaatcttaatagtgcaagaaatatttttaacgacctttcagggaacatgatttggtatatgtcaaaattgagaagataaaaattctaattaaccttattattattactggtttagatcctctaagacctatctcaaatgtggggaaaaaaatgacacaagaaaacaaattaactaaatatgcacaatttttatgattgtgttccaatgcaaatctttatataagaataggtttgaaataattgtattacaaaacatgagtaggaacctcgaattatatttgacttgttttttttatgagagttacagtctcagactcagttttagtagtccggtagttttctctgttagccagcttaagttgcgctgactttgagttcacaactcacactccaatgtccataaattacaagaaaaagtagtcaaaatccattttgaagctagaaatgaaaagtacagcttataaaagaaaatgggttgggactagtagggtactagactgtcaagatccgttgacgggcatgccaatcaaccacatctttgtatgccaagttgcctccaaagatgtccaaagcacttcccactgtgacatccacacgcccctttcctgccactctaatcacctccaaatcggccatgactgtcacaccaccagcataagtgaccggaatctagcaccacaaaaccacagcaagattgattttcaatttaaaagtgtacatgttttattcaataagaggatgtgagcaattgcgttttccattactgtgtagaagtcttttcatcaatgacagataaaagcagcaaaacagtggttcacaagctgaataagaggttttcaactcataaaaattggcagataaaaccacatttttagtttgaattgactaaatctacatgaagattgttatcagcaaaatctagtagttagatttgaaaccataggttactaaccggagagtgctttccaagcaatgctacaagctcttcatcaatgcccaacctgcaagagagatattagagaagctcaaagatagttgttgattgaagggggaaaagacgttttctttctactactattcattttaactctcagttaaaggatcatcacagacgagtacatttgaagcttctcatagctttgcctcattgtagttgctaactctaaaaatacgctatcttgggctttcaacttttctataatttattattaaataacagtcattgctggacacaaagaagtatacactcaaaagaaatagtaatacatgataagtaccacatttcttgataaagaataactaatttgaatcagtaaatattttgatccagcaatagcaatgaccttatttgtcatgtatctaggcagatgataactgtacggatatggagtgataatacaatcgaatatatttatgggaaagatggacaaatctgttattatgtacttaatttatcatatccagactttaggtattaaggactaacccgagttgaggtataatggtgtttatattaacttactttttcccttcaacatcaacaccatggaccagaaattcatctgcatagttggcaagaaaatccaatacttcctcatccaaatacacgtcactgaacttctgccatctgtcagtgacaattgcatatttaccttcctgtcaatcacaacaaacagacatgggacaaaggaagagtagttagctgatataattttctcaacattggctttcatgcatttgagatatcattaaactcaggatactataattcttttagaaagatgttcaaatactacagtggttcagcgacttttcttagctacaaacgagtagaaaagagaagatcttaatatatatgactcctgaaataagggtataaatcctttggactagatcctataccttctttctgcagctaaggtccaatataagtctttcttttccaacaacacgaacaagatccttaagcctctcaaggtccattttcccattgttgaatacgtactacaataaaacaaagatcaaaagattaaaagatattgaaaagaaaaaaaagtccaaactagggacagttttccataatcagatcatatgtcctacatcacattgctaattcagggttatgcaaagtatgaactgctatgatgatagttgatcatttaatgaattttgtttcataccgaagtgacaatcacatggctagcgccttccactatgtaactcaaagcattgtcagaattaatcccacctccaacttgcagaccgcctagacatttccagtcctcgcagtaagttcagcagaggaaaaatctgtaagctattaaaattattatcgacttacagcaagcgagtaaactagaggacttgaaatctcagtgtgtgcaatgagaaagcaaatatcatggcttgacagaagtaattgattgtagcccgttattagtaatttcaagctttattggcaagaaataattatatatactatgatactgaaaaacggttcctgttcgagaaattcattatgaaaaggagtcttatattctgagtccaatattatactaatatcaagtaatatttagcaaatttcaatcacaaagtagggaagaaaaataaaagatcaacatgaagacttcataccaaaggactatgctattcagcacatgtggcttaccaggataggcatgtaatgcttctatagctgcagctttgctcaaaggatctgctccgagcatgatgacatgcccacctgtaagtccatcttctttgtacaaatttgcatactcagcagctgacttatcagattcaaaattagttacaaggctcgatccatcttctttggaatcactaagggttgaacccacaatctgtttcactcttccctggaaaaatataatataaaaagaacaacaaatatgatacttt

SEQ ID NO: 297006 - DNA, 1156 bp, Cannabis indica
ttattttgaattactagatgtcgagtttggaaggcttcaagcaagggacatgcttcaacatctctggacaggtccaatctcaaatgcatctgttgatgttgtccaaggtagccgatctgtcgaggttcgagctgtcggtgttaccaaggtactttgcattttaattacttaaaattctgaagtagaataggaaggaatatcattaagaaaagggaagatgaaaaaacatacatatgatcatttgagttaacccttttcgggtttctatatacaaaatgtaaaactctttatttgttttttatgttgcagggtgcagcaattgatcgaatcttaggagaaatagttcacaacaaaggcatgaaagcaccaattgattatgtcttatgcattggacactttctcccaaaggtaaaaaacttaaccttttattaagccatctttgctcattgtaaagtaaaaacacaactaaaacttggcaacattggtgtgtttcaggacgaagatgtgtacacatttttcgaaccagaactaccatccgaaaccccacctccaccaagagccatactaaccaattcaatcacaccatcattgccaaagttctcagccagcagcaaaggtagctcaaaatcgtctcgcctcaacaaacaacgctccatgtctatgatagagaagaaacaaactactactaacaacaacaacaacagcaacaacaacaacaacaacaacaacaacaacaatcatgggagtagtggtgcgaatccttgtaagccaacatggcgcgacaagatgtctctacacgagggatcatctgttcttgatctcaaaggtgagaattacttctcttgttctgttggaagaaagcgttctagtgctaggtatctactcgcatcatcagatgatgttgttactctcctaaaggagttggctgagggttaacattttgctaaacacaaataataaaacaaaaacattctttacttactacacaaatgtttttacttgttctgttgtagctgtatggaaatgttgcgatgattcttttgttgaaaaaactgtagagagaaagagaagatatgattcttaggcaagactattattatggtttggacttaattagaatttttctccctgaattgaactttgatatgtattaaat

SEQ ID NO: 297007 - DNA, 3182 bp, Cannabis indica
tctatgaaactgttcccccccgggaaaaaaaaaaaaaaaaaagagacaatcagagcattttaatcttatgtcagagtaccacacaaatggccataagaaacaattcagataagcaaaatggagcacaatgatgttggtacatgatgataaaagttgttcccttttgattgcagtttaggagagaaaaagtatgatggtaaaatggaacacgatggtgtttggtatgatgataaaagtcgttcctttaagattgcagttcagatctttaaaaaaaaagagattgcagttcagatgacattgaaaacttgttgtaaatgtgacagacccaagcacataaattgcagcaagattacagagtgatttgattaacaatcccaggcaatttgagagacctggttctctcctagagctatgcaaaatacacagtaagaattggcctgtccaacacatactctctcctctcttttatttttacaactttctaaataaattgacttctggatcttctgacaactacaattagattgattctaggacaattataaccagattctaagacattccacaattatcccatttccaaaagaacccagcactaccactttcctaagcgtaggtgtagtaaattaggggcatatcaaaaatcgaaatgtaccactttcatattcatgaagaatgtaacaaaagaatggtctatgttatgaaaaccacagcaaatgaaaaatagaggaaactcgttttaccgtacaaactcgtaaactcacatgataactaatgggaaaaatccatcagcaatagtaagggattggttggtggtgggtggtttataactacttgggcacccttctcccataggctagtcttttgggagtgagtctaacaaagaatgattatacttctccttaattactatagaatgaaagacaaaatgaaaaatttcaaaagtattatagattagacttttcaccatttagataatgatttaagaaaatataccttggaagtatatgttgattatgaatctcaatatcagtacgaatttcattcctaatatttatgcacaaacacttcatcctctggtaagcagtagtcatagttaaggtatccatcaaagtgtcatcactgttattgctgatatattcatcagtctctgtcaagtgccttcttgatctcttctttgcagcaacctagcacatcacacacttagaaaagccaatatgtaccaacttacacgatcacaattagagaaattcctaacctggaaatagtggcataatgtattttgtgactcaggggacaagatatcatgaagaagagtgtaaagctttatggcaggctccagtgcaggtgcagcacgcccacatgcaggtttaaagacctccacaatacccgagagtactgactcatccaatgatttgtagttctcaaaaactagagctagcacttgttcaatttgatccttggtttctcccaagatccggttctacatgtataaataaatacatatatcagcaatttttcacatgtgttagaagtgatttgggaataaaacatgagcaaaaaatgtcataagaacagaatatggatgagaaaagttcaacacaaaggattcaataaagccatatcaacaatacaaaacgaaatcataaaatgattgatacatacttcttgatgactcaatgtgctcctgctatggcctttcataagaactggcattagcaaatcataaaccaatttgaggcaatcctcagttggtgttgcaacgtccatgacataagagaggtatctgttgccattgaatattagacaacaatcataatgtagagcatgaaaaagaaaataaatctactactgcataaccacattgcaatacctgagcttcgtatatatatcagaaacaccataataagaagaaaactccctcaaaatccatttccaaggaccatgcaataatagattcctttggcgaaactgttgaactttcatagcgacctccaataccaggtcataagcaactgtttcagcaacagagccgcactgcccaccagtaaaagcaaatcaaatcaaaaaactttgtaacacattctaaagtacaaaaggcttccttgctcccaaaatgcaagcaattattcttcttcaagaacaatgcattgcaaaaacttattatctattttcttttagcaacaataatctctttttccttgggtacattgcactttacaaggcacactgtccaaatgtcttcaacaaccatgcatttattccttcatatagatagtttaacatgtttctaattccatccaaaacattaaaaaaattgaacaaatacgaaactaatatatctccacaaatccaagtctacaatatttacttgaacacacatacacacacataatgtggtgcattgatgtcaaaaaacaatagacattaggggaaaacaaaataaaagtgtggcaaacaaatttaaaggttccacagaataacttactttaagatgactactatcatcagaactcattgagtagtgtatacaaatctgtagctttccaacaaactcatgttctggttcacggtaaatagaccaccaccgtactttgtcagactgcatttccatttaaataagaatcatcaaccagaattattaccaggaattcaacctggcagctaaaaagataaagataatattactggatcatcagcaattgtcgccacttgaacaagtgcacggccaaaatgtttccccttggaatcttggatttcaacaattagatcatctcccaagctatctggtaagctgtagagtggtcagcgcctttctcaaacgattcaacaaacaaaaagaatacactgagaaagggaacatacaaaacatgagtttcaccagatccaggctgcattctcattgcatcttcttcaggtgagcttttcagtcttaataaacaagagtatgtttctgctgccaagtatgagcaagataaaaattctcaactaactcatgtgaaaaataaagctcttggaataagcaaaaagtttatgtaataatggaggatagtacagatcagagcattgtactattatagcatacaaaatgtaaaatatggtgattgaattgtgtattgtattccatagaatattatatatttatataaaaagctagagcatagatgttaatcatgcccagc

SEQ ID NO: 297008 - DNA, 4145 bp, Cannabis indica
tttttttgcggtgcggacggtttgagcggtttgagcggtttgatgtacacccctagtatttataatatgaatagataagattgttgaaacatcatcatcctcaaagtaattataaagcttttgtaagtctcaatgtcccgaggaatcaatgaaaaatgacacaatcagagggaggttatgatgggtattataggaaagaaattgagtttgaggaatccaatagtcatgtatactgcgtacgaaattaccgttgccaatcttccatattaaacatttctcaagcagctctctaccttaaaggatactttgccaattgaaaggtggggaatgacaattacagccttgcatgaaatttgttttgctaaaatacttagatttcaaaattttacaaagtagtgagttagagttggtgagaattctccaagcttgcttggccaacatggcttgattaaagtgaataaggaatctaaacccaagccctcaataaaattcatatttccttgactatcttttttagtgaatttaagaatgctttcccatagaaccccaccaaaacttagccattaaggcttcaatcttttgacaagtggatacagggagtctgaagcatgacatagcaaaagaaggaatttcttgaacaacaactttaagaagcacttcttcaccaccttgggagaaacatttgctattccaagaattaaggaaatgattaaccttatccaagatgaaactaaaggacttttttcttatctacctatgttagtttttagggttcatattagagacacagcagaaacacaaaataatttgatcaagattttaaaaaaatatttgttgaatctaatatgaatcttaaacctcagatctcaacacaatataacataaattaaatcaaactactaagaataaggattttaccttttgatgcctattaaaggatccttgtatcttttcctataattgttcaatcatccaatctaaagcttaatgggcttgatgaaaaatctaaatcagatcttccagatcaaccccaacacccaagataagagcgagcttatagatttaataagatgaataaacttttctcattacagtgtattctcaactcatgagacattgtaatggagattgagaaaaacaccaattctttacaacgagagagagtggcgtgtgagactaggagagggagagagtgtgtgtgtgtgtgagagagaaacaagattttctcaatcatatttttcaatctcaaaaaaactatgttcagttactacaatgtcttcactctattatatataaatatacatatatcttatttttaaattatatatatcttatatatattgttgactgtggatttagccaatcgacacggagtctgattaggatcggatctcgcttatgactatcacgtgagaatgataataaatgtagaagacacgtaaatttatagaggtttggccccttttgtttaggtaatgacctactcccttttagttgtattcactctttagataataccaagcagattacaggctaaaaccttgtaatttctagctaggatctcttcaatattaaaatgagaatgtgttttgcaggtgagaagtatgagaaaaaagagaggacttattactatagtgcttttgagcgtacttgcatcttaggttctgagtgtgtatcttgccctttatataatagtagggcttacaagctatacatagagatatccctagaaaatagggaagttacacatatattaaaaatacaaagtaaataattaacaatccctaaagaataaggttgttatttattgatggagagtccctatctttgtgggtagtttaaattgttctgaagtcgtgggaatgttaagggcgagttagaagcttatgagaaaaatacaagtgctggtgtgtttctatacacttggccagtcagccctattaaaggctgcccggtgcttggaagctgtcactcttgactgactagctataggtctggccaagaccttactggcaggtttgtacatctgtctttgcttgtgtccactatgcaaccattgaatcttaaaggttgacaggttgtacgacactaatcttggcaggttagtgctgacctatcctcgacgtattttctgtgttttgtcatgtggaggggccacgtcaggtggacaaaattttggataacatttgcccccaagtccttgtccgaaagtttggtctagtaggaactttacactctatctggtattacaactccctttgtcgtgcatgtatgcatggctagatattggactcttcgacttacttgtcttatggtagttattaattttacgtcaatcaatataggaagtcgtgtgatggctgcaacattttcccatgttgcaactcttggcattttccttcccatacctgcctatttttgtgggattgaatccccattaagtttttgggaagaaaatttgtagaaactttatataagcctcattcttctattcattttttacttttcacttttgaacaacaaaaattctctcaaagactccttagagccgaaaccttgtgagcttgagttcttcatggatttttgagtttctaacacccacacttgttgtgtgaactagctcgatgctgcttacatcttctcagtgggtaagttcgaagctttctctctcttttttgttctttaagcttttgccatagttgagtttcaagcttttatgaactttttgattcttatgtctttggatagtttttatgcattataatctactcaatagctttaggatgcataatgtataaattcttgatgagaaagatcgaatcttgagctttattttgacactttgatctttggggttcaaagaacacaaagaacatcgctttgatttttttaaaaatacgatttttgattcatttagggacttggccggcactttgggtctattagagaccctgattggttcttagtcttgtcttaagacccttggctagtacttggttcctttccaggaactctgtccggcccttcgagggctgaatctatcttggccgattcatggtggactaatcataatctagtccattcttggtgaactttccaaaatttggctgattcattgtgaaatagccctgagctggccgattcatggcttgacacttcatgggcttgctagttattactcacaattattggactgttagcccatgttttatccttgtcttatttgtgatctccagttgttcacctccctttgtctttctggatagctgaacttgtgcgactattggggaggtgataaccggatcgatgaggacttactccgtattttgtacgaagactatcactcagttagttcttcctctgagagcacgtcagacagctctttaggtgactttgaagcgagcagtggttctttggaacttgaagttcaacttcacactattctgagcaaataggtggtgagatctacgggagattcatctgggaactgaaccaagggtggagacaattcttacctaagtcttggacgtatatagttcggtaaggtgtgcttgacatattgcctattggacatgcatcttctgcgtctagagatcttcctgtggcagcgattgctatgattgttgctagtactccgagcaacattcaaacttggcaaggaaaaatcaaatttatcacaaggcacctctgaccaattcccatccccccgaactcatagcaaggggggagctcattaagttgaggaggctgaacagcttgaggccaaccaagttgagaagcctatggccagtcaagaggaagaacagacagaagttgattaggctgagcctgaaccagagcctagggctgctcagaggcaccctaaggagtgtgatgtgatctagcgtaaccccctggactcttaccatgaggctggagttcctctaaacagcaagggtcgccctcagagattagggttgatcatattgaggatgaggctactgagccatggattcttcatatggctcagtagatagatgggtatatctgttagcccaagatatgtttccaagaggggggtgaattggaaatttaagctaattttagaaatttaaaaaccccaaagacaattcatgcaaatatttaagtttaatgcaataacaaag

SEQ ID NO: 297009 - DNA, 2896 bp, Cannabis indica
ccctccttctcagaagagaaggattgcttaatgtatgtcacacgccgagtgatgtttcaccatttggccttttaaagtgaagtcattacttgaatttttatgcaactttagccttccctcgcagaagctgaagtgtgcctcctaaaaattttacatgactcttgcatgcatgtagtttttcgtgcatgaaagatcactaggggtacgacgcgtcttcaaccttcctttccatgaaaaaggactgcttgaagtctgtcccacacccaatggtatttcaccctttggtcttttaaagcaaagtcatcacttgaatttttatgcaactatagccttccctagcgaatgctgaagtctgccttataaaaactcaacaagactctcgcatgcatgtagttttttctacgtgaaatatgattgggggtatgactcatcgtcaaccttccttcctaaaagagaaggactgctcaaagtctgtgacacgccaagtgatgttttaccctttagtcttgtaaagctaagtgatcgcttgaatttttatggaactttagcgttcccttgcggaaactaatgtttgccactttaaaattctatgtgactcttttatatcaaagtagaccctagcatggagcgattgctcaagtgatggtgcagttttagctttcctcacaagaaaccaaaagcctaccattccatgaaagctccttcctccaccatgaggtcttcatcatggaaaaggatcacatacataacttgtggatggaaatacctcttggaagaccagcgtcacttcaaccctccctcttttagggatgaaccactcaaagtcttccatccaacatggtttctacctataattcaagaaataaatctttggcttaaacatttagtccaagaacaaatttccgccatggaaatcaagagatcattgcaaaatttagccaatcctctctcaaactttgggaaaaccccctccaagtggtaatggaaggaaaagatatggtctgggtgattagcttaaattatgcccccagagcaagggttggctaaaaaacacacacccagacctcctcctagggacaaagaaatggtacaggttggattttcagcaaatgactgagagtttagaggagttccaaatctctcagctcatttgggggtatggtatgtccaattgtcgatgactacaattctgacactcatttggcaaagttattagctcgacatgcatatgcaaccgaaagcaagaaacattttcaaccaagtttccctaagggaaacacgcttgaattcttttcttcaaaaactaaacttagtgtaaatctagagatgagatgcgtatttggccaaaattcttgaaaagaaaaatttacctgaatcccttctttccgatctcaatagatttcctaaagtttagttttataggttttacaattagctagaaattcatgctggcaaggatcaaaataagacaaatgcctaaagtctaggacagttgcgggcgttactcctagaaccaaacttcgtaaagaagctaaagcctcaaagatgtattaaaaagcgaaggttccaaaaaaaaaaaaaaaccatttctaggaaggcacttagtgagcagtcctcccaagtaggaaattagttagcgggaagaagcgtgacatctctagggacagggagttttactcaatggttgatccccaaatcgtctaaaagtcgttaagactaacgggaaggtttgaagtaatagccattggaacaatgtactttaagatgcaaccagcccttcaaaagcctaacaaattagaaataaagctctaaaaggaaatagtaaaaatcctactactattacaaccagtccctgcggatagggcaatgttaattgtctctgcaaataaaaaaaaagtaatgatagggagaaatgtaagaaaaacaataaaaaaacaaacaataaacaataaaaaaatattaacaaaggaaccctgcgtcatgttctgggggttcagtgatggatgctaccagacgatttggaatattctacactagacattcgctccacagtccccctataaatgtcatggaggaccctcatatcccgtatgaggagagtctattgagcatagttaatttccaacaattggatctccttcttcaagtccttaatttgatgtttggccttagtaagttcagccagaagggtgtccttaacattgcgcaggtcacagttgttcaccctggcttgctccagctccataatcagtataccggcttcaccagcagccctctccgccaacaaagccacctaatgtaataggcagataagaaaaaaggggatgaataccatgatcaaggtcaaaataaaaaaacaagaaagaaaagaaaatcttttagaaccttaccccaaccgcctcttgcttagcaaaatggactaaggcaaaggtgttgacactattacaatatgcccaaatgcccaagggtagtttggaggcatttctggccacctggtccaaaagttcacctgcaaatggtgcaacttcactccctaccttgggggctaaatacttatctaagccctccacttcccctataggcctagctggggttaaagaatgacggccatctgagatttcagctttccttacggccgagagcacagtagttcgtctgcatatcaacactttctccgcttccaaatactcccccaaagccttatcaacttccctctccctctatatggcatggcggttgagaggaatgttctttctgggaaacatgaaccccacgaagggtatctttgggagggtagaaggattatatgggtggggatggcccagccttaactatgggtctgttgggttttatgccctaaataaaactctattcatgtaatccagattattcaata

SEQ ID NO: 297010 - DNA, 1612 bp, Cannabis indica
attcttattatatagtagatatatagatttaacaaaaataagagtatttgaatctgaggtacaatttatgtttttgattagtttaaaccacaaaaatgaaaatacaatttttatttttgaaaaatgaaaacttgtttgataactatttttatttgtttttaaataaaagtggttttactaatttcttttttcttttactcaatatagaaaaagtagtgaaagtaggatgcaaatacaaaatcattttgattaattttttttttatttcaaacatacttttgaaaaacttatcaccctaaataaatttggtttgaccaacagtaacatatttgctcacaagggatagatattctggaaaatatgtaaagccaaaaacttctggataatactgtgaaagttgtaaagtagggttgacttggtccccaattgtgtagtatatattggttttattatgcaactacaagtattaatcaattttggtatcaaaatcgaatagaaattactaccccttcccctattccaaacagctttttaagttcttaattgaaaatattttttctaatttttattaggacaaaagaaaaaaaaaataatcaacaaataaataaataaaaccctataacaatttaaaaggtgaggaatctaatcaaaagtaattagtattctaaatatgggtcagattttttatcacaacacgacatcagtatgagtacaattcaacatgaaaaagaaaaatataagattgaaaacgacacaaaacgatattataaattggtacaatatgatataaaaattatgagcttaagcatgagataacatgatgttcgaagacaggacacgtaaacacgaacagagtaatccaaaagcacaatacgttaaaaaaaaagtctaataattttgatgataaatgttatttcaaaatttgcactaataacgcgttaaaacaaagcacgacatgaatagagaaactataaagtactgcatgttaaaaatacatccacgagaatagcaataaaacccttgaaaaccaagtcctaatggctcttgtaatctcggtattaaagggaaaatattcaacaataaatgggatttagtaattaaattttttttttttgaatggagtaattaaaatttaatattatgatgtattcattctctataaatactagcattttacatattaaaaatgatctgaaattttgtactagcatagacgttgcataaatattatgagaattattatttaaagtatttaagaaattcgattggcacattttcattcgattttgaacactttacccataaataacaacttatgaggagtaattattagggattatttcacaaatacacaaaaacaacaaaaaaaattacaaaaatatgatttcacgaaattttaaatatttttatgattttttgattttatttacagaaaatacggtatttttatattgtactcttattaatttattattgattttttgttatgttaatgctattttttgttgttgttttgatattatttagatgttattttcatattacttttatgtagttttcttattgttttcgtgttatttctatggaaaactgtataaatataaaaaaaaaa

SEQ ID NO: 297011 - DNA, 3768 bp, Cannabis indica
taaaagtggaatttttcaacttacctctaaaatatagttacatttaggtgagcgagcctactaggatttggattttggcccggtatttaggcccaactttaatcgatgccatcgagtccattgacgaaattgcgacccacccaaaacgcagccttgttcagtgccgtttgccacagtggtagtttcagtttcttcctcgttctagtaccaacgttgaactgcaaaaccctaacccctttcctctgaaacttggccgacgacatgtctactctagaaatcgaagctcgagagtatgttttaattttctccctgtcaattcgaatgtttttttttcactcattcatttattaatttcgttctgcgaagatagttctgaataagctcaatacttgttaaaaaaaaaaaggttgatacttcaactcaatggaattactagcttgaaattttttaaatttgtattgaaattttcgggaggtgggttgttatagaactagaataagctaaatttgggttctatttattttctaggaatgaaaaaacattgccctgttagacacttaatttctgctaaaatagcttatgctcttatatggttaatggggactgtttgtattgcaacaaaatctgacattgttgttttttgttttcttcgcagtgtgatcaagattgtgcttcaattttgtaaagaaaattcgttgcatcaaacctttcagacactgcagagtgagtgtcaggtatctttgaacactgtagacagtgttgaaacatttgttgctgatattaatagtggaagatgggatgcaatattgcctcaagttgctcaacttaaacttccaaggaataaattggaggacttgtatgagcaggtaatctagtccctctctctctttcaatctgaaagagtatattagtagtggttacaaattcatcataggttgtgaacctagaattttgtttttgatttttcttgtatttagtttttggtgaatgaagttgaaattcctggctgtcctgtactcctatttgtgcacattttaagacaaactcattgtgagttgcattaagttttttgtctttgttgtcaattatgtagattgttctggaaatgattgaacttcgggaattggatactgctcgtgctatcttaagacaaactcaggtaatgggtgtcatgaagcaagaacaacctgaaagatacttgcgacttgagcatctcctagtcagaacttattttgatccgaatgaggtattaattgtttgtagtttcagtttctctacttattttcttatggaattaatagcttcattgatactgaaagcattcaaaactgcccctgttttttttaaccgtgcaaattaaaccaccatatgagccttgcatctagaagtttattttatatttttaaatatcagtatgatgtttacagacttttttcatggaaaaataggcttatcaagagtcaacaaaagagaaacgacgtgcacaaattgctcaaggtttggtctcatttcttgtcttaatttgatcgagatctcaataaaaatataaatgtgtctttcgactggtaaagttgatgagatatttctgtttccattaatgaattctccttcctttttctttttcagcacttgcagcagaagttactgttgtaccaccttcaaggctaatggctcttattggtcagtcgttgaagtggcagcaacaccaaggtatatatacaatcttattgtgcattgacaagagaaccatattatcttgcaatctctttaaagtaacaatttgttctcccattccagggttacttcctccaggcacacaatttgacttatttagaggaacagctgctatgaaacaagatgtagaagacacatacccatcaactcttgcacataccataaaggcaagaagtttatgtatttgatttgatttacctgtgcattgttattggggtttcaatttttttcttaaaaaaacagattatatgaaaatttctacttcaagaattgaaatatgcaatattttgttatcattaattgtaactaatgttatttcatatccatcaaatgaatattgcattgaaacaaattttactatgaaagcacaaaaatgaccttttgtataaatttatgatgcatttggtgggattaaaattcatattgtggtggagctagaagatttttgttatttatattttcttgaaatttttatcttttagcaattttattgtatctccgatctcgtattacttttacaacactgaactcttcctgaagtcgtgatgtgttttttggccggtttcttggtacagtttgggacaaaaagtcatgcagaatgtgctcgtttttccccagatggacagtttcttgtttcctgttctgttgatggatttgttgaggtattttaagtggattcttgctgttgttaaatggttgagaacaatacgatgatatctaagtatatcgtattttgaataactgccaggtctgggattatattagtgggaaactgaagaaggatttacagtatcaggcggatgtgagttttttataattggattacttacagccattgctcttaataagtcctgtttagaacttaatagggtaaatattacaggtctctttagtcttgtttgttgcctaacaagctacattcatttgtaggaaactttcatgatgcacgacgatccagtgctctgtgtggattttagtagggattcagagattcttgcatctggatcacaagatggaaagatcaaagtacgtttcagtagggttttcctggcagtggatttttgtttgttaaattttatatttatttttctatttacatcttttctgtccaataaactttaaatccgagccagaacgataagtagctcaggctttgtccagtttcccttctccgggacaagtaatcaaaactgtgttgttgaacaatattgattcttttgtactttgcttaatgatgtttgtgtttagtagtatgcatgcaattaggttgcatcaatattcaaaatggcaatatgtagcattcacttggtagaccttagcatattccgaagttatatcttgatttcgtaatcttttgtacactttgataggttattttggtctttaatttcttttggtctgtggtctttgccttttcttgattcaaatagaagttgtttacttgattgaagaatttagtcatatattgattttgaaagctcaatgtaattgtatttttcacattcaggtttggcgtataagaactggtcaatgcttgcgtcgtcttgaacgcgcgcattctcagggtgtcacaagtgttgtcttttctcgagatggaacccagttgctaagtacctcatttgatagcacagcaaggtacaattaaaagcgctggttttttcaaatgcaaaagctctgttttgctccttttttttgggaagaaaacataagcttttcttatcattccatgtattctgctttcttgctgttgtcttctgttacttgtgttttcaatttccagctgttttatttgtaataatcactctttctgatctgagtatgctgctcgtgcgaccgttatacagtcagggacggagggactttagcccatatgtgggctaaagccctcactcaaatatatacatcaaattttttatatgtagatatatacatatattaattcactttactcaatttattaaagcccaattcacaaaagccctcactcaatatcttaagggaaatttacatggtatactaacttttgatattttt

SEQ ID NO: 297012 - DNA, 5706 bp, Cannabis indica
taagcgtttatatattatattatataatttggtactcgaatttaggacctctaacacacacacattctcctatagccacttaaattagctttaagggattgctttgttagtgattcggcttataggtttgtatagtttggttgttgtggtatggtttgcttgacttgagaaaggtcctctatttacattagtgaccacatacgcaagtaatttaacacataatttttagttagagtgatttgggttaacccaccttaattactcggccaaataaattaatttattaaaaatatattattgaaaaatattaatgtacagaaaatagcctttaaataggctgaaagcaaggaaatacaaaccgactaaaaaaagctacggaaaatacatttattattctagttgaaaaacagccttttaattaaaaattaaaaattaaataagtattgaaatcaatacaaaatgatatgtgaaaaaaatattaagattaatttttaaaaattattttaagcttaattttttaaaagattagagtgtacttatggggtggaaataaaactttgttaaaggaaattttatttgcaatccatacaattgacgtaaattaattttttacttttaattattaattttttttttcaacgttattttcattaaatatttttagttttttttttaataatttaatagttttattttattttcacatttttcaaatcaacttttttttaataaaattttatatatatttttttgccttaatatttgaaatatattttattttttataagtacattttttaagaatataacaatgacgaaaaaaaaaagtatttttatataaaataaaaattattaaaataaagtatacttataaatttatgtggtgtaaataaaactccctttattcctttagtgccaaaaagaatacttattttaccctctactttatttatattttaaaaatattaaataaacatttactttttattgtatcttaacaaattttgaatatataatagtaaattttattgtcatagtctaatgattacacttcaaaagatcttagtttggatctcctctaaatataaaacaaaataaaaaaaatttaaattatcaataaattacgggtaataaattagttaaaaaaaagaataggggtggtaatattaatggtcgtattcgtgtcttattgagacttatatataacaagtatatgtttgatttgaacacgatctgtttaataatcatgtcagaaaataaaatccgaacacgacccatttataaacgagttggcacaatacaacccgtgtaacctgtttataaacatagcttgtttaaacatgtcaaccataacacgtttatgacatattcaacacgtttataactcatttatgatcgattaaagtattaaaataattttaaataagtcattaacaggtcaattttatttcaaccgtgttaactcaaacacgacttgtttaaataaatgtgttagacgagtcaactcgaatacaaatgcgacttgtttattaaacgggttagacaaatcaatccaaacacaacccaaactcatttaaagcaaacctaaacctgttaactttcgtacaaattttaaatcgtgttattgtgtctgacctattttacagaccctgaaagaatggtaatagaaaagaaccatcccttccctatgcccaaatagttgcattgcgttacgtgttcatggaatttagggaattattatgaagccttttaagattgttatgtaccttctaacctccaaaaccactgccctgctcctctatctacatattttataatctatcaaataataacgtgtacttcatctctctgatcaatccattttggggagccatgaatttaattaatcaaaataattactaattttcctcacactaacatcatcagaacaaccttagaagaaatcccattaaagataaatctgtatatgtagctgttaacagtctctttggtccccccaaaactacactatatataatgagtcttaatgtactctctttactccataacatagaaaagtacttcaagttgcaatgaagagaatcactaaggctttgttcactttgacactgcttgtgtcgttcatggtccgcattgaaggaggaagagacttgccaactaaaggagagtcctctcccgacatcaatagtccacagcgcaccttaggtcttttcggcccaggctgggtcctcggtggtctgtttccatggattggtttgggactgggagccctcattcctatactcgaagtcccttggctgctccgacacagtggatatggagggcagcacccacggaaaaatcatgatgtgatcgacgggacaaaagagtactaccctcctaaaggtgatactctggttagccaatctccctaaactaagtgtgttttgtgttataaataagaagtgcctgaatggctttatgcttgtgttaagataaatcatgtatggctattgccatgtaaaaaaaaggctttaaataaatgtgttccactatttattcctctctttacattacactgctctagttcatattagtcttgaaaaccaaactatatagaagaactaattaattggcagactcattaatatttggccaatcttatcatattcatttaggcattgctacttttaaactgaactacagaagacactgttccttccataagagaaaacttctagtcatagaatgacagttcaatatgctacagaatgttttaagataacgataaaatgtatagaaaataaattttgctgagacgccaaaacaatcctttcgatctcctaaccccaaagcactccgattaatcctcctgtaacagtacaagacaagcacagcttatggacctatacaagaactaccaaacataagacattaaatgacaatgtttactatgcatggcgtcgagggccataatgacacgccgcttaacacccacaattcctaagatccactaacttatgttctattacactgcccgaaatggaattgatgaaatactgtattaaaaaacttacacagtcaaattttcataagagcagaacaatcaactagccgcaggaaggaacactctaatgagttcttttgaagtaactcttttcctacaagtagggcatttaccctgtgctgcaattgcagccttaatgcatgccttgcagaaaatatgaccacatttggtggacatttcctcaaccaaatgacccatgcaaattgggcagctaaaagtgggctcctttggtggtggaggtggcttcgggacaacttcactctgcaaataaagaatgttaagttcagtctaactttataatagttacgacttttagagattattaggaagctccatgaattcagactctagtaaacaatcacaatgaaaaatgtatgatgtagaatatatatttgtgaaagaagcaggtgctcccttgaaatagtgtagcacttcatacacatacttgaaatatgaagcatctcaacaattaaagaacaatcaacttgtgtgatcagacaagtgagccttaactaacagtaatgtaagttagcattacgattatggtctatttttgtgagttaacaatccaatatccttggcaatgaagcatttcaggaagaacaggttccatatggcatcatcataaacaagtatttgtattaactacatagaaacatcactcagcaagtgctagttagaaatcttaaccatttactgaaaccagaccaacaattatttaaaacaagagtgaattcattttactgtaaaacccctgtaagatcaaacaagatgatgaagatttacagccattatcattaccgcggagtttgcactgctttccaaatttatgtaaaaatcacaattaatgatagtctgatttggtgcagttcttctgcgcttgttaatgtgagtaatcctattccactcttctgcaatgaaagaaaagaaaagaacgtgaggagaaagagaatatgggatataaatctcaattgaaaggccaaattcatcaatgtcttcaccaaagcttacccttaatctaaaaaagacacacttatcattttccgcaacataaaccacagtttctcaccctcatttcagacacaaacagagcccaatcgtttcaacttttcatttccatcaaagaaagaatgagaataaaacatacaagcagatacctaaaaatattatagaacttttacagaagactaaattattaagagaataacagcaaacaaaaaaaaaggattacctgattccacatcaacaacagtcatgccagtgatcccacgattccttctattgtttttagcctaaaacaatacacgacaagtaaatggcttaagctacacctacaataacaataacaacaaaaatattagcaacgaactacttcataccgcagcaaatgccctcggcgaagattcaatgacatcatcatcaattgcctcaacatcaattgtggttataggaatggagtttccttgtggtctagattgtgattcctgacttctcacttgagttgatgtgccctcctgaccccaaatatcacctggtggtgcactattaaggtctaagtccaatgccgccttccttcgcctgtacccccttagattcaaccccctgctgctctgtgtgctcataactatgaacctttatctaccaaagattatgcctgagaatataatattaaagaaaaaaaaaagatatcaaaatttctattggaacaaaacaaaatatgtttatagcgagattaacacatttatgaaggaactaactctacaaacataacttcttatacataaattgtaagaactacaaaacatgttaaagaaattaatataatgtaaacaaagaaaattcatcaagtgtaagaaaatcaactgaacttttctagttcctaagtgtaagaaaatcagaaaaacaaaaaagggtttgatgatcaagtaaaaccactaaaaagaagaaaaaaaaatcatcatttcaaaacaccttgtgccaaaatcatttgagaatcgaatactatcacagttgcaaatactcattgaataataacctcgggaaaattttattcttaaaattctggaaataaagaagcaaaattcaaaccctaatagaccaaattacaatttattttttcaaaaaaaaaaaaattatcaacaatgatcagaaacgaaaaaggggaaatcaacaaaacagaaataagagagggatcttaaaaccctagacaatcatcaacgatcgaacacaatttttattttattttttctaataattccgataaattgaaaccacataaaagaaaaataaacaaataaaaattggaaaaggcttgacctttatgtatgggatgagaattgaatcgaaatgtcgatgcagtttctccaaatttttccccaaatgaaagtaggtcaaagacagacgattaaagataaatatatgtattgagacaaaaattaacagagttcaaaaatccaaaaataagaagaagaagaagaagaaatgaagtagtttcagggatatataagaacacaccgatgaaaggcagaagaggactcactttgggtctctgacgcacgtgtcagtcatagcccaaaccggcccacttccatcgcacgtgtgagttgcccgttataattttgtttggtgaaaaatatttttttaaaaaaaatcaaagaaaaa

SEQ ID NO: 297013 - DNA, 4335 bp, Cannabis indica
gaataaattgaatcatattttttctttttttttaaaaaaaaaattcggtaacggtcggttttaagataggttctagattggtcggtcggttttcggattgcaccaatccagatcgaaaatcgaattctggatttttatatataaaaaagggataagttgaagaataccctttttttgtgtccattaatcaaaaatacccttatattatatttcattgaaatatacccacttttgtgagtgagttgccaaagatacccccaccttccacttaagtctagcatattatttatattaacttaaggggtataataggaacatcatttataaaagtgagtatatcttaaagaaaataaaaatagaggtaaaaatcaaaacaaataaagtaaagtgggtatacaatgtaattttctctaaagaaaacccactaaactaactgatgctgccctagtaatttattagttactgtttatttaatattttttaattttaaaataatttttcttatttttttaaatttaaaattattaattaatcaaaagtatcataaataattttttaattgccatgtcagcaaatcatttgtttttttttatagaaagggcaaaaatctacaagtgtgttatagttcaggaaatatttgtaaaataatttatgtggcaaaaatctacaaatcctataattagcagtaggaaagcttttctaaacacatattttcattatattgaatcattattgttattattttttgaaagaattgttcaatattatattaaattattatttactattgctgctgttatgttatgttatttatttatgttatgttatttatttatttttttgaaaaagaaatttattcgggctctaaaaatattattagtaaaaagttatttcaaaaaattaatttttgttaagatgtacatgaacttcactacagggaaataattttgatcacgtgaagagttacattaaaaaaaaatatataatcaaaatgaaattaagtcatgaagatatccgttaaactgcaaagatttcaactaatcacattcacaactactttgatgtggaaatttgtggttctttgaaaaattaataatatacatatatgactattttctatttttcattttttgctcaaataatatatgactattgttgatgccaaaaacataatacacaacttggaaaactataatacatagatcctaccctatgtacccaaaaacataacaaaatgactccaattgtattattattgatgaaggaccaaccaaccaaaccaaccaactcccacctcaaaaattgaaaaaaaaaaataataaataaataaaaaccaacaattttcaagaaaggatacaactggatttagatacagaacagcttgcatcatccccaaaaaaacaaaaataaaaattggtatatgtatggtttttattactttccttatgaggaagcattaggattcttatcataaaaaacctaaggggtccggagttgattaattatatatacttcattaattcttaaacctctaataccaaacttcttttcttaaacattggttctaaactacatttagagttaaagagaagaataatataatgcatatattattgtggtgtatctcaagttactctatgtgattatcacttcataataataaactctatatattatataaaacgtgcattgcacgcacggagagagaaagaatgagagagagaaatgcttagttgaaagaaagaagaattgaatatatattgaagatgcttaaataatgcaaatggtttaacactataaataatatgaccgttgacctctaagaactaaaagacagctaacctcataatctaacgtatacatccaatcatttatgtattatatttcacatgtaaatgcctctattttccctttcctttacttcaaacctacccaaatacatcttctttcttctctatctatcttattaccgttgactttgtcaaatatttgaatccccaatgtgtaaaaagaaaccaaaccaataattataattatgatcatgatcattatgagcttcttcaatcccaagccctgatgttctgctttgtcataattattattagtaggagagatgaactccacaacaagtggtgattacggtggtggtttctttggctcaaaagacattggtggttttggttatggcattggagtttcagttgggattttattactcatcacaagcataactcttgcttcttacttctgtactcgttcccaacagcagcaacaacaacatcaggtgtctgggcccgacggtcatagcgcggcccaaggcgggaggaaccgccgggcccagcagcagcagctgcatcatgatttgcatagctttgttgttgatattggattagatgatgccacaattaagagttaccccaaattaccatactctgaggctaataagcttaagaagactaattcaacttcttcatgttgttgttccatatgtttggctgattataaggctaatgatatgctaaggcagttgcctgattgtagccacctctttcatgtcaagtgtgtagatccttggcttaggctgcaccccacatgcccggtgtgccggacctcgccgatcccgactcccctctcaactcccctggctgaggttgttcctttggctacaaggagagactgatctagattgtaaacatttcacaacacaagaaagaagaagcaatatatgcttgtgtttgttttaatttagcttctataattcttttcttttggatctcctacatattgatacagctttgtttcacatagtaaactttattcaaattaattccctttttttcttttctagtttaggattagatttacatgtttgtatattggcaaaatgtttggagtaacttttgaaaagtttgtgcatcttgtaaaggaagaacttaaatctcttctttgaaaacttatttttgagataattttttgatcttatggtaatgttctatagtagatttaaaacctaagacctacccaatcatattagtaaagacaaatctaaaaacaagttagttaagtagtacccaccacagtgtaaaaagacagctttatcacacaataaatggatatggtccataccaggcaattgggatgttctctgttcttgcaagtaattaattaaagatgaatgaaatttcagtcagataggtcaaagattagtatagtataactaacaagaaatcatttaattattaaaaagaacaatacatttttcatttgttttttaaagggataagaactatatgaattacagagaattgtctagagtacttttatattctatattatttcattcccattatcttttcctttttttgtttttttaggctactatgttcaagtatgtttaatattggaacttgccataagttgcaccataaatcagaaaaatctcataggattattatctagccaatatggcattcttaggttcacaactttgaactttcttttgttaaagccatcctttcattacaaaggctaatctcatagtttgacatgtgaattccactttatgtgagatattttagtagagttcaagtgttaaatatttggctgatagtagaagttacaagtcattattgtacttttctatgtttttctataaaatactaaaatgatttttacattttcatctactattatgtaagatttgccaatccttttataggttcttattttgtgtgctattaattgttgcactcccttagaaaataataagaattgtaaaatgtggtgttagttcagccattttaagcaaacctttgctgatgtgtcattaacagatttaacagtaattatgttcggtaaatttattgtaagtatacgcaattaagataaatatacctaacccggtcaactcgttgaccggaccaactcagtcaacccgaactcgcaaacccgcaaactgcgagcccgaaattcacaaatccgaaccatatcacgggtcgggttcgagtacaatttttaaaacccgaaaccaagtcaactcgcccaatattcaaccctactcgatagttctagaagaaaagaagaagaaaaataaaaagaaagaaaaataaataaataaataaaatttaagtgctttttgatttttacactttaatacagttttttttttgtacttttatgaaattctacacggaaacccctattgcaactaacggaacaacctaaatcgcaactaaaatccataaagcaatccacatagaaattattggagaaactaccttagaaactcaaaccataaatttttttaaaaaaaattaaaaatagtatgtggggtaa

SEQ ID NO: 297014 - DNA, 3830 bp, Cannabis indica
ccttattgtatagcctttgagctgattagcaagtcttgaaccttactcaagtaggccatcattctttcacctcgagctgtgtattcacctaggacttggttcatgactagttgagagtcgatgtatatgtcaaagtggtcagcccgtacttcatgggccattttgaggccagcgatcagggcttcatattcaacctcattgtttaaggcttttgaagttgaatttgattactcaatgcagctattgccctaggtgttatgagggtaatgcctacaccggacaattggtcagtgcagcttccatcaagatgaagtttccattttgattcttcaggtttttgttgctgctcttcctctcgcttcttctttggctcttatttttctcttgaatcttgagagatttcaagagatgtgtttgtacactcagccacaaaagtctacaagagcttgacctttatggccattctttgttgatatgtgatattgaattggccaagttcaatggcccacttgagtagtcggctagatactttaggtttttttaaacttgtcgcaatggttggtcggtgtacacctttatttggtgtgcttgaaagtatgtcctcaactttctggatgccaagagcaagttgtaggttagtttctccatgagtgggtactgactttcagcgtcaattagtctctaactgatgtagtatacacagaccgtccgttagtctaagaatgaaaggaaatgttaacttttaacttggtacccatggccctttgtaaactcacccaaaactagggagtaaatttagtatcacgatctaagataatcgatgttggagcaccatgaagtcctacaatctctttcatgtacaaatctacatattgatccacatgttgtccacactggtagtaagtgtgctgacttggtgtacctattcactatcacccaaatggaatcatacaaccatgtagtcttcggtaacccaactgaaaaattcattgttatatcatcctattttcactcagtaatttcttctaaagactaaagtaatcctgctacatatcgatgtttttccctaacttgctgacaagttaggcatttcattacagactcaactacatcacttctcattctcggccaccaatatagtgatttacacatcctgatacatctttgtcatccctagtgcaacgaatacgttgtagtatgagactcatctagtacttctcttgtcttaagtcagaacacaaattctatctttataccacaataacccattctgtgacactgaagagttcttcgctgaaccagcctcgaacctctccttatgctctaccaacatcaaatcattttgttgtgttatcttaatcctttccagatatctaactataaggtgatattggctaactttccaactaaaaactcaattccagcttttgtcatgtcttgtttcaactttgaaggagttctcttcaattcatagacttgaccgtaacctttttaactcagggcatctgccaccacatttaatttcccaagatggtagaggatttcataatcataatcttgtaaccactccaaccatcgacgatgcctcatattccagtctttatgtgctaagaagtatttaaagctttcatggttggtataaatctcacacttctagccatacaggtaatggcgccaaacttttgggtaaaacaccactgctgccaattcaatatcatgagcgggatagtgttgttcataatctttcgattgcctatacacataggaaatgacctttttggaatgcattaagacacaacctaaccattatttcgaagtatcacaataaatcacaaacctctcatcactagttggaaaaatcaattctagtgttgtaatcaatctttatttcatctcttgagagctacttgcacatttattagtctagacgaacttgtgattcttttgggtaagttaagtaaagagtgttaaatcttggcaagcccttctacgaatcttctgtggtatccatctaaccctaggaaattttagacctcaacaacatacttagatcgtggccaaactcgaactactactatctttactaccaaaattctatacttactcaccacgtgtcccaagaaactcacttgaggcaccagaattcacacttcttaaactttgcataaagtttatgtttacaaagatgctgcaataccatttgaagatgtttctcacatgcttccttaaatttagagtaaatcaagatgtcaccaataaaaacaatcccaaaattttttaggaagtctttgaatacccgattcatcaagtctataaatattgttggagcattggtcaacctaaaggacattagtagaaattcatagtgcccataccgattacaaaaagcagtcttgggaatatcatcttccttaatcctcagctggtgataactagattgatattaattatagaaaatatggtctttccctgaagttgatcgaacagatcacctatccttgataaaggatacttgttttgaatcgtcaacttattcaactcctgctaatcaatatacattctcagtaatttgtccttcttctgaaaaaacaaactggcacaccccagagcgaagcactcagtctagtaaactacaaatcaaacatgtttagcaactgaacctttagttcctttaattttgttggtaccattcaatacatggccttagaaactcgctctacccccgatatcaactcaatctcaaagttaatttcttattttcgtggtatgaaattcacataccacttgtacactctcgagtctcacatgtatctacttagtagtacctactacacttgcaagattgcttatatatccttcccataggaagtctctcgccttaagcgcttttaatttgggattcaaggtccatgaactgtacccacaaatacaaatgaagtcttgccctctagttcaaatgtcaccattctccttttacaatcaatggtggtattatacttgactatcaattcattcccagtatcacatcgaaatcttccaaatttagcttaatcaagtccaccaacgatctctatcttctacatacactggaagagatctaacccaccttctagagataaccatttctcgagtaggtgaaaacatatcaaacccacttgacaaaaaattatatgacctactattcaactatggaaagtgtatcgagctcaacatttcccaaatagcaccttttgtagctcaaacattccgagtaagtctgtcgattcttattctgcccagacagaaaccttcattaccttggaacttctcgttaggactcatagctagaaggttgtttggtttccttcactactagaaaattggattttagtgacacacattgagtgactttaaaactatatagtgacacttcaatgcgcgtcactaatgaaggtgactggaaagacagtttttagtgacacttcacacgtgtcactaaacccttttacattcattttttgcgtgtcactatagttgtatagagtcaggttttgtcagactcaaaaagatatagtgacacacaaaaaatgccactacagtaaatattttttacaaaaaataatatttaattattttaatttaaattttatatattatagataataatttatattaattatatacaaatacaattaaatataataataataattttaattaagtaaataatattttatattaatcatttttccaaaatcaccagagcttacaaatgaacaatttttttaccaatactaatcttttttcatacaaagaatccaaatgtactgtatgaacccaaccaaaataac

SEQ ID NO: 297015 - DNA, 3012 bp, Cannabis indica
tttattattttactgctttaattatttttaattttttgttcatccctattttttattaattactattgattattaatcttgtttttgctagttgtttgattgtataaattttagttgatttgatttagttgtaattttcccacatatgacaacaggatggggctctgagtggatcttcaacagatttcggtgagatcagatctatttacactcctatgtatggacataagcaactactgcaaagagaaagaagttactactaaacacagagttagattaatagagacaatgcatatattagagagagaaagagaaaggagaagatcgagagctttgtatacaaaacgacaaagatatactaaaacgaaataaattgttatcaatgaaaatatataaaaggagcattgaattcacataataaaaacacaaaaagacaaacagagacacactatatataaagcaggagtcaatacccgaaccacacccccttgctgactggtgaggccccataatgcatgaaactttttttgtaaaattatttttttttaacaatattcaaacagaattgttgtttcttgagccttaccagaaaccaagggtcatagttggtgcgctcttgactccccctctttaaaactcccatcttgaaattaaaaccacacctttcgtaatctcaacaaacaccaacccaccacctacccaaaatatttaatacccatctcaaaaaacttacgcaaccccaaagtaattcaaacccacttatttaccaaaaggatcatcattcatcactaactcactctactactgcatacgtactcatagcttatagtactatagtccactcaaggctccactactaccatttcatccaaatgctcacacccacccaaacctatagtcacaataaacttaaaaaaaactaaacgaatgaagtactacagatagatagagagttccatttctaccctttttccaaaccctaagtgagtatgtcaaagtaaaggtagaaaagaaactcatagaaaaccctcctccaaaactctctattggctggggccatcagcggtagtagcagtgccatggtcaacaccagaggagctccctgagccaccattattgtcagcacaagtagtagcagcagcagtgctgccgagagcagccatgatctgtcgaatagtgttgctgagatggttgttgatggcattgacactagggaggctgagcttggccgtgggatctgggctagcaaggacttggaggccaattgtaagaagacagccagatttattaccagtggcgttgttgttttctgatgcgagttcaaccggaacaatgacaaagcccgatggaaggatagggatgaaggatggatccttgccctgcatagccagcttgattgcgtctacatccatagtggagtagactacaacactgcctgatttgtccgtacaactctcttgcagcatcagctccatgggttgtgctgagttgctggccacctgcatcaataaatatatatttatataagcatacataaaaaaaataacaatgaagttggactaggtacaatgacatatatatatacaacacaaattgaccgaaaaggtacgagaaatatgcatacattaattcgaagaagagaaatacagtttcctgggtcggaaccattggcaatgtgatctattttttgtaaagaattcccatttgaaagtacttcaagctgccaaacaacaatgtattagttagaatgtaagtcgaaagtaaataaaaaaagaaaaagaaatagcatatatataataatacatgtataaaagaactataattagtaaataagattgttatggatgatcacctgggatctacggccttcatccctcaatagattaaagacttggtaatcagggaatggtagaaaagtagttgaaacggcgctaagaataagaccattgggttggccaggctgaggctcagtaacttttcttgtggttattctaactgtgtcctccggattatcagataaagctgtccataactgtccgccagaggtgcttatgttcacacaaaaagtcctaaacattctctgtgatagattcatcatgttcttccttgcatcagtagaatgcatcactgtgcaacacaaaattaatatcataatccgtaaatttaacaacaaaagagtaaacatgcaaacatataagatgcaaaagaaaatatgtatatttcaataaaatgtgtgaattgtagtatgcaattgcttcttattatgtgtgtatgcattgacaaaatatacacagaatcacattctaattaaacatggtattatttttagttgtacggtacatatacgattaattagaatgttatacatgtaatatttatataaatgttaagagttacctccaagatcagtaatatttctagccatgagacttgcaatcctttcacactgtctcttcaagagagctaaccagcggggagctccaaaggccattccactttggacaaagtgactgaaagtttgatgaactgtcttctcctggtctatctcagcatgttcaacccatgtgacctgtatatatgtacgtaaataattataataaactcatgaaacaaaataaattacctatcttatcatgaaattacttctagcattcaacttcagttttatttagcaaggttattatatgttagaatttaggatgagagtgagtgtgttagaattcaggaaaaaaaatgagtgtgtagggtaagttgaaccaggtttaaaaatgaattggtaatgagagtagaattatctttctaacatgtacctcgagagtcaagatagtgaaattacctaacatgttcttcaagataatagccattttttacgtcactaatcttggtctgctagaatacaaatagctcttttgtcttattattcccaaaacacaagtaactaaaatttaaggatgaaattcggtaccatgcatgaggcactacaaatttttttactttttagttacaacaaaa

SEQ ID NO: 297016 - DNA, 2234 bp, Cannabis indica
tttttttgtttattttttttttgtttttgtgcatttgtgaaattaacccattatttaaatcattatgtaaaaaataaaaaattgataaataatctctttttgaacacggccattacttttactttataacaatgatccaaaatgtactattcaaaataagaaaaaaaatctaaaaaggttatttggcttgacatgctactctaccatgaataataaaatatgaagatacaaaaatctactaaaaccttcattttcataatataatgtcttcaataataaatccaatccaaacactccaattcagtacttctcttcacttcttctcctccacaccttcttcttcttcttcttcttccttacccaagcttagactgaaaccctcaacaacaactacaaaactcttctgcatctcttccactcccgacgccatggcagcccccaccactgacgaagtagctcgcgacttctttccttttctcagaatctacaaaagcggccgcatcgagcgaatcgccggcgccgacgttgtcccaccttcgattgaccccaaaactggtgtcgaatccaaagatgtagtgatctcacctgaaaccggagtcaaagcaaggctgtacgttcccaattcctctgtcgccggtcaaagccaatctccgaaaaagcttcctctggtggtttactttcacggtggaggtttctgcgtcgagacacctttctgtgctaagtaccacaacgccgttaacaccttggtcgccgaagccaacgtggtggctgtctccgttgattacagattagctccggagaatccgatcccgattgcttacgacgattcatgggatgccgtgaaatgggtcgtttctcattccgaagggactggtccggaagagtggctgaactcacgtgcggatcacgagcgagttttcttcgcgggagacagtgctggagctaacattgctcatcacatggctatacgagtgggattagaaggtgggttaagcaatggatcgaagcttttgggtattgctctgattcatccttacttttggggagcagagccgattggtaatgaggtgaaatttccagagaaagggaaatgggcagaagggatttggcgttttgtgagtccaaccactactggtgttgatgatccgtacataaatccaggtaaggatagtaatttggggaaattgggttgtgagagagtgttgatttgtgtggctgagaatgatttgttaagggataggggattgtattataaggagattttggagaagagtgattgggttgggagagttgaggtggtggaagctgctggggatgagcatgtattccatcttactaagccaacttgtgaaaatgctgtggctatgcttaagaaaatatcttcctttgtcgaacaaagctagggtggtccatttaccattgaagagaattttatttagtgtatgtttttttgtttttcttatttgtttggaaaaaaataaagtggaattctcttcacattattgttgtttacattaaaagaacatgaacatgttattgttgttttgatgtaattggtggacttggagttggacttgtatggatggggaattttatgtggtttcttatttttgttggagttattattattattatttaagtaatatattaatgatttatgtatcgaattgtggtccattaaaaattcctcatactatttaaattgttcttttttaagaaatgactaatatcgatgataactaaataaataatgagatatagatatatatttctacaaaataaaataatggataaatatttagttaaataaattgtctatccattcaaagagtatgtcaaattaatgtatgtgttgttatattagccgactattattagggacatttttaaaaatctagatggcatacttgttatattctctctcatgatcttaaatcattaaagaagaatgtctcttaacaaaaaagagacacaattactaaggtggcgtttggttggaggtaatgaaatggaatagaatagaaatgaaacaattttcattccattcctttgtttggttgcattttaaagtattggaatgacatttcaatggaatgctctttccaccgttttggtggaatggctattccattttaaaacggaaggaatgaccattccaatgtaacaagaaaaaaaaattaattatttttttatcaatttttttttatgtattttaaattttattccattcaatt

SEQ ID NO: 297017 - DNA, 3509 bp, Cannabis indica
tttttttttttactttttattttgtacttaatagtatacaaattgttttgtggtaatttaaattatagtaaaaaaataattaaaattataactttttctcttcaaaagttcaaagaagaagttaaactttgtgaatttgatttacattatatgagttaattattttgtgaataaatatgtttaatcttataatattaatatgcaaattgctcattaataattgaaacctaattaataaaatatatttctaaacaccaaatgatttatcaaaataatcatataatatgtttctattctaattcaaatctaacaaagaaatgtatatgtaaatttgtgtattaaaaatgaggtaattagatttagagatttggagttcctagatttcttttttttttttgggagatattttttaaatttaattatattcaaaaatatttcgaccaaactcgattacagaacctaataattttaacattttacaaaatacaaaattgaaagttaattttttttaaacacaagatctaaacaaataatgaatcgaaacgtagaatgcaaaattgtataaatcggtaaaatattattttctctatactattctttcttggtatgttatatttttaatttactttctcaataagttacaaatatatattaacatagtgttacatattatcaattatcataatcagagtcggcttaggctaagatgggctaggcccgtgcctagggtccacctatcttagggaccaaaataaaaaaatatatctttcaaaaatatacatatttttttaataatttttaaaaatataatttcttcttaggataatttcaaaaaatacaaaaaaacaaaaaaaatatataaaaatgcggcatgtacgaaattttcaatacttttatagattgtcagattttatattcattaaatacggtcttttatgtatttttatgttgtactcttgttattttgttgttaattttttgttatttgtatattattttttatgttattttgatgttagttttcttgttatttttatgtattttttttgttattttttgtatttttttagaataccgtgaaaatataaaataaattttaaacgttaaaagtaaaaaaaaattacaaaattagtgttttatgtaattaatgatccaattttttttcctaacacctatttcaattcagaatcagcccagactataatttaatatctaaaagtttaacctccatttttttgattgggaatgttatatatattaaacagaaatgagtagaagtgtggtgatttccaagtgtagagagttcaacaaaagaggagttaagtatgattggaaagtgaaagtagataaacacttaccataccaacgttgtacagtcattagtagtattttgttcatgccatttcatgaagaagaaacctctaatattcattccacaacaatagcaagatccatggcttggtttacagcagctctttcttctggtgttcctcttgtctttgttaacatccaaactgaacaaatcattctcaacttggtaatatttaactatatttatatatttattgacccttttttcggtacttttgccctactaataggggtgaatctgtttttcggtatgtcgagaaattataattaaaattttgaataatttattgtgtcgaaaaataggattcgaataatcagttgcacgtgatgtaactgatcgattattttgagctctatttttaacactacaaaatatttgtaagtttttgaaaattagtaggatgtttgttatatataacttagggttataatttctctatgtagcaaaaatataaataaaaatgatactcacattgtagaatttcctttgttttgtatcttgacttttatatatgtttgtttttaaaaaaaaaaaatattgaaggaaaaggagaaagaaaaagaaaaagaaaaatgtaattggagtcggcaacaaaaccaaaatacgtctttccgagtattgcaaggtgtaaggctctggtttctaccaggtgtatctgaggtttctatagaattgatacctaaacttggcgaagagcgatttggaatggactttaaacgcacagaagaggtaagaaaattaattgataatgagtagaatagtctatgataaatcttataagtttaataatattcttatatttatattttgaattgttatttaaaaattttgattgaagcccatttgaaacatgaatttaaaggagttacatataaaaatagaaagaaaaaagaagaatatgtttgttattttgaaatacaaaattagataatttatgaacaaaattgatggaaagaaaaaaaaaattaattgcctccaaaactataacactttgttaagtcctattgagttttaactctgaatcacttcacaatcaattaaattcacaatcttatataagtctcacatctattcaaatgtgagacattcttgtacttggtgctaaactttgacatacatgcctttgttcacacatttacacaatcatttctagggttttatttgggtgttctcaataacaaaagatttagcagccgatagagcggggttgcgcaacttatatgatgaagcatacacgagtggacacatacttgtgctatctcgtttggaaaagaagaccttaataccttctcacgtgtgcgctgaagggctcataaattgttgcgaccacaacgaaattagggcaacactcatgtcagccattgagcaaatggagaagattcagctccatgttatggcatggcccaaccaagcacgccctactactcgagcattcagtgttgctgcaacgcttcgaccccctattgatgatgttgcatcagcataaaaaatatcaatatctctttgtcttgtatagactttttttattttattttctctacaactattatgtagttgggttaggtgtactgtgtatatacattgatggataaaataagatataatgacattaatgagtctcgcgttgaaaagtaatttctaggagtgtttagttaaaaaaaaaaaagataaatactattttttggattctgtattttacaaaatttattgatttgaccatttgttaaatgataattcaaaacctgagttttttaatatagtacaaaatagactctaatttttttttttcaaattattaaaacttaataataaccagatctggatattattaccaaactggtttcatctcttcaaatgaggtgggggctctggactcaggcctactctacctgtcccgacacatttgtgacactttttattcagtctttgtcgaatcaaaggtagatagaaatatttgaagagagctcgtaggtttgatgattcataatattcataagatcgatagtctcttgtacggttgtttataagttacaagctactacatggaagaagttgtagatatagcattgacaagtaaatattttcagtatcccaggaatcaaagcccctggtccggatggatttagcagctcctttt

SEQ ID NO: 297018 - DNA, 3093 bp, Cannabis indica
cataggtttagataatctcaaacctacaatactaggatcaggaagttttgttaagtccattgaatagacttatttcaacatttcctatcttgtccttttaattggaaaacttttggttactccatatgaatagttttaaccatagttctcttggttttgcttcttagtttcttattctgactatccattacttgtttaaactaacaatggacgaactcctcaattagacaaactcctaagttgatttccctaaaataggggttagtgtcacccctgacttgggcacaccttcaagtggctttaggtgccgcctctgtcttctctgtggtttcaaccttggaggccttggtcatctctctggccttcgtgggagagcccttgcttgtctgccctgctgctaaagcagcagtagaggtattcttggcgagagtcaatgatgcattataacactcgtgggcacttccttggtttccaatgagacaaccgatactagctatcattaggaatttgatagacaagtggtatattgacgagatatctccatgttcatatagggttggccatctgagcatcacattatatggagacttcatgtccaccactatatatgaatatggccatgatggtggtttgccatggggcagtgccgactgtaagtggtaatttgatcttacatcatggtgctatgcctcctccactgaagtcatacaatatagttgcttgcatggctctaggtcctcgagtgacaaacccatcagtattagggtttgtttaaataagatgttcgaggatgcttcgtcattaattatcaccctagccaccatcaagttagccattttcaccttatcaaccaatggatccttttgagggtagctgacatgatacgagttagagtctctaaatgtgattggatcacactcgtattgttgagacttcgaaggacattttgcaaactctaatacttttgctcttggatcatgtcgtaaagaccttacatatctttctaagacctttcttaaatttctagccaagtgtgggcctcaaattaaaatcttgagctttcctacaactggccaggctggaaaagttcattgcccccagctggagcttcaggcatacatactactgaagagtggcttttttttgtctgatccaaaattcaatctcatctcgcaactttgattgcactaatttttgtaatgtccgtaattattgtgatagcaatagaaatttttcatgtctctcttccctgattctttaaaaggaagatgtttttggtatgagaccatttactgctgggtggccttatagatctcttctctagggggcaagagaatagagtagatgataaaacgagcttcatactcctgtatgggcttgcccccagttttcgatttcttcccactaggggagttaccttgtctgtctctattgttggctctttttcccccattaaagcctcttttcttcccactaccatgcgctccattggtattgtttagggagtctagcaatttcttcttgttatttttcaagaccttagcttgagtgacaaatttttcaaacttgataaaccatctactctatcacgaaagtcattcatattgtagactgacttgagatgaagtcagaccatagaggactcaccttcctgagtctggctacaatttccataacccttacttcctcgcaaagtatttttgtcttagtggctacccctaattaagaaccgttaaatgtagtccttgaggggttctttttcttattttttgacatctaccaaatcatttggttcaatttggcgctgtcgtgatggagcgaattggttaccaaaagcattcactagatcattctatgagtcgattaattcaggggaaggcttaaggtaccaccgttgagctaggcctatcagtgtgattgggaaaatttcacacttgacgtcatcttttactccttgaaaattggtctacactttgaagtaatgaatgtgagacaacgggtcttctttactggtgtactgatgccaggacggattcttgaactttggaggaaatggtagagctttgattgagtttgagagcgatgagcgtcgctctttgtccagatcaaacattgataactttgaggtcgtgattcctctcaccaaggctgctaggttttcaaactatatcttgttgacatagtgggtggtgttttgtgtcccagtcagaacttttgtaacccaattagggtcacctctagaagctcctgcttccaccaagcgtcttatagttagagtatcacgcatgtctattggtctcctaagtcgatcatgaactcaatttgacttaggtttggtttttgtcttctgaccacggggtcgtgaaggtaacactagtgatgtctttggaacaaaatttgggtcatcttgagatgaagcattatgggagcggtcatttagagcattgttgtgactacttcgcttaaaatagtcttcggttggatcataggtacaaagagaattgaattggttactcaagctcaactcctctccatgtatctgagggaagcactcatattggccatcggggtcacgagcaaagtaacggtacaactcacctctttcatctcagtaatactttcaagtatgaagcgacatattgatccttaattgatggaactcatagcctcctattttaaagtagagtgttcaattttttcctttggtatgagtattaggtccctttccttatgcagggtctcggggcctggtgtcattagagcaacagagagaacatggtagagtagttttgttggttatatcggttgtttgtggtcatttcgcataaggtggagggtccattggttggcgcccttgagcttgagtcctttcagactctttcccaaggttttgcttccctccggtgagtctcaaaaacctgttatttgcttagtatttgcacggttaccaggtttgatagtaggtttccaggcattaacagtttccccttgagtactcattcccacgtggccatttagttgttgctatatttttaaacgctacgcaagtatacgcaatcaagtgtaaaaatctcacacaggtgaggtcgatcc

SEQ ID NO: 297019 - DNA, 5743 bp, Cannabis indica
aattttttacaaaaaatagtaccttttgtaattatcccaaatttaaatggcccatatattatcagggcccaaatttaaatgttggttgtaaacactgcaagcactcagcaaagccccccaaactctttcgttgtgctctgttggcatctcttcgaatcgaccatgcatgcatgaataatgttgtagccctgaaactatttgacttgtaaatcatcaacttaaaaatccaacatggctgcaacccaattgaactcatacaaaagcaacagaacccaaattttgcataacagatgcatgctgaaatcattgaaatccatgatacaattcatactgttaaatactttacttgcttcttctaaacaaccacacttaccatacatatctaataaagcattttccaacactaaatttggctaaaatttcttcatatcaagaaattgggactgcatcaggttctttttcacaattctcaatctgtagaaatagatcaaatgcttcaccaagcattgagttacttacaaaaactgttatcatcatattccatgaaaccaaacttttctaaattaccaaacatcttcttaatgcatgagacattgtaagatgatgtgcaatgcctcaaaaaatatgttttcgtgcatgtcatgttggcctggatcatatgttttcgtacttttcaaaaaatataagtcgtgtcgtgtcgtgccctaaaaaaatatgttgtgccataatttttaaagggtaggcacaatacgaaacttgatgttttcgtgtcgtgctttaatcgtgccagcccgtttttatatccgagctcaaattcgtgctttactttttcatatttttttaacaattaaagagttaattattaaaatatatgtatatttatagttttaattatatttatataattttccaaaaatattttacacatataaaaaaaaataaaaaaaaaaaaaattaaaattattaaaatttaaatatttacttatgaaatgtcaaatttttgtatcactcaataaataaatataatataaaatatagttttggttttactttataattattttttttaaaaaaaaaatcaatagttttaattatgcaattataatttttattgttatgtttaagttttattgttattttattttatttataattaataaatacacatattattattataattattaaattattgagtttttaatgtttcgtatcatgctttttggacttgtcacataccgtgtctttcggactagtctattcgtacttatgtgtcgtgccaatttatagcatgtgtcatatcgtgtccgaacccatattttttcatatctaatcatgctcgtgctttccgagctcgtgtcgtgtctaaaatctcgcctcatatttacaacactagatgcgagagttagccattgttccaacattaggtctttgcctaagagactctatttcttgacaaacttccaatgcatcatcaaaccttgcattatgagtgtaccctgtgtttagggttctaactaaacattttataaatgaatatatattactttaaatatacacatacatcatatattatatatataaatatatatattgctttaaaaaataagacacaaatttacgtagttcaacaaattttatttgcctacatttacggtagcaaagagtcgatactacattttaattaatatgaaagactacaaagatcaagaggaaatagtatttatttttgtgcaagatgatcaattttggacatgtatggtaacttagattaggttagttttttcgtgagtatttagtagataaataggatgcattatacaatataattatctttgtaagaagaaaaaaaattgtgaatagaggaacttataagttatgaacaagtttggtgaattgtaaagactattgacggatcagaaggtggtgtaagcactttagtttatagagaaggttatgaaatagatagcttaattttcataaaaggttatgaattaggttttcatagagggttataaaataggcagtctgatttttatagaagcttgttaaataagcaatctagtttatgtagaagcttgttaaataaacaacctattattttatagaagcttgttaaataggcaacttggtgtgattaattaaaaaaactattaagaatgtgatggttgtgtataaaagaaaaatgatgagatgagatggttgtgtgtaagagagaagaataggaagcaatgatgaaatgaaagctagtcctcttctgcgcttctgagttgtgtgttgtgagttccatcagccttccttttatagcagctaagtattaacctaccctacatacaatctcctcaactaatttcactaatcttatctttttatcaacttgtgaatcgaccaacttatatgcggatgatggggacaaaaataatagtaaatgcatatttgatgaaaaattgaatgatgaaagtgaaaaacttatagagccatctattgctatggagtttgactcacaccgtgatgcacatgctttttatttgaaatactttaagttgattggatttggtatctcaataatgcatggtcgtcgatcaaaaatatcaagagaatttattgatgtgaaatttgcttgtacaagatatgaagaaaaaaaaaatctagtgctagtaatgaacgtccttgtttaatgacaaattgcaaagccatgttgcgtgtaaaagtaaggttggatgaaaaatggtatgtccacaatttcatcaaggaacataaccatgaagtttatccgagtcatgctcattactttccatgtcatagacgcattacttcatccgataaatatcacatgatgctttacatgcggctgggttaagcacaagcaaaatttattctacaatggccaaacgacatggtggatatgaaaatattggacacatggaaaaagatattaggaatcacttggacaaagaaagacggctagcacttgagcatggtgatgccaaagcaatgcttgagctatttatgcatatgcaagaagaaaatccaaatttcttttatgcaatggatttagatgaagaacaacgtctcaaaaatgttttttgggtagatgctaaagtcgtgatgaatacaaaatttttggtgatcttgtctcatttgatacaacttatattacaaaccaatacaaaaatgccatttgctccatttattggagtgaataataattttcaatctacaatccttgggtgtgcattgcttgcaaatgaaactacttcaacatttgtttggttaatgcaagcttagagcgattggtggaaaagctccaggtgctattttaactgatcaagacaaagttatgcaagctgcaattaaaattgttttctcaaattcaaagcatcatttttgtttatgtcatatattaaagaaaattcctaaaaagattgggcattttgtaaaagaaaatgcaaatttcatgagagtatttaataattgtgtttacaattcatggacagaggaagaatttgaaaagagttggaaaaatatgattgaaatattttagcttgaagataatgaatgacttgataccttgtttcaagatcgcatgtattggataccgacttatgtgagagatactttttttgctagaatgtctacaactcaacgatcagaaagtataaattcttttttgataaatatgtgaacaagaaaactttattaaaagaatttgttgatcaatacaaggtggctttccaagacagacaagagaaagaagtttatgcaaattttaatacatggcacaaaagtccagctttaaaatcttcgtcaccatttgagatacaaatgtcaacaatatacacacacaaagtttttaagaagtttcaagttgaggatatgggggcatttggttgcttttctatgaaagaatttgatgatggcatcttgaaaatttttaaagtgcaagactttgagagaaaagaaaattttgtagtaaattgagattcaaattcaacaacaataacttgtttatgtcgcatgtttgagtattacggatttctttgtcagtatgcaatttgtgtttttcaagaccttggcatttttaatgtgccattatatattgaaacggtggtgcaaagatgcaagaagtttatactcaactatacaaagtccaaaaagtatacaatccaagaaacaacgttttgatgagttataccatgaagctatcaagttgagtgaagaaggatcaatgtccttgaagagttttgacattgcatattatgctttgaaggatgcactaaaaaaatgtattatggagaatcattcacaaaagaactccataaatcctaacattgagtcccatgatcttaacaaaaaaaatattgatagcaatgtcatgcgtaatatttcactaaatgatccacaagtttcaaagactaaaggagctccgaaaagaatgaaatgtagaattgagaaaaaatccaagaaaagcacatctaaaaaggtattttaattattttgatacatataaagttattattattttatattttctcaaattaatatgtagatttttatattgaaggcattgaagacagttaaattatctcatgaagaagttggatgttcttctcaaaagatggtttgtttatttataaaataatgattatagttatatgttacttttatttaaagttttctttatttgtaaaaatatcatgtaattattatgtataccggtaaaaaataatattgaattcgcctcttatgaaaattaagatttacattattattcagtaagtaattttaatcaagacaattcattttagtttgttctttaagtaaggaatatattatagacaaaaaatataagtaaattgtattttttgtgcttgtagggagatgataacatcttaaaatttttgtctaatccacattttcaacatttggatcaatgatgaagacaaaagataatagaaataggtaagctataataatttaattttaataataatatatattaatttgaatctaatattttgtttgataaaaattgtgttacatgtacaaagaggacattcaaatgtaattcttgaagaaatttttggagaaatgtaattttaatgaaagacagcaagcatttccctttttggatgtcctatctcacattcgaagctattttagatgagacgggggggagaggctcctttagggatatttttgatccctagaaaccttaaccatgctgcacatgtgatcgcatcctgggctgcgtcctaaaacttgtgtcgttttttttttctgttgctgaagttaattcccttttgggagatgtgaactcagttgtttaactttttggtttgttttccaatggcagcatgtttaataaaaaaaaaaggaaagacaacaatattatatattatttttaaatatatattataaaattatgaacactaaaagaaatgcataaattatttttaattggtattttcatctcaaaaaaaaaatatatatatattaatttttttagactgctttatattatatgaattataataaaaatataaattataataaagatataattaataaaagtaaatataaattttcttagttgactgaaaattgtaagtttttattggtacatctatatatttaaataaatatataaaataaatatatttaaattcacgtaataatgaaacaagtgaaaaaaataaaaatttggatagctatatatatttataggcgaacgattttgtgc

SEQ ID NO: 297020 - DNA, 4418 bp, Cannabis indica
agatattttcaccccctttagcttccctttttgtaaattgggttgaaaaaagggaagctaaaggcttacattgtagtagtgcggggagctcccctattgagcatgcgagtgagggagatcgaggagagtgagccacgaagagagaaagggaagctgagagagagatggagtgcagggagaggctgacgtgcggggagctactggcgcgtgggtagcatcgggcgggtggagttgctgggtgtgcggggagcagctagcgcaaggagcctgcctgcagcttgttgctcctcgtgtcggggggcttcctcgtgtggggcgttctcatgcagagcggacccatatttgacttatttatacactttgaagtgctttttaaaaaatttctcccgtttaatctagagaacccaaaattaatacttagtaaattttggggtcaacaccttctttcccacctatattgcatcgtctcatctattccccgaccttacaaatttttagattaccttatttcctaaacttacctgccacagttacgcggttacatagaatgaccccatttcattgttttacaaggtccaatgtagattgattggatgtgccttctgcgtgacaaagttacactttgcgaattggtgtacatgcttgtaagatgagcttactcgagatagttactcagtggcttaaagtaacttggtcaattacagtttccaaatttatcacttcacaatgccaaacagtcttcacattattagatatgcattttactctagtttttacactgttccattagttctatttttttttaaaaaaaaaaaatcaattaataagaatgtcataactttgggcttacaaaaccttatcaatcttgtttcctaaacatacttgccacagttatccgataatattcaccattactccctttctttgtgtttacctagaaatttgatctgatgacatggacaacacttttgacacgcaacaagaagaaaacaaccttgggccttagccaccgggactaatggtggtcaacttaggcattgaaaactatgtcggtgccccggttgataatagtggatgcctaggttggcattaagatccagtgaagacgtttctagctgccatccttcgacattaaagttcaagtgaacatgtaatgccctaattaaaggaacgctatgtattgtgattattacactgtgttaatcttgttaatcaaggtcaactaagccaagtgaattaaatgaaataactcataaattaaaacaccctgcaataacttttaatttaaatcaaaataaaattacatattcatacgcgatcctgtaaaatctgatcaaaatattacaaattatttacataaaagacaacagaagtggaaaaatgagatttctatagacctttctcaaatacaaactactatgagatgagtacgcatttaaacataaataaaagaatatcttgacaaattttttccaaatgattacacatttaattgcaacagtaatgatattaatacaaagagcattactattaggtactagtggtgcctagcaccttcttaacatgttgtgttacaattggttagtgatacttcttaaaagctattatattaaattatatgggactcgatacttagttgaaccaataaaaatattgacacgtaagaaagtactaggcaccactggtgccctttagtatttctctaatacaaaatattctttctttagtacaaccttgttgatatgagaacacgaccactgcagataagatcagtaatatttggatatagataatacacaaagcttttaagttgaatgatttctatttaaataaaaatattaataataatattacatcaggctatgtggattataagtaatagtataaatatatattgatttattttgtttttgttttttggaataaatgaggattttcatcattaataagcataaaaacagaacacggtcatcagcccggataagctataatatattagaaaccataatatatatatgcatgtattgaaattgaaatatttattgcatatgatttggatagagatctcttaataataagaatattattcaaataattatatatacataataaaaggacaataattacaagatgagaaagaccgtacagaacccttatctgatctcaactaattacttgccgagtacttgatttttgatacatgcatctacttaattatataagaacatacatataaattatacaatataattaggcaatatatttttagtcatggaaggtcttaattaataatttattagctttaaataaattattaattaatttttggatggatactaattaagtagatattgatagaaagagtcccgatcgtgatgattgcaaatctatatatatatatatatatttatatatataattttctttatctctctcttttggttgctgagtgctttcctaaaccaaatgatcatacatttaaaaattaaggaagccaaataattattaaacaaaaactaaaaataatattattatagaaagagttcatgaaaagaggaaaatatatataaaggagaatcatatctcataccttttttctctttctttctttttcataaaacctaaataaatatatttgtatttttataattcaaataattagctagctaggtctccaatatatataaaaatgtgtatgcttttctatcaagttattagtgatgaaaaacacgtggctaaatatgaactttcaattatttgtggtccatttaatttgacagatatacttggtatagaattatgtatataatatatatgatagaaagattttcttccacagtaagaaagaatattattctagctataaagatattgtcaaatttttgaatagtgttttatagtgataattatttcaataattatcataacgttaattgatgacagaccagttataaataaaccaaaaagagatcacatttttcttcaatttggtggatattttatttctatgaaaatataaaattgaccagagcaaacactagctagtaaatttcaaataatatgataaagacatcagacatgcaaaatttatacagctataaaagtgtactaacattaatttcgtgtcattgatctttctaaaataattatcatatagtacattttaaattaattttgttctttaataataaagtggtaatttttattagtttcaataacattccaaaattagatactatactaaaattgctatttttttttcttgttaaaaaagctacaaaatggtaagaattgaaggacttattaattaaagagttcgattgcatgttcaaacataacacacatacatgcacattaattaattataaaagtcttttaaattaatttggctataaattgtgtacattatttaattatttttataccaatattataataaaacaagaagttatatcttaatataaaaaccaattatgtatataggaatttgaagaattaatgagaaacagctggatcctcataattcaatgggaccaacaacactatcaattgattaatgaaggtactatagccaaaccctagtattgtacatgaataatatataataacaagacctctaaagttgaaaattatggtacccaaatttagtttgaaatccaatccgaaaagtttgtgttgtacagtcacatgcagtgagtttttaatatgtataaattttcctattttgttcgttattttttttatgagaaattttcatgttaaggtatttgttgtatcatttgcatgtgtttatctattttttccaataaatatatattttttaatattattactcaaatgatatatatctaatgtagggtataatactcagaagactagtggacacaaaataaatatataatgtgtgtgtgaatggaccacatttgccattggaacctttttctattattctcaaacatgaaaacaatcaaaagaaagagataaaattacacctagtgaaattggaagacagtgatgatttatataaaacaacaacaaaagtccaataaatgtcttttttttttaattcgagatatatttatatataattttatatatagatagaggagagggtgcacgacagggttaataatagaaacgaaatatcaacacccgagacagtcacactataaacatttttattttagccaaaaaaaaacttgtgagtaaaaataaaaaaatatcacactagagatcgtcactacaaaaaattttactttcaattacaataaaattactgtgactaaaagtgaaaagattgtaactaattataaattatcatttttatgttgtaactaaatggtccataactaaaggtattaatcacaaaaattacaatttgttgtgactaaatgtatttttagtcacaatacttgttg

SEQ ID NO: 297021 - DNA, 4384 bp, Cannabis indica
tttagggcataaatcccaacaagggtatgaccatgacacctgtaaaagttgataaagtaagatttgtattagggggaaaaagtagtgggagcgtgatcagaagtgtccatatggcctaacactcgaccaccactacttgacccccactactctgatttttggccattagccttcatctcacaacatgtggtccccctagggaccacttagagtaatacaattgtaacaatgggccacgagagcctcctgtaaatacccattcatttcatttgaagaaggggttgaaatttttgtaagaaaaagagttataatcccaatacaagattatttctaatctttaaacactgaatatttcttcttatatacatactaaatctctcaacttcacaagtaactcaaggtttttggttcttaactcgttgacaagtttctaccatcaatagatcgatcattacatactacttttctagtcactcacattagtgacctgcggtgaatggtcactaaaaatccttagtgtcgcttacagtaggtcactgaaacccatttttatactagtgatacttgcagtacaaatcgtgtatcattttcacattggaaatttagggttttaaccttttaaattattcaatatgtggacagagcattgtgaatttaagcagctagtgttgaagaattggcaacaacctactcgttgtactagttttttcataccatgagcaaactcaatagagtgaggaaatgcttcatgattttaataggaacatggttggaaaatgtccaactatgtggatagagcattgtgaatttaagcagctagtgttggagaattggcaacaacctactcgttgtactagttttttcagaccatgagcaaactaaatagagtgaggaaatgcttcatgattttaataggaacatggttgggaaatatccaacttacttacaatttagctataacttgattttgttggcttcaacaatagttacaatatgatactcattatgtggagttaaaaagtaaagagaaagagataaaggagaccttgagctcctatgctaagatggttgagagttatttaaggcaaaaaatcaagattaattggttgaagtttggagataaaaatacaaaattttttcatgctagcattaaaaaaggaaggaagtcaatcaaattgcctcttatgttgataatcatggtaactttaaagatgattatgatgaggtagtccattatttgaaccatttcgaaggctttatgggcagtccaagttcgaccactattgatataaagaagaattgtttggctataggtgctactcttaataccgaccaacaagcttaggtaattaagccttttactagcttcgatgtaaagaaatccatgtttaatattcatgatttaaaaatcctaggtcttgatgggttttgttctgatttttttttaaagtgttatgggttggcattggggaggaaattttcaaaggttgtgttgtctttctttgatactgagaagattccttctcagctaaataatattctactttctttgattcccaagattgaaaaagcttcaaaagctattgactataggttgattgtttgttgtaacactctctataagtgcatttccaagttgatgtgcagtatgatggttaaagttctaccctcaatcattaacatgtgttgacagtgaaaactcgttaatgaagttacggaccaaaaaccttgattttcatgctaagtagagagattaagtgtgtaaaaatataggtgttatagtaatgtcatagtaaagatttcattagatacttgattagggaatcattcttaaatatggagaagatcttgtatttgaattatagttttctgtcttttacaaggtttcaacccccctttctcaaatgaaataaaggggaatttataggtggatatcatggccctaagttgtccctaggcggaccacacattatgagaagaaagcttatggccaaaattcaaagtagtgggggtcaggtatcaagtcgtattgacacttaggaccatgcttccactaccttttccccctgatacactcattagggatctatgtattactttgttggaggaatgttgaccaatcatgcttattcacaaatcccaacatgggtgtgtcaaccaattattgccatgcgcggattccaacatgagtaaatggattaatctactctattggttgctttttttatctgagggttaagattctgcttctcctcatataagtacacccctaaatagttgggaatcttcattttttcatcatttctttaacttgttgataggatttaacattctagatttcaagcttaatgtatcttagcattagtctttttggaggccttcttgcttctttcattcctccccttcttccctctttttttatcctcttatggattttcatggagagggcaagaaagtaattgtagcggctgacgccatagcctcagaaatatttatggccaagcttgcatagattactgccatgtattgcttactgtgagagatttatatgctatctccttgctaatggtgatatagaaaaccacactccccctgattttgtggcacttagcccttgatcatgaggagtggggatgtgtttccctttaatccttactttgtggaagtcttgaggtatttttatttggccaatttccaactttatccacacagctggattattcttagttgtttgaacatcctatttaaacaacatcatggtcgccctccaactccacttgaggtacatttcatgtatgacatggctactattcccaaaaatagaggcttttacttccttcgtatggtgttgcgttatttctctatgttgtgggggctccttgaaattacaggaaatggacaagttcattcttttatgtgaagggtttggattgcgttcgtggtgactttctcattgcaagtaaacttttatgctcgttttcctttccattttctttccacctcccttctcctctttttttacttgtcccttctggttttgcaaatgaccttcaggtcccacagctgttggatgaggagacttaacccattcttgatattgagaggatgagtgttttgcaaaagatggtcgggtaaactttttgagaatattgtgaacactgatttgtgcatggtcttcgatccttctctcgcatggcatacttagccttgtagaggcatctcttccttctactcgtgtaatcacattgtactttgtggtcttgttaggcgcttatgtcgttttcttttttcagtgtcagtgtggtctaatttttttgaacaagtacgagcttcttgagttgattttcactctttcattgtattatctattataacaagagagtatgagctttccgagccatgtctctctcttatttgccaaattaagagagtacgtgttctgtgaaccattctcaacctcttataatttattaattcatttttgtgcacacttttgaatatttttcgagaagcatccttctagtgtatatggtgtcgttttcctttcttttttatagcatctttcaagacccccttgccatcgagcgccttgtcctcggattcttaatgtttgtacatcatgataaagggtagctaatccttgtgcgtgcaaaacaattagatatagatatatcgtaaatatatcatcatcacttccttttttttcttttgtgagcaataacactcttggagttggacaatcaaggcatctactttacttttttccttcaacgtattcaagtattagataaaatttgaaagtgataaagatgagaattgctagcatatcgtgcaaatactgagatattttagatttaaaattaaagtggttcacattttgagcgttactcaaaagaatgaaataataatttcaacgctattataaattgactaacttaggataggggtagagctcattggtagtacatttggaggtgttcggtgttccaagatcaaggtaccatggtggcatctaggcatgctgttgacagtagaatctcatcaactaaatcaatctaggaaatcgaagcttaacttagaacttagaatggagatcaagatgatggaaatttttgaaggtgttcataacaactatgaaaaaagtactatttgtatttctttaggccaagtttttcaatgatttttcaaccccctctcacatcaaaggtgtaacgcccgtattttatatttactaaactcaaaagataactttaatattttatagcttaataaccaaaagagttgggatcccgagtatcaaaatacaatttaaaagtattttgctaaaatgtacatataatatatatattttttttaaaactcgctagtaagcaacctcaaaata

SEQ ID NO: 297022 - DNA, 1345 bp, Cannabis indica
tacttaatatttagtcataatataattattctattacacttatgtcattaactatatcactttactaatttataaataattttacatttattttaaatgtcacattttcttatagttttaaaaaaatactacctactgtataatacatagattattataaatttccttaaaaaatttaatagcacacagacatcaaacatggtcaatatactatacagatacaattgtaataattgtatacatataaatgtatatctttatatattaaaagtggctatgtaacgaagttttggtttaacagtattgtttgaacagaataaagaaataatagctaatttaacgattttcagtccttaggttaacgtctgttaagtttttttttcttaaaaaatataaattaaaaatacaaaatattaattgaaatcaaaatagtatcccctcccgtaaaaatccaaactaaaacccaatttgttagtaaaaaaaaaaaaaagaaactccgatctcaatgttgaaagaatgaatagtagcgataatatataagacggaatggtagcaacgttggccctgtcgaatatcacaaagccattgcatatgcctctcgacttcattggtagcaacgtttctactggagttgatccatgtagatcgcaattgacacctgctcaatctaagtcgatggcagcagcaaggagagcaccaaagtcggggaagacgcatggtgcggatcctagacctacaacattaagggtgctccaacaacacaaacactagagaagacaaagataacatcgggtcttcgcgtgcaaggcgaattgagtgttcgagtgatttttttggtgttagtggtggctcactaggggaatcgattcacacattgttgatagacgaaggagaatctttgattggggacgacggtggatctttgaacgaagacgattgtggatctttgacggcgacagacggaacgaagtggtcattggacgacgatcagaagcatggttgggccagatctctgaaagccattggagtagagacaacgattctagtttcatctccatcggtttgctgaaatatatatataatatctttactcttgctacaatttacatatatggtgttacgattataatggcaataaatagaagaaggaagtattcagagaggatgattattggaagctgcttcaaagtacttcaaagattttctttagaaaaaaaaattacagaaggggcaactcattgctatcacggaagaagaggattgattgtgttggcttagagatttttgggcttgggcttaaaaaaaataaaaagaagatgaaatgggctgtaattagtatttacct

SEQ ID NO: 297023 - DNA, 9670 bp, Cannabis indica
tcaatgtgtttggtacgctcatggaaggtggggttattaacaatttggattgctgaatggctgtcacaatatatgaatgctaaggttgattgaagaatgtgaatatcttttaggaggtattgaagccaagttatttcacttattgtagcagcaagggctttgtactcagcttcaactaagcttcttgatattattggttattttttagttttctaagatatgaggcaatcactgaggaaaacataaaagcttctggttgatctccttgtgattggacatggtgcccaatctgaatttgaaaatcctctgagatgcaaagatgatgtagccaagtatagaagaccttgtcctagagtgcctttcaagtatcgtataagatgatgtagggcgtgcatgtgtgtagtccgaggggaagccataaattgacttaaaacatttatatcataggtgatatctagtctggataaagttagatataatagtttgccaattagttatctatagatggaggggtttgtgaaaagctctccttgttggtcttctagttttgtctaggatctataggtgcttttgctggtttgctaccaatgtaaatagtgtcttcgaggagcagcaatgtgtattttctttgtgagataaaaaagttgtccattgtacgagcaatttcaaatcctaggaagtatctcagattcccaagcgccttgagtttgaactggttatgcaatgactcttgtaattgttgtaaaatagtgtggtttgggcttctgataactatataatcgacgtaaactagcaaggcaatgaaattgtcattatggcctcagtgaagagggtgtaatctgcttgagattactagataccttcatgtatgagtgcatccatgtgatttttgtaccactgtctcgatgattatcgtaggccataaattgacttgtgtagcttgcaaacaagattagaacctgtatgagtagaattaggtagtgttaatcctagtggtaatgtcatgtagacctcttcattgaggtctccattaagaaagacattgtttatgtctatttataaaattttccattgtttgatcgttgaaatggcaagtaataatttgaaggtgaccattttggccactggtgagagtatcgaagaaatcaaggcctttttgttgggtatgttcttgagccacaagtcgtgcttgaatctttcaactgagccatcactgttgaatttgattttgtaaacccaatgacatccaattacccttttgttctgaggcagaggcacaatagtccaagtcttgttgttgcatagggctatgggttcagtgttcagaacatcaagccattatttaatttgaatagcctgttggtatgtttgaggttctttgagggaggtcaccacaagtataaaagctttgtaatctacaataagagaggtatttgtaacgagtgtgaggagtagaatatttttcttgtaaaacaaagtaacactcaaaatctttgaggtaagcaggtggtcttgtggttccagttgttcttcgaggaataacttctggtttttcagggggagttgttagagtgacatttgcatcaacagaacttaccactgttgtttagtgtagttgtgtttgcaccctgaacaagggagtttaagctagatgtatctgttgtgccaataggatagtcactaatatgagtgttagtaacatttaaagaaggtaacactaaggtggtaaaaggatcaacattaatagtatcttcatttaatttttgaaaaagaaagatatgttcatgaaaaatgacattttcggatagaaaaacgtgttttgtattgatgtcatatagtttgtatcctctcactccttgtggatatcctagaaaaacacaagctcttgctcgaggagcaaacttagttctgttagcaataagtgtggaagcaaaagcaagacaaccaaaagttttcaagtaggtataatcaagttgtttgtgaaatagtaactcataaggtattttattgttcaaatttggagtgggaatgcaatttattagaaaggttgttgtcataatgtattctgtccaaaatttgagtgggatatgagcttgaaaacaaagagctcgattaacatttaataaatgttagtgttttcttttagtaacaacattttattttggtgttttaatacaagtaaaattgtgcattattccaagttttgagaacaattcttgaaaacaagctcggggcattgtcagatctaaactttttgattttttaattgaattgagttccaacataagtcaacaattgatgaataatagtatgcacatcaaatttttgtttttgaaaggtatatccgtgtgaatcttgagtgatcattaacaatagtgagaaagaatctaataaaaccagaatgtgattgaacatgatagggaccccatatatcacaatgaatcaaattaaaaaaatcagcaaaactgttattattttgaaaagaaagtttcctttattttgccataggacaaatatagcagggcgaatttttatgtaaattggaaatgttacaattgagtttactgtctaaaagtttcaagtatttgtttgagggatgtcgaagcctcgagtgctagacatgagctaaaacatcaaggattggtgaatcataaggtctcaaatccagtatgtacagaccattcttgaatttacttctaccaatcttcttcttgttgatttggtcatgtatgacaaagcgattagtgaagaacttaacatactaattgtcatcatcaactagacagcttactaagataatgttgtaattgaaagtaggaacatagagtacattgctcaggaccagtttatctatgatggaaatggtgccactttgattaacaattaaatattcattgttaggtaacaacagtttagtgggattgatactgcatatgcattgaaaaagttttatgtcatagcatatatgtctagtagctcatgagtctaatatccaagaactacttattggaaggctaaacatgtttgagagaacaatacctgtattacatgtattatttttagtttctgtgttaggcataccaaattgttgaacagctaacaggttgagcaactgttggtactgtgttgctgtgagttgaggtagcaaggcttgattttcaccagttgagttgatgtcagtgtttgcttgtacctgattggcagatgcatcttttcccttgtcattcttgtggtatcctgggggataatcatgaatcttgtagcatttttcaatggtgtgccctagtatattgcaatgtgtgaaaaagggtctattcctttttggagaatgcgatttatttccttaagaattaggtctattgttagtgtttctatctccctaaaatgcaaaagccatacctgaattgggatctgcagcaaggttcatgtttcctttctggttttcttcttgggttactaagtgaaaaatcctgttgacttcaggtaaaggatccatgatcaggatgttgcttctgacttatgcaaaagaatccgagagatccatgaggaatggcccatgtgatggtgttcttaaagtttcttgacaccaccacaagtgcacccattgcacagttaagtctgtaatttgagagttgttcccaaactgttttgagctttataaaatacatgctaactgtttgatttttttgcttcaatttcattagacttttcctcatattgtctatgtgaggtctatttttctggtgaaacttgaatttgagatcagtctaaatggttgctgcgaatttatcatacaaaattctagaagaaatctctttagaaatagaattcaagatccaagaaattacaatattgttgtttctataccaagaattgtatataattgaattagaaggaagatgtttgggaatagtaccatccaagaatctcaacttattcttgactgagattgctaattacatcgctttactctaagacatgtaattatcctgcccagtgaggagctgagaaataagaatgttacctggattatctccatgctgaaggtaatagggatctgaaggattttcaaagggatttctctgttgcatttgattgttctacataatcaaattcacaacttctctaacaactgcaggcatgccattgttgtcagttccttatatcacgacttgattatcaattgccatggaagaaaggtacgagatcaagaaaggagcactgatcaatatggaagaacaaaagtgaagaagaagaagaagttctttacaaaactttagaacacgaagaaaagctttattggagaataaaacacaacgatgaggaaggaattatcaagatcggggggaagctcttcttctacgctctgataccatattgtgaaataagaagatggaagaaaagtgtaattatattgaatcgaattgaatgcgcaaaatacaaagtatggtcaatatatagcttaaagaggagcgtaatcaaaacaaaaaataaaactaactctggttagtctagaccaagctaacggtctttatattccaactaattaagaaaaacaaaattgattgtaacaaaaataactaatcaaaactaaaccaattctcactaaacaagcttaacacattaaattaattaaactaatattgtattaatgatatatgattatataataaattattatctaattttgactattaataaaagaaattatgtcaagttaatgtatataaaattgaaatacatattttgtgagcctaaattgaatattatttgattatacagttgaaaaaattaagctggaaaataaaatttgcttacaacattatagattattcttggccaccaagcaagaaaagtgacttgagagatatttattttggtgagttgtatatattgtgtatgaaaagaatattgttcatttgtttttggtatctcataaatccatcacattcataatcttgagtttcactcaacgacactcattaagaaaaaactggcaccagaaacgacaccgtaatggattcagaacgacgtcgtatatgtgattactgtaacgacgcgaccgccctgctatactgccgagcagactcggccaagctctgcttcacctgcgaccgagaagtccatggcaccaaccagctcttcaccaagcactctcgttctcagctctgcgacgcctgtcatgactctccggcttccattttctgctcctctgagagctccgtcttgtgtcaaaactgtgactgggaaaggcataacccatctctctcttcggtccatgacagaagacctcttgagggtttcaatggttgcccttctgtaactgaccttctgggtattctgggttttgacgattttgacaaaaaatctctgatttcgaatgaggaaagagatgggtcttccgggtttcagcctgatgattttttagatttgtcgctttgggacactccttctattgttagtcttgatgatttcattgtttcaggttcgtctcataattttcaggctatggggattcctccactgcctaaggtgtgtacttttactctttatcactttctttctcctttctacaatattataattgaccctctttcactgaaatattttaatcaaattttgattggtgtacacatatataggatatagttttttaagcctgaaaagagtttccactttgtcttgattggaggttttacaatttcattttttaaattattgtttgaaggtaatttgtttgattctgtttgaaaacaatattaataataaatatatataatttcttatgcttcatattttatttgaattgtttacgctaaggatttagcttgattcctcggtgggatatgcttttgtctctctaaattggatattattatagttactttgattcagtggttaaagttcatgattatattttatttgtttctcaaattgtatcatcttgattatttaccaaaattctagctttcaagttttgacttgggtttaggatattgttgttgaaccagaatcgtaatgctgtttgcggccaatacaaggaagaagtaattgctcagcttcaaaaactggcaaagatcgaacccaatacaaatttcgacaatggtgacactaccaagtttcttaattctttcaaatctcttgtgcctgaacaaagtgtgcagccaggaagagcgtgtattgataatgctggggctgagccagttaccgttccaacatatgaggtgaaacattctctctattctcgatattacttgagcttgctagttatgttaatttatgagtacatataactttagatcttttcatatgtgcacaattctttctggttttcgttttcttattgattagatcgattcagcgtattgaagatgaagaaggtaatgatgagtaaggctgttgaattagaggaatggaaattctcacacccttactctcatcgcttgaacgatgatgttgtgtagtagctgagatttgcatttccattccaaaacgatttagtttcaattcttgttgaaaacagattttatatttttgaattatgcattaccattcaaatgaggtcagaattgtaaaacgatctaatggaatgttctcatggaaataactaaatggacaaacatatttcctcacgaatttgtgtgtcagctagctggattaatagatataactaaatcttattaatagtttaattccttgtaatatctagcttatttattgtaaccgagatttaagctttaagcaaacctttgaaggaattactttttctacagactccttcatgtcagtggaccattgatggtggtgagactgcagatcagaaagttcttgtggacaaatcatttagtagtcatctcaaaagaagttataaagattttgagaaacattcagaaattgatgacacttggtgccatgttaatgatgatggtcataatgagcaaccacaacatcctatgaattctagagccttctcagatttccagaaagtgccatcatacgaattgaccagccaggaaagagagggtgcaatttcacgatacaaggagaagagaaaaacaaggaggtattaccccacactcctatagtctcaccaattgtgaaaataaatatgcttctgtttaatttgatacatttggagttttaaatgtttatcatctgaccgacaaattatacgtgaagaagtctgcctttgtttcaaatctaatctgcttgactaaacacactcttgtgctcttgtcatacttatgaagctgataatttggattgatgattgtttaactaatgatatttttcggttctctaaaaaggatttcaaaaaatacttttctatctgtattgactttttgttgtcagtttggttcaacataacaaatgcattcattatatcaaaacgcaacaggtatgagaagtgcatcagatacgagtcccggaaggttcgagcagaaaacaggataaggattaaagggcgttttgctaagatagatcgtgctggtatgtaattttgttcaatagtacagttagtctataaattgttgattatatctaggtgtctcttattgtaacataaatcgaacttgtttttgattgatatatagcctgttaagtattggaatgaaaaaatcaattgacttgactgtattacaagctatcttactctatattgaaatttgcaaacttcagatgccttgttttattttgggattttttttgttattttcaattttatcaaagatcttttgggatgtatagaaggagaacactacaagtagaccccaaaatatgtactaatagaaatttcacactcaccagtcaagtatcaaatcaacaggaaaaatttgtccgacagtatatattatgccgtgcttaagttcaaaatactaacttccaccatcttaaactatttaagctcttgtaatgattgatttattgaattcaatatagagaagaaggcatagtttatttatattatttattttgatgtatcactttttaagcaggacaagtaggaccctgaagaaagaaagagacgtctatcttcataatatatctcttgtcagtcgtcacacaatttacaatactcttttaattttcatttcaccacttgcaaacaactactaatgtcattctcctaagtgacactcttctgctatctgagcctcaaaggtgaacgatggttcatctgctgaaatgctgcaatgatagagatgtaaatagactttgtcaatgccaagcaaaagtacttgtaatctctgttttcaccaaaatcataaacataaactgaaaaccgattgtaggtatgctttgaagtttcggtacatctggtcgtgtgaaacagagctacccctctccaacactcccaatcccagaagtcccatatgatagtcactattgtccctccaaagttaaccatccctttctgaaacacagattatgaattgtcagtccgatcttcaaagttgattttcaatatgttcacataacaacttgcatcagtaccatagacaagctttgtcatttaaaatcctggtaagaatggtttgtctgccccgaacttgattgaagtactaggaattgaaagttgaccgttggtttgatcctgcaactccgatgattgttgccatcaaattgtttggccttgttccttgcattttttttttgtgccaagtccatgtagagtcttcctgtatgtaagctttaagtaatatgaatgtatgaagggctgatgttacttgttagaaattctgacttgtatcatgaagacatgtctcgaactttggcgttgacatgaaaattgttggacttgattgagcgtgaagcaaggaagcttgctcgagcgcaggctagttgaatccattttaggtttcttttgaaagatgtgtggttgatgagaaacattggtgaatctggagcattgtagtggataagtttgagggttaggccattagcttttcaagttatacctgcaattaaggaccgtgaaagataaaatgttgagagagcgtaatggtgttttggtcataacagacttggcttaatattgctagacagagtttaaccaaagtttctggtttaaaactctcttatttgccaaaagatctgccatggaataattacaccaacagaaattatattacttttttgtattggtacgacatacccttattttatgcacgcatttttttttttaaatatgaataatttactatgttgaaatcggaataaaaaaaaaccacttggggttagctcaagtggccataggtgggtgtgtgagtgttggaggtcctgggttcgaataaacgcttaaatcaaaaaaaaaaaaatcggaatcaaaaaagtttaattaaaatatttgagattataatcgatgtgtctatacaaaggtttctgaaacggagaagaaggctcgtgtacctcataactccctccaacacaccactaaaattccacttgggaaatttgattttccatgtatatttgagggtaagggtgtttattcgatccaatctgtactattttgttcctagaacatctgatccacgtgaggattttatattttggatccaattcaatccacatagtaaatcaaatccaatatgtaaaagtatggattagattgattattttggattggttactttttaatattaattatttaataattattaaaaaa

SEQ ID NO: 297024 - DNA, 4258 bp, Cannabis indica
caagtttatcactttatttcaatattcattccaataataaatcaaaatattttaatgtaatttttataaccattttttatttcactacattaccattgccactataattgctattacattatactaaatcaaatcaaaaatcacccagatattaaagtgcattgcaatatacactacacataagtattaataaaataaaaaattaaataattaaaaaaaagtactatataattgattttagggtctgtaaccaaaaaatacctaaaatcataataaagtatgcaattaaattaaacttttttatcatcttttattgttacattttcaagaacaagacatctaactacataaataatcttttttttaaaaaaaaaaaaaaagactacataaatattctagccagaccaacaaaaaaaatattgagacagtttcttgagacgctatcttcaatcgtagtgtaatacccaaatcacacaaagagggaaataaaattagattcattaactttcaaacgctcagagtttcaaaaatcaacaagtccacaagaaaatattaaaatcagtgtaatatccaaaatcaagcaacaacaatacatctcgtgacaacctgaacaacccattgccaataaaaaccttctttcttctcttcggcaatgtcttccgttaggagctcgccagtgatggcagagctacctcagcaattttcctcttgagctttctttaacaatattttttctttcttgggataccacggggacccgacgctaggtcccaacagacaacagagcattttttgtagttgcagcggttcaaaccttggaagtctgcctaaggcagacctcctaactcaaggaccattgccactacaccaatgccgtggagatgggctttctttgatgattattatacttggaagaagtttaattcaattatcttttttgtttgaaagaataataataactagtagtagagtacaacttttaggtgatgtttatcatgactcaagaccatttatttaaaagaaaattgtcacaaaacttgtctgtttatgttagatcatgtgtgacaatacactagtttatataacatatagtaatccttccaatcgctgaagctcctagtctagcatatcataactctttcaagtacagtgtaatagaaaattttagatgcattccccaagaaaaattcttactccattaataatgagaagaagaagaaaatccttactcccaattatgctaattcagaattttatgacttgttttggttggctccctagtttaccaagagccttgtcaagtgatgtgctgaaattgtcaaacggaaccagctccattctgtaatagcaaagcaccaacgttggaacataaattattatttgaagaaaaatacacaaaaagatatatctttagtcgataaataggaatgcgaaacgataggataaagcaaactaagaaattgaaagatagcatactcatatctcaacttcccttctcgtgctagatccaagaggtaatctatcattcttctacattcttttgcattatcggctcccaaccatttctgcaaccagaatcctcttagagaaaggtcctgttaaagcacagagtaatatggacttcagtaagatgatataacaagccgatgcagaggtcattcaaatgtaggaaatagaaaagagtaacagacataaagatgagaacaattataaatttttcctaataaataaagttgaaagatgaaaccacaaaaaactcatagattagtctgaagggcaattaactgcagcaagaagagaaagtgtgagaccttaaaaatgaaagacgaagtggatacagtaattggcttcttagacatgccaccatacgtgaccatagttcctccatgtctgtgaaccaaaaacattaaaaattaaagacgaaaaacattaattttttgttataaaattagcattagccttaaattttttaatgataattgcatatgacacctcaaaaatttgagaaccaaagaagcagcatttcctccaacacagttaaatcccaaagcaggttcaggtatactggcctagcagataaacaggacacaagtggatataattggttaaaatacttggaattatcagtagaaaaagtcacggaaaacaaaactagaaagaagatttttgtgcatgatagcaaaagctccataattcagagagcataatgtacaatgtcatttaaaattgataccagaaggcccttgatatttttcacttccaattgactctcggtaaaaacttcatctgcaccaagtttcttaaggttttcttttgcctcatctgatccaggcctgtaaagaagcagggaatgataaatcaaagtaagattttcattgaaaaattgtgttctcggaaagacgaaagtaaagaagcccgggaaattgcacctatctcttaaaatgttgatactatggacaccacggtctcgtgcaatctgaataacacactgccccacaatgcttgtggctccattttgaacaatagcatctcctggttaaattgaacgagagcattcatacaaaaattccagtgtactcaaaacaattccatacaaaacaaatgacaaaatgaaattacccgaattcaaagcaacatagtcttcaagcattcttaaagcagtcaaaggattcactgtaacggtagcagcatactccacgggagaatccttattaatcttgtgccaaacactctgatctttgacaatgtaagtctgccacgtccctaagcagaaggatatttagccaataagattaaaaccaaataacataacatttctttgatgtaaaattgtaaatgaagacttttgatgcaagtgtgtgttactttaacccccatttttctaatcgaaatagttctgggacaatacacagtactttggtttgtgcgttagccagccttattaaatttgaatcacactcatttttgcataacggtaactagaaaccccttgccaagaaacaatactacaagctataatcatcactggtttttgaactaagtaaaggaactaacatataaaactgtacatgcccatttgttataatctgtaaagtcgaagattacattacataaatacataatacttttctcaacataatttcgaaaaacacaatgcataaaaggtttgaactttgaactataaacaagggaaaatgaaaatgtaccgaaggaagggggagatggaatgaccaaatcgccaggtgagagacccttcactgcagaaccaaccgagtacacctctccaacaccttcatatcctccgatagctggaacttgcggcctcacaggatatacccctataatggttaagtatgaaaaaaaaaaactcatcaattcagcccccatagagatgagtatctataaggttttacaaaagcttaaaaggttccatagccaaagctcaaaaccttcaattcgattaatatcaaatgggttgataggcccagctatcatcctaacacagacatcgttctctttcacttctacaggcggcaattctacaattcttccaacaagaagaaccattattaagcccttaattttcttccaaattgaaagattagaagttcctgaaccctaattaagtaactgagagtgaggatcgtaccttgtaacgacatcgggaggaccttgttggtcgtagacgacggccttggagggtggtgacatgaaggcggcggagaatgctcgaaggtttagggattggaagcgatagaagaaagggcggtttgttgatggaaggcagttggagaggaagggggatggggtggcatttctgagggctctgaatgtggctggtcgcaccagagacgccattgccgttgagtgctcaattgagtggaaagtggttttgttggttatgatgtatgaggtagttggagctagtgctctaatttataaataatattttttaaataataaaatatcaattctattaaaataatttggcattctagtacataagattttgtaaatctaccgagaaaggaaaatcagaaatgctaccaccagaattaaaatgggagtgtctagtgtcacgggctcaccttttcaagcagcggaacacccgtgcggcaccttgacttctctaagccaaggtcagccttccaaccatccgagtaacattgggctcatttttcgcgcgaccgtgtgcctcgggcacactcccgtctctcgaacaactcccgccgagtcatgctcgcaagcatccatgagt

SEQ ID NO: 297025 - DNA, 4475 bp, Cannabis indica
tggattttttttcttcaaaatactgtgttttcttttaaaaatactatgttgttctatagttgttttttagttgttctactattatttttagttgttttgttttgtgttccactgttgttttataaaaacacagtatttttgaattttttttttcatatgacagtatttttgtaaaagttaacccaaattctagtatttttgtaagttttccttttctttcaaatcctagtcgtgtttacaatggagataagttgagaaatacctcttttttgtatccattaaccaaaaatacctttatatattatttaattaaaatctatccacttttatgagtgaattgtctaatatatccttaccttccacttaagtgtagcacataatttacatttatgtaagggatataatatgcacatcgtctataaaagtgagtatatcttaaagaatatggaaataaaggttaaacttaaaacaagtaaagaaaagtgggtatacaatataattttctctttacaatgagcgagatgtcctgattgaattgcagactattattttagctagttattaataaaatttcataatctataaaaaataaaaaaacaaaaaaacctgcccatatttatataaaatcatttaattcctaaaaacgaactatgaccatagagaattaatttgtatagataaaataattggtaataccaactcaaccactcatcttttacttttctataaaacaaataacttccctttcaaaactattaaaataaataaaatgtgcaattatagattattaaatattccataaccgttaatgactcaacaataacacaataacacacaatcaatattcaataatggtggagttaataaataataatagtattctcatatcacttcatctccgctccaactgcgcttgagcttgggaccagttgggccgtcttccccaaaaatttcactgggcaacttaacattcccaggcaaagcattctgaatcttctccacctcatctgccgagtcgtagacaattctcggaccccatttcctcaaataattcagccatggcggctcaactattgcagaccccatatactcacccgccactattgaaaaccccttctccgtgtccataacaaatttgctcttggcagtgtcattcctaatcccaacctctccacctccttgcataactgtacccggcttccggtacagcgcgtgaccattaagcgacgcgtaagccactggtttattaccactgccgaattcgagctccgaagcttcgacccattgacctttactgtgctgagacaagtagagaagccataactctccgttaaaattgctgactctgagcgtcaagtgttcccagtcccctatgtgttcgccgattttacccaaagggatatcaagaggccccaccttagctcttgccggaccattaaatgggaagaataaccatatccctatgtcggtaaacgtgcaccccaatattggtttggcgtgtaggtaaacttgagcactactcaagtcaccttttttcactttctcttttgcatcgttgtccaccggtaagtccagccaaaacgacccgtcgtttgcgccaccttgtgggaggtttgagccatcctgttcgactttgatcccaacggctttggatgattgatcttctcccttttggtataaaagtgctccgttatcaaaataccagtttactgaagaagggaggaacttctcgtccggatgaaagtagatcaaaggagcgtaagctcgaaacagagcctttacttgctccaaattaggcatatatgaattcttgttaggattcacattcttcaaacaagccaaagttgaagttatagtacttccactgtttctaacagtgaatgtaccgactctcactccaggcaattcaattcctctgttcgtcgggcgaagactatagatatcaaaaccatcagcttcatcgatggttggtgcctttttctgtgcccagatccatgtctcctcctcgcagggctcggtaaggtcggagcgcacacaacggaccttgtcaaggggaggtttttgtggggtgttggtgacaaccatgccggcggctttgtagccctctggtggagttggaagccatatgtagccattgccatcgcccttgactttgcgagaagcgctgctccaaatgagagtgtagtcaattggttgagctaaagctgatgatgaaccattgctgtcttttacagctagtgcccatccgaagaggggtttgttgttgggctggctgtaaaatcctaacaagtggaagccttctggaattggtgagggttcgtagaaggttgccccaagattatctggtcctcccttagtggctgaccaaactttgttaaaacttgttatttgacaaacttctagctctcccaaatctatggttcctttagcaaaaccttcacctgtaaaatatattcatgatcaccattcaactaaaaatatacaatttcaaacataattatactacatgtacacaaacacatattgacggaatataaatatatacctggtggccaagagggtagaggcgatgaaagcttgaagacggttttaataggcagagtagaggaagaatttcccatttttggttaggttactatagatgaagtaaaaacacaaataggtatgtaaaacaatgagtgggttgtgtctattttttttgtctatccaacaaaatgggacaattaaaacttaagaaccagattcaactttcgtttagtagatatacaccaatgggtttagctgagtagatgggctacatatttatgtaaataaatttataatccattatagtcgctaagtataaaacattatttaaagtattcaaacgctatgataatgacctggccaggcttatttcgttggctttttgacattttaaacgtattattattagtatcattcttgtatagggtacgtggtggtccacaacaagatggagaatccgataaacttgaatcacaattcagaagttttatttgtttaatattgcaaaaatatttaacacatgattttgagatgtaatgttggttaggtgatatataggaatacaaattattttgcacctgtactaatcatattttgtcaaaaacataaagtaagtcgttgactattgttgtttttatcatataattgcgcaactactcatattttatcgtgtttcgtcggattacatattctttaatattaattaacattgattacaagagttttaccaagtcccctatgttatttcacattcctatactttcttcttttaataaacatgtttgatattttttaagtaagcctacgtaataagtagatgtgtgaaaaaaaaaaatactgcggacaaagtgcatgtatgttacggtaatccttgtttttgttttctcataaaaacaaaaccaaaacaaattttttttgctgttttttgacttgtgtcgtcttagtcattatttgttatatctcgattctcaacttgaacattgtgtactgcatttgcttctgctctaaccttcgaaactccgaatatcataatcatcttgccttggtacatataattgtgcttatatttaaacatttttaatttaaaatattttaaacgtgtttttctgctttgctgatcttgtttttttttctttccaagttttctattatattcttgttgttgtctagtcatacttagtttactttgtaatattaaatcattaattatattaattattgttataaaataaattgcactttctgtgaaatttcattgccaaaaaataaaactatttgtgaaatttgaaaaaaatgttagagaattaaaattatatttttttattttatggtaaggaggctgccaagacaaaagaaggagttgatagcacaagcctcgtgaccgatccagcaaattgcttcagaaaacattaaagccttctttgccaagtcataagttgtcgtgatcgcaaatcaacggatgtagcgaagagagacgctcgggaggagagcaaaacccttagctaagttaaaagatctccaaacacactatatataatagtcttgctccttcctcaatgcatctgttatggatttacaatctgtttcaatgaagtgaactgggaacctttctttgtcaaaccattgaagggctaaaagaagccccttcaattcttgtatgtacaaatcacctattcgattaaaagggattgctatatctgcgattgtttctccattgtaatttttaaaaacccctagaaatctcgatctgtttgaatggacatcaattgcaacgtctgcgctcaattcatcaattctagcctatcccgaaaccacctttgtttgaaatattttaccaggatctagatttactaaaaagtatgttgattaacatcctaaatatgaattctctaaaacaataaaataaacacataagggtttaaaaaaatcttacattgattgcagtggaa

SEQ ID NO: 297026 - DNA, 4406 bp, Cannabis indica
agatcctggtaaaataaattccaacatgtcattgcctaatcaagcaatctttttattacataacaataataatcgtgtcttaatcttgatatcaatcaattctcgacaatattaattgtattacaatataacatgctatgtagtacaatatacttttcttatctttaatccagattcatgaatgttgaccaacccaagtggagaaatatccccaataatctcggccttatgccatatcaacgataaaccaataagtgtttatcccaaaatactgcttaacactcacgtaagacaatctaagattttctaccaaatctcgcggtataaatacactaaaataaaaattatattttggttctaaaacatacactatattatagagctattggtgaaagattgtgtagatttgctagttggagcttgtgtactttggtaaagttctcttttccactttgataatattaaattctgatatttgaaatgttctttgaaatggtgtttgatgttgttcatgatgattttgaggtattgatgtatgttgttgagaatttgatatttatggtgtgtttagtgtatttcttttttttttgagatcatgcttagtgcctctagcatggtttagtgagattttagggttggaattagagcttaatttatgggttaatgttctgaaattttgggttcttaattgggggttttgatgcttgagttttcaagctttgatttatagtgtaattttggtatggatgctttagacttgtaatttcttgttcttaacttgataatgagctttgtgtggcctagaaattattgttattttagttatgagttgttctagttttgaattgagagtatgcatgctttgttgtggtttggtatgatttttgggtgcaaattcgagtaggttgaaaatttgtttttctgggttcttaacccaggagccacgacatgggttttgagtgccgcgacccgcctggtgaaatttctgggttttttacctagattcctcgacatggcttgtgagtaccgcggcccgctaggggtttctctgggtagattgtgcttaactcattttgtttataactcttgaatccgaactctgtttgggatgtttcgtatatcgttggaaagctcgtttcgagctctttatgcttatttgtaattgaaatgctaattatgtgattacgtgaaaacgatttttggaattaacccaatatgaaaaatctcgagaattgtgactaggattaccagcacttgtttaggagcacccagggaattggaatcttcacatacttacgacaccaggtaagacagtagttagcacgtagagttaagcgcggtggtgctcatgtttggtattataattgtgattaaatgagaaactgggaatagggttattaccctaaagtgagcgattatatagcctagggttattaccctagtgattgaatgattttaaatatagtgtcatgctatatatgttgaaataaagaattatgtgttcaaggcataagtagattagacttggtaatcaaaactgagataaaattattgtaaatagacatgtgagcgtaacacgtgggtcaatgctacatagacataagtaggcgtgtgagcgtaacgcgcaagtgtatgtcaaatagacaatgggtgcagtggcatcagtaattacagggcatttgattattgtgaatattgatatttttactgtcttgttgggcttagttcacgggtgctctactgtgtaggaaagagtaaatctatttataatcaaccatgagtgtgacgacttggtggtggattgtacatattcgggccatactagaccacgcgggttcggtctaccagtggatgtattttgtattctcggattttgccatctaggtcggcatgtacaagtaactagtaatgttttgtaaaaaaatgttacgggatctcgaagcatgtttaatattttggaatggtttgtaaagtttaaattattacaagttatgttttgatttcgtatgtaaaagaaagtttttattctgctcctatttctagtaatcccggtttcgcgggattaggttatatttattagaatcgtagcgtgcctaatttttagggcgttacataatgtctcattttgtttagatctctaacccttgatctctattgtcgtagagtatgatcaaggtctaaacttggattttcttttattgttggaattcttcacaatcttccacaaaggcctgagtatttgcttgaattgtgtgggcaatttctcaattcacgatagggcacggaacttttagaggaagaagaagagggtttcgaattctaagaggctctctctttattttttaagttgtttgacaaagtgaactttaggtttttcattagcctagaaaataagtgcatcttactctatttataagatttcatctagggctagatctaaaatttatcaagtaaatttcttaacttattaattcctcctaactcaactatagatttggaattgcactcctgattacatagaacgctctatatgttccaaatatagatacgttgtgtattattcattgtttcaatctgaataatcaaagatcctctgtagatgatttacatcaagtacggacaaatttatctttctacccttcaatgtattttatccttagaacatttagcttccgataaataatattttactatataattactgaaacaagagcttttccatttatgtatattaagccaagcttaaaggaaatcatcattttatttctatataattataaaagctatagattttatatctatgattagcgctcatactcaattgcactaccatattcacaagatgtaagtattgggctgatccattttgttagctttaacgaacaagtcaaaaaaacatgaataataaagttaacctagaacctaaccatctcaggattaagatcttttatctaagatcaactaagtgatattgacataaaaagatataacggcaagtttatgatatcttttccactattaatatcattccagtccaatgtatactccatacatctgatactagctatatatcccaatgaattattaagatttattatatgttatagtttatataagtagtaattagtaagattatgatcctgctaacctaatttagcataaaatataaattttactatttgaaataaataagtgtaatttgttaattacagatatttatatgaaacatgtagatataacatatattatttttgcaataaaaatattttcaagtttggtaaccccagagatccgattggaggccaaaaatttcacaacggtcttaattaaaaatattgatgggattattgagaagagttgattttagaaatatcgggcattttggggtactcggagttgaccaaataccctaaggttaaaaatttcttaatagttaagaaatagtacactaattactattaatattatattatattattaataataataataactttactcttatcaatttaatatatattatatttttaaaaacataatttgtacaaaattttctccttcggtgtgacaaaactctcctccctcttaatccatgttcttcgattttcaatctgaaacctagtttttcaagctccggtagtagtgggatagtaaatcattgaagagggagagcttaaggtaaggagtggttttcttttaaggttaatatgattggttttatatagtgactttgtgatttagagtggttatcgaagtcttgacttcatagaattgttcttgagtagctacagaactagttttgatatttacttgttgaatttgaggtgattttgagttagaaattgagtttgaaactttttcaagcttaagtccaaatgtttatgacgttttccatttaagggcttgcttttaatttctgttacgtaaggattgttgtatttatggtatatatgtaccctgtgaagtttggaataatttggataggtttcagtggtgtttcggtgagtgcaaaatttgaaatttttgacccatgctgctgccaaactggtccactggttggtgcaatcggtttaccatttctatgaattttggggtaatcaggaatcatatttttatcataacttttcactttggtgtccgtttcggacgttctatatgttggggattattttaccagggtctagatttactaccatgtatgttgtttaacatcctaaatatgaatttctaaaacaaaggaatttaaactcatataaagttcaagaaaccttacattagttgcagcagaattaaatgactccttccacttagatttctaactcttgttcctttctgtcgcagagtattatcaagatctgagcccgattctcctttaggtgttggattcttcacagtcttacacacta

SEQ ID NO: 297027 - DNA, 7533 bp, Cannabis indica
gtgttggaggcttaatcttttctttaattgaagtttctgtttttgttgatttgtattcgattcaacatttcgtagtgatgtacatgaaaactgttacatattgttacctttgtactgtgttggaggcttaatcttttctcaatgatgcttcagcttcagcaaaatttgttctgttcactgttcttgggtctgcacctggcattcaaccgaatccacaagcagcttctgaagcagagaaaattctttcatcctctttgtcaaaactaaagagtagagaccatttggcattggggaaggccagtacttgctatattacaaaccttgatttttttttcttccctatagttattgtctttctctctctgattattcttcataattggatttctttaatattcctatcaaacacacacatatatatatgagagagagagagagatagatatgcatatataggccagtgatttccttgaccgagttccttacttgggaaattttactacgctttctataacaaagttaaaaatgtgagttcaccattgacaacagtgcgcacattcaattcatctcacccctaaagagcttctaagagctgccaagattaaataacatttctccttaatttttgtttacttttttttttgttttttataaataaaataaattgtaatatatatcataatagaatttcttggctcatgttccacgtgacatgactcgttgtgtagtgtccaaaaatggcttggacggactcatatatattatatatatatggtttagttttttagaatttctccgtttagttttaaaatagtatgaaaggaatatatgcttgtgggcacactgtttatgctcatagaaagcttctaatgcttatattgatatgtttgtggttatactgtttgtgttcactgcagtgagcttcatcagccgaagaaagacgatcattgaaagcattgagaacacaagcattaactcaaaagctaagtagcttttctctgtccgtgcgtactttgaagaagcctgagcaacaaaggttaagaggaaacatgtaagcttcttcctaaagttatatagtataagttttagtttttgtcttttcaacactgtatttcttctaatgcaatgcaccatatattatcatgtagagcacaaattaggaagcttaaattcaatatacaagaaagataatagtagattccaacaattattgtaattcaatttctaattagcttgtcactatttaaattgaaataggtatgcacatatgcttgtttaatcatgtgcttatttatttaataaggtagtatgcttatttatttaattaaactagtttaagtaatcattcattcaatttaagtttgccacatatcaacccccacagtgccaaaccagttttctgtttgccacgtaggacaaaaactacgggattgtccaaaactcaataacgtggatagttcgggggaatgtttaacaaacagaaaagtttaggagcatgatttgaaattgtaataatctaggagagaaaatcctttttattctaaattttattctaatgttttcattattctcaaccaaccaatgtataacccaagaaggggaaagggaaaatggtggatctggactctagactctagagcccactgtattgcctgagaaggctcatctacatctaattaggaactgatttgctaaatattgctactgaagaaattgtgtgggcttccaccatttaatcacattgtttttgtgttcagcacacaaaaatgggaggaagaggagtaataggagacaaatggtccatgagggttctctgggcatgtgcgattggaagtgcatttagtacgtacaatttcatttattttttttatactatgcatttcaaatttacaatacttttcatttctttcttattgatactatctcatgatcacattcttatagtctatacactctttgctttttatttttcttgccttcacaaacttgactggctgatagtgatggttgattattaatgtatataggcttgtacttggttgctgctgaaaggcagttgcaaaacagacaacgaatgctggcggaaagtttagaagccatggaattagagtctggggatggtgatgagtgacattttattctgatgaaatttcgagaccaaaactagataaagacgtttctctctatgggagtacaatgtttatatattttccagcttccttaacaaaattccacacctttattttattgataggaatcgtcaagtacaagtaaaatggaaaaatacattgacggaatttcttccatccataatgagaatgagaataaaattttaagtttagagaaattacctttttcactaaaaaaatttcaaagactgattcaaacacaggttatgcttgtgataagcctccaatataccaagtatataaggagacagctaaaagataattagagcagtattggagtattagttactgttgttattcttttatttgtatttcctttattgattagtcctttgtccagctggcaattgtgttaattgttaggctgagttgtcttgttttcattagtccaagttagcattaggtttttttttttcttaagaaatgttggcattagttaagtgtaagtaatgtctataaatattgaagagtttactcttgtggagagcttcaccctcttgaaaggtgaaaaataggagattgtagccagctcgaataagagatatcaacgttagagagtaagagttcttttatcttattatagctcaactttcttaaatccagattgcaatacatagagacaatactaactgaaatgcagtaacaaacacagtaatatttaactactgacaaagtatataaaaccattcacatcatttggtgctacaagggaaaaattaagaaactataactggttttcaataccttgtttgatagccaaaattagaaaaatttgaatgacatagtttggtaccttagtattttgaattggaactattaaaagcaaaatgacccgtcaagttactataatatacttcagattatctaaaataacatgtaaggtgtgcttattgggagtaatggaattgaattcatgggtactctatgtattttgtttgattgtgtttaaagtattgaaatgtcatatgaaatgacttttactaaaaaaaaaaatgatttttacactattttagtagaataactattttattttaatagaatgtaattggtagtcgcattctcacgcctccctactatgaagacaaggttgtattgtgtggaagtttgcaaaaaaattgttgtttgtctattaaggcagcttatatatgtgtgatcagaagcatagatttgggtaacgatctgtcgtaagggaatgtggcgcctcacaggtttgcttgtgaggtttggccaacaacttgaaagcaacaacaatcaatcatacaaaaaaaaatgaacactagaggaataaccaaagaaaagctctctccatcaaaaaagggatctttacaaccaaaaaaaaaaaaacaactaacatttataaaggaaattgcctttgtttaaaggtagccaacaaatatccaaaaagcataaagcattaaaattaattaaatcatatacatttaggagagtttccttaaggaaagtaatgcagcctacttgggcgtgttccatcaatttgtggtttgctcatttggggtgatatcaccatgaccaaaacccatctgctcactagcttgctcaatattcataccacttgtaccccgacactttctctccttattggatcgcttgcaatcagcgtgttacaagcaggtgcaacatcccgagaaataatttccaagcagctcatgtagcttgcacccaactacttgtcctgaaaatacccgagacgtagcaccctcccccactcaagcttgcgacgcccccgtcgcatcaccatccttgaaatgaaggatgtgatctttaaattgtcatagtagggactccaattcctaacttgcctcagcatcaagcaattttttacacttcaccaagttttcggtgtatcgagggattctcttctttttgacttcccgtaaagacagaatgcatttgacttccttgtcataggaagtcaccactacagtcagagcacactttgacactcccctgaaagggtcttcctcgtcattgtggtatggcctcatcatacttacatgaatacagggtggatcttcaactgttgtggcagctgaagcttatatgctacttcgcctatccttttaagaactagacaaggccctttgtacttgcgcaccagcgccttgtgaaactttcgtaatgttttgaactattacgacatcatctttactagtactaagtcaccttttcgaaactcaagaaattttcttttcttgtcagcccattgtttcatccatttttgagctctcattagttgagccctcgccaactcatcttgctcactctagttcttggcaaacttgaatgcagcaaggctctgcccttcatactttgttgctgaagcatgaggtgtttggggctagaaccccatgattagcttgaatggactcttatttgtagactcacttctctaaagattgtaggaaaattgggcaatgtcaaacaactttgcccaatctttctggtttacacttacgtagtgcgtcagatataactcaatcaatgcattcaccttttttgtctgtccatcgctttgaggatggaatgagtttgagaaattcatataagtatcgaggagttttaacaactctgtccgaaatcggccagtaaactgcagatctcgatcactgattatgctcaaggacaaccacccaacacttcactatgtgcttaaggaataactgtgcagtcacttttgctgtgtagtctatcgggcaacaatgaaagtggaatacttattgaattgatcaacaaccaccacgataataacacagccatctgactttgggaagccagtaatgaagtccatggagacactctcccatggtcagctcaaggtggtcaagggaacaagcaaaccaacaagcgcttgctgaagaggtttgtcttgttaacaaacaaggtaggtgcgaatgtaagcttccacaacttctctgagttgtggccagtaatacatcacctttataagtgccaaggtgcgcttcattctaggatatcctgcccacagcgagtcctgtcaatccttgattatctccttcattagaccagccacctttggtacatagaggcaactgccttttgtatacaacaaccaccttcatatagaatctctttgactttccctccttagccatagtaaccagggtctggcctagtggatcactagccaatcccttccgtatcctttctgttagtggacatagtggcttgctcaagactgctaagttggccctccggctcaaagcatcagcaacaacattcattttcctaggcttgtactctagtttgtagtcaaaatcagctagaaaatcttgccaccgggcctacttcggactcaacttcttctaagtctgaaagtagcttgttgctatgttattagtcatgaccacaaaggtacatcccaaaaggtagtgccgccgtactctcagacaccggatgatggcagtcatctccttctcctgaacaatataccttctttctctctcattcagttttcgacttttgaatgcaacagggtggccatcttgcataagtaccccacctatggaaaaatcagacgcatctatttgcacctcgaatggctttgaacaatcagatagaaacatcacaggttctttgcaaactgctgccttcatatcttcaaacgccctttagcaggaggcgtcccaatcccaatgtttattctttttcaacagttcagaaagaggtgctgctcttgcagagcagctctcggtgaaccgctagtagtagttgactaggccgagaaatgatcataactcagttcgttggttctttccagtattggatagcacgtaccttctccacttccatcatcagaagaagtccatctctgattttgtgaccaaaaacatcacttctcttctagtaaacgtatatttctccctcctcatatagagagaattttccctaaaagcagtgaacaccagcttcaagtgttccacatgctccgccaaagtgttgctgtaaatcactatgtcatccaaataaaccactacgaacacgtcaatgaaggcatggaatacttcattcatcaaagtgcagaaagttgtaggggcattggcgaggccaaaaggcatcaccaaaaattgataagagccatatcgagtcacacacgtggtctttggctcatctccctcctgaatcttcacataatgataccctgatcttaagtccagcttggtgaaaaaatgagcatgtcccaactggtcaaataagttagtaatgagcgaaatggggtatcggttcttaatagtgatctgattcaaggcacgatagtctatgcacatccttagactaccatcctttttcttttgaaataacactgatgcaccaaagggtgctttagaagcttccataataccagcatcaagcatctccttcaactgatttcaaagctcagtaagctctagtggtgacatatggtaagcacatatagatggtggcttcacgccaagctccagttcaatctcgtggtccacaccacgtcgaggcggtaatccttttggcagcgcatcaggcattacctcctcaaactcattgaggacagcttgtacctcattgagttccactactagaggggctagtggctcatcgtcgaactcactcagtatggctaggaagttgatacatttttttgttcatcccccccaaactacagtgcagataaagaccttgtctcaatatcctgagccttcacagttggcactatgacaggctgtgcaccgtccgttatgcactttgaattggaatgaggaatgaggattgcctttgcttggttcaggaattccattcctaggacagcttcatagttgtccatgttaacagtagtccaatttgttcgaccaacccctgcaccaaggctagtctcaacatcgtttgcaacaccttcgagaagtattggccctaagtttacagttttcagaaccccgccaatgttggtagttgtgttaggctatttttagcctatgttttggatctaatttatgtgcgtttttcgctgtgttgggacggaattacgcttgttttctatgttttcaggttctttggaataaaagaggtctcgggtgcagaaattcaataaaagacgagctgagccgaggaaaacacaattttttgaggaattgtgtatatctggctgcggctagacacagcttggccgcggctagatcacgaaataaattggaactctgggatgctacagtcgccgcggcgagggggagtctcgccgcggccatttaagagatacagagagagcctaaatttgcaaatatctcgccgcggcgagaggaagcttggccgcggcgagatcccgtacggaccaggg

SEQ ID NO: 297028 - DNA, 1776 bp, Cannabis indica
atagtaaagacacttgaaagctactcatgcacgaatgattttaaccataacaagtctgattcgatctaacttaaccataacaggcctgattcaatcccataaaaagaaggaaaatatactcattttaaagcaaccccataaaatgtgattaggagaaaaataaagtcactcgtccagcaagttagatgaaaatggcaaaatataaattaacgctaatccatgaagataggtgctggtttgcaaaataagctaacttgataacccaaaaacgagcatatatttcaccataatctaatggcaataacaacagtatagccagaataaaatatcaattacatcaaaagtaataacatcagaatcaaagtgatttacatacaatactgtattgggaactcagctcttgggctataatgtattcaagtttttatttttaccataaagagagtagagaacaaagggtaaagaagagatatatttgcctggtgtggaagccatgagagttgaaggagaagaaaacctaaaggtactcgaattcatcttccctgagatgagcaaagaacttaacagcgccacgaccttcgacttccgtgacgaactgaaccttgtaaggtagattagctgagatttgcttccctttccaaatcgcaacatactgctttatttctccttcctttcccataagatctatctccggaactttgggaacatggtacaccttcaatggcaccttaaccctaaccctcgctccaaccttagctactccagccgcgtcttcttcggaaagagacgacgacgaagcagacaaatctgaagaagaagacgacgtcgttgagtctgatttgatagcgacttcacaactaacacttcttcttcttcttctgttggtaaaggtataagcaattttgggaggcgaaaatgggagagaaagagaagaagaagaagaagaagaggcggcggaggaagaacaattcatggttccgaaaatggttagatgatcatgagaagcattaccggcgccggagcgggtgaaggaagaggcagcggttgccgccgagctcaataatccgatagtggcagtactcattttcctttactcgtttgtagctccgatggtgagtttgcaaatttctcactttctctcttcaattttttatttattttgggtaagatgatacttcagatatttcccaattacgcgcttctctctgtttttcctgatattttttgtcaaaaaaatgggaaatttaatattattaataattaaaaataacgatttatttatgaaaaaacgaaataaatgtagatcagatcataaacgaatggttgttattttatgtgaccatttgatttggacattttcctaaaaaaatattagattttatttttcaactaaattatttgtaggaaaaaaatatggtgaactcaaatttacttgtgtcgaatcaattttggaaatttatgttttaattcagacagtatttaattattagaggactgtctttagttaccgaagtaactaagaataattaaaaataaatatttttccatcaattttaataaatgtaacactgttttaaaaattaaaaaagttagtgcatgtttggcatcataattaaaaaactgttttttaattttaaaagcagaaaattgttttttgaaaactggcttgtttggccttgttttttgaaaacagttttcagaaaacaaagttacaaaaaacaagaattttgaaaacaacaaattgttgttttctgttttaaaaaccaattcactttt

SEQ ID NO: 297029 - DNA, 4951 bp, Cannabis indica
cgagtccttcgtacaaggaaaagaatcggcgaagaatggagaaagattttcaaaggagaacgacggagaatgttggacggacgggtatggtccttcattcttcgttctttgcgcaggagggcggagtggggtcggacgtgggcggaggaggctacaaggtaggggcggcagttggggaacggctggctgtagagagataataatttttttagattcttttaggttttgaaaataagaaataataaaagcattttggttaaagtgataagttaataggatgttattgtataaataatttaagagagttatttttaaaaattagattttttttaagttaagtatattaaatagaaataagtaaactaaaataattattaagatatagtgtgagattattatgataatttttgagagttttttaatattagaatatttttttagtaagaggtcaaaaaaatattatactaatgtaatgtgtcatggagttatttaacaattttaaaaattgctgtgttgcattcaaaaaaaaaaacaattggtgtgttggatatgctctaagccgccaatgttatcaatgccaagtctaacacaaaccaccttagttctcccagtcccacccaaggcaaaccccaccaccaccaccaccaccaccacacttctcacggctctctcttcctccaccaccatcgctcacctcaaacaagtccacgcccaaatcctccgctccaaactcgaccgttccaactcactccttctcaagctcgtactggcctcctgcgttatctcccccagcctcgactatgctctctccgtcttcactcatctctccaatcccgatgcccttttgtctaacaagttcttgcgtgagttttctacccgtgatggtgcctcggcggagaagacccttttggtgtatgagaagatgcggaaggatggagtaggagtggaccgtttcagctttccggctatcttgaaggcagcgtcgaaagcttcggctttggctgagggaatggagattcatggactcgctttgaagttgggattctgtacggacccgtttgttgatacggggttggttcgaatgtatgcgtcttgcgggagagtaatggaggctcgcttggtgttcgataaaatgtctaggcgagatattgttgcttggagcattatgattgatgggtaatgtatgattattgtgatagttattttgaatatttattatcttagtaaagtgggcatgcttacatatttgtattgaattgaaaggatatatctgtagatagatgatgaaaattgttgtgtggctacttgcaagcgttgtgctcgagtttccggaaacaaactaactataatgtagaaaaggaaaagtaaccaatttgtttgaaaatgataaacttcagttgtcagaaaaatcattgacttgtacatcttttgaacaggtactgccagagtggtctttttgacaaagtttttgttctctatgaagagatgaagtactctgatatcaagccagatcgtatgatactttcgaccattctttctgcatgtggccgagctggaaatttaacctatgggaaagccatccatgacttcatcattgacaataatattgctgttgattctcgtttacaaagctctcttgttgccatgtatgcaagttgtggctccatggatttggccaaaaaaatgtttggcatgatgtcatccaaaaacttagttgtttcaactgccatgatttctggatattcaaaacttgggcagcttcaagatgctcgattgacatttgaccaaatggctgagaaagacgtggtcgcttggagtgccatgatttctgcttatgccgagagtgattggcctcaagaggcgcttaggctgttcaatgaaatgcaacagttgggagtaagtcctgactacgtaacaatgttgagtgtcatttcagcttgtgctcatcttggggcattggataaggcaaattggatccatatttatgtcaataggaatggctttggaggcactttatctgttaataatgctcttattgatatgtatgccaaatgtgggagcttgggaagagcaagggaggtatttgagaagatgccaagaaaaaatgtgatatcttggactagtatgattaatgcctgtgcaatgcatggtgatgccgtcaatgctctaagtttcttcaataaaatgaaagagagaaatgttcaacccaatggtgtcacatttgtgggtttgctttatgcttgcagccatgcagggttggttgatgagggtaaaaagcttttcgcttcaatgattgatgaatacaacattgctcctaaacatgagcattatggttgcatggttgatctttttggccgtgccaatctcttgagagaagctcttgaggttgtagagactatgcccatggctcccaacgttgtcatctgggggtctttgatggcagcttgtcggaactatggagagagccagttaggagaatttgctgcgaaacgccttcttgagatggaacctgaccatgatggggcccttgttgtcttatcaaacatttatgccaaagaaagaagatgggatgatgttgggaaggtgagaaatctaatggaaaacagtggcatatttaaggagagggggtttagtagaatcgaattaaacaatgaagtccatgagtttttaatggcagataaaagacacaaacaaacagatgagatctacgagaacttaagcagggtagttaatgagttgaaactggttggttatgctccaaatacaagtagtgttttggttgatctagaagaggaagaaaagaaagaagtggttctctggcacagtgagaagttggcactttctcttgggttgttgataagcaaaagtaaagtttcatgcattcgcatagttaaaaatctcagaatttgtgaggactgccacactttcatgaagctgtcctcaaaggtgtatgagagagagattctcgtaagagatagaactagatttcatcatttcaaagacggtctctgctcttgtaaagacttttggtaactgtataaattggttgaactagcatttataccataatttaattgttctcttctcaaccacatctagaaaaggaagtacaaagatttcctcattacattgcattaggtggtcaacatatacagtttggtgtactaattgattatctatatcattaagcaaccatagaagtttcacaccaaaacagaacaaaaaatggagaaaaatgcacattcagcttctcacaagaaatgagaaaattggacataatccattaggttgggtgttgggcagcgaaattatggttttggtaactcttgaaagcagagaagagccataaatcttgcttcatcttgccaagtattcttgacgccctgtatttcaatattgctagtgctgctgaaaccaatcttggattttcaagtatcgcgctgcgctgatattccagaatccatgtattcggatcgaattgaactgcggacgatccccatttccggtgaccccatgaagaattcgtctttcgaataacatacccaacctttccatccgaccactgttcaaaccaacacaaaacaaacataactcataaagcaagaaaagaagccactttttaattgccaaatcaagactatatatcctaattaagaacgttaagattacctctgtgactctgccagatataatggtgaacgatctagaagagattccagttgcgagtaagcccgccgtctgcagaggccacccccatattcttatctcctctgaggtagatttgtacaatttgcagccagagttaagtagcaaaccatccttaaaatccatcaaaaaaggtacgatattttgagcacaatttcccactaaagaaagaaaaaaagcacaagaaaactttgttactaaaacaagcacctggttgatttcccatctggaattagcatagctgcagttggaaattttatcgacatcaacaataccctgcaacgatttctgcaagaacctcagtttcccattcaaatctctcacagccgaagatttctctccaaaattcctcaccgtatccggagtaaaagcaggcttcaacacctcagaaactatcccagaaaacccaaattctgctacgaaaatcaagctaaacagcccaaacaatctcaagaaatcgccacggcagccccatttccgctcctctctcttcggcttcttctcttttagattagtcctggaagatgatctaagatgccgagactccggagttcgggtagtgtttgaagtgggcgtggacaaactggaagcgctgaaagaaatgggagtaactgcaaccttgtggttgggcctagaaacggtggagagcttggagagagagctcatggggacgaggtcgagagtggcattgatacttgccaagcacatttcgcagttacaattcgcatcttttcggcaatccgggaagtagtaggaggagctgtctcggcattgatctgataggtgttcttcgatggaggcggtggtcgtagtcgatttccccgaagttgctgatgatagaactgcgacgtttttcatggttgcttattgagcattaggcgttgagaattttcggggtgtggtttattttatattttagtatgtggataatgaagttttcaaatttgaaatgaatacaacggtcatatttagaacgcttagaagtcagaccgttagttgcgatttgcgaatgagaatattaaagagtgttttctttgcagtttgcacccaaagaatattttaatcatttttattttatataaaatataaatttaaaattttgttatgtttactaaaccgtttttgttaaattattactgaaatccacataaaaaactatattgtaattaacgaaccaacttaaatcgtaattaaaatccacataaaaactactaaagcaatctaaactgtaatttttttttttttt

SEQ ID NO: 297030 - DNA, 6510 bp, Cannabis indica
tagtctcatcaaaattcagatctcagctattcattaatgatcttacatttttcctactgatgctatctctaaatggaagctggtaatgtatcttagtgagagtatgacacaaattcttggtttggagaaccagcaacatattacttctggtgtcatgacaagtttggttgctcttttaagttggtattctctaagaatgattggaactcaccatttttaaagcactatcgagagtaaatttaatttggcttgtgttttctccctagttatatgctacatactccaacactcctacatggttttagaagagaatctctgctttctttttcatcccttttatggttttctcttcactcctgttatagcatatgcttcaacctttttgcatttttgcagcctcacttttccacaatttattatctttctttttccttttgctaaaaataacaaatgtaagtcatttttgtgaagtaggaaatgcctctgaatttcggaaatggagaatagaattgatatactttcatgaccaagttttcttgagtctttattttaccaaactaaattttataaatattgtctaagtcaattttgtgtaatggaaactggaaagtatcactattctttaatgttttgactgtgcttttttgtgtttgtgtttcctaaggaaatgtttctaccttaattgaacaagtaactttgctttggtccaatctccactaatgaaatttgcttatgcagttgctccggggcctcaggtatctccactctgcaaacatccttcatcgtgacttgaaacctggcaaccttctcatcaacgcaaattgtgatttaaaaatttgtgattttggcctagcacgtactagcaatggaaagaaccagttcatgactgagtacgttgtcactcgctggtaccgagcacccgagctgcttctctgctgtgacaactatgatacatctattgatgtgtggtcagttggatgcatctttgctgagcttctaggccgtaagcctatcttcccaggttctgagtgtctcaaccagctgaaacttatcataaacatacttgggaatcagagggaggaggagtttgaatttatagataatccaaaagcaaagaaattcataaaatcaattccatattcccctggaactcccttttcccgcctgtaccctaatgctcatcctttggcaattgatctgcttcaaaagatgctcgtgttcgacccgtcaaagcgaatcagtgttaccgaggcacttcaacacccttatatgtccccactgtatgatcctagtacgaaccctttggccgaggttccaatcgatcttgacatagacgaggatttgggagaagacatgataagggagatgatgtggaaagaaatgctgcattaccatccagaatctgctagtgttgagctgtgttcttagtcttattagacttgcagaggctttggaaggaaaacactattctgaaaaggtgaaagtaattgtttttgttcatttccatgtgtttcttttaagtgatccaagtagatttttatttatctccaaaatcttgaaggtgcagactgaagtgggctacattgtttgttcatataatattataattaaccttctatttttcatgtctatatgaagaaggaggctgtgcattcaaggtagctggcctttgtaagttgtatatatatgtatgggtgttgttcaatgactacggagacttgtttttgttttgtaaattagtcaaatattactgtttaatttcataaggatgcagtaatcctagaaatgtttttgttttttgtctagaaaaagattagcctaagtaaaacctcaattccatcaagaaaacttgaaaaagacatattaaaatcatatctctaataatacattctattctagataagatggaaccaaggatttattctcagtagctttgatgacacaatgcagtttttatgttttttactccacatcaatgtgattaaatccaaatatctacccaagtagtctttgcagattcaatcgagtattaagatagaatgataattttgtttttttattgttgatttgatactcacaaatcacatcacacaatgatatgattcacatattagtaaaaaaaattaatttaatttttttttatcgataaataagtgcgcaagtatacgcaatcacgaacaaattttagaaatgtaagtcgaaaatattattacattattgaattgtacgaaatcaaccacaacaaaaatgataaaaattcgattaaactttaagctaaacaagaaaataactaacaaaacaaacaaaaagacaagagaggaagacaatgaagatgaggcaaaacaattaattttcctaaatatacaaaaattgatatcaatactacagtaacacaatgacaaactaagtgttattaatgaagaattgcaattaaagtcacaagttctcatcagaatcattatgaaagagtaagccctagatgattgactagtattttgctaggttcaactaaatcacaaattgcagcaaataaatcaaattaactcaagaaccacttgaggctagctcaagtgaccataggtgggtgtgtgtgtgtgttggaggtcctgagttcgagtcccaggtaaaacatggctgtaatatataaacgcttaaataataaaaaaaaaataatcaaatgaactcaagattacaaggttcacctcctctagaaacacattctaagcggctagtgctagggtctccaacgaaccaagtaaatgtgactcaactaaaaatcaatagtcatcatacaaataccagttcataaatcaaagaaataaatatacaaattgattcttattacactttaccctaacatcttaaataaccacttaagattccaatataagtccccttagattcacagcaagacccccttgccctagtagacaaaatatcaatgaaaatatccaaataagtgagttagataaaaacaatcaataagctagcttatataccaacaattctctcataactgaaatttacataagaataacagctagcaaaacaaactaacaatatacaataaagctaatgtgtcaaagctgaaacttaactgattacagacatgctaagatgcatctcagatgttcttagattgacactgaaatcataaatttgccacacaaacaaacatgattctaacaatttctcctttggaaaattatgatcaatgaataaaccatagtgcatgaaagatagcaaacaaaaactgaatgaaaacccaaccatactgacttatattcaccacaaacatactacatatgaccacatacactgagccaacaaagacaacatacactgacaaacagtcaacaaatgactacaacataagcaatataacactaacccacaagactctaacaataaccaaaagacttaatcaacagagtacggaaaaaaatgtgacatcagtaccatctctccctcagtgatcacaactgtgaaactccccatgaattgactagtcttgatttgaggctgaatggagcagtgtgctccctctgaaccacacgatcttggtgaagtagaaactctcccagaattagaagctcccccatgcgacaaaacagtcttgacttgaacttccacattgtgagcaaaaggaatgtagaaggatctggagactaaaaaatcctcatctactgaacataaagagaatccaacatgtgataaattgagtgcatactcatcattgtactacaggtgcttcaaccaatgatatttttcaaacatgatagaggaaaacacaaagctcttagaatgctctaacaatattttgagagtgtgtaaccaacatttagactttcttcaagaaaaaattaaagagcaagtgactaataaaacatattgtgacacacaccagaggcctcagcttgtgtatggaacaatatatttccccgttgagaagaacatagacatgtgatagaagaccccaaaaaaattcaaatttagctttataaatgttggaaacttattcagctttgatccatatcaatactagaattcaaattacacaaccaagaacacaatgcactcgcgcatatagtcacatacaatacaagggaggcagggagagagaatcgaattgtaatgttttattgattatagtaaaatgtacttaatgcttgttacaagactagttagaattacattaattgaatctatttataagtgtccaacaagagcttatgacactaactgtcataactgtcaaaacacttatgtcctaactaactaatttaacacttgcaccgagtacaagtaagtgtgtgtatgtgtatattacaagggaaatctaatacaacaattctctaccttgacctgtaatatacctaggaaagaaaactgtgagtcttaattctcattgtgacctgaaacatcgagaatttggagatactttgtaaatttggcaataggcaggggctttgtaagcatgtctgcttgatcttacctcctgaatttatatctcgaataaaatgcattcttacatcaatatgctttgttctctcatggaacacttggttcctattgagatgaagagcactttgactgtcacataagataagtattgatctttaattaataccaagttttgttgtaattcgttttagccaaagtgcttctttaatagcttttgtgcatgctatgtactcagtctctgttgtagacaataccactatagattgtagatttgattttcaattgattgtgcatccatttagttgaaaaatatatccagattgagatctcctagtgtcaatgtctcttgcattgttagagtctacaaagcctctaacttcttctctattattgttagcaccatagatgaggcatgttgttgaggtgtcttttagtgcatttgctgtagtgtgttttcggtatggttctttaaattttttttaaaattttactattttagagaaactattgtgaatgcttaaataacctaagtgacgacaaaaacggatgtcattcaaaactacagtagtctcatccataagcggagagaaagtggcactactgtaccagatggctgaggctaagacgactccaagcaagttacggggcactagacttgtgcccgcaatagatggtcccataaaaaaatgagtgtaattatattgtgtaattacaaaataatactatttagataattaattgttatgcattttttattttttttatgtaattattaatttatttttcaaatataaaattataattataattattacatgacatccaaatacactttattttttaaaaatagaatttagttattaattattacctaattacaattacactgcctaacaattagataattttttccaaacatgttattaatgcttacctaagaagaatttaaacatagaaacttttcttttgtctaataaaaaaataaatcatagaacttttcagataaatagtttttagattttctaaaaaatataaactagtctgataaatggatgagaaaaatacaataattattaaaaattagatgtttaaaaaaattaaaatttgttgaatttgttttatgtgtaaaatttgattgaaataagagacaagaaaatgaggagtaattggaaaaattagttgaaaggcaacattaaaatcatgtactaaaaattgacccaattgtatttatacctgttacacgtatcctccccaagatttctttttgactaaattcagttgcaactttatcaccaaaaacaaatgtaccataacggttaaatccggtagtggcgatgaaatagaggttgaaaaaaatagtgagaaaagaaaaatgtgatgaaatggtgtggtaaatgctttattattattattatatataatattcctgattgaacaattattattattattattattaatattataatttttatggtgtcctgctcaccagctggaattggaggacggttgtggaaatttcatctccaccccacatttctaatctcctatctctatctctctctctgcctcattccaaataaaataccttaattctttttctttttcttttccctaattatatacaaccaccattctacgagcatctaaagtcttcaaccatatttataatttaatgtgtgggaattgcactaattaccgtatattatatataaagtaataaatatggttagattatacaatactaactacaggaggaggaggagattccaacgcttctttctttttattcttttctttttattaattaatttctactaaattttattatttgatttccatttacacctttttttggttctataaattggcccctcaacgccattcccaacctcttcctttgcttcctctctttctctctctaattctaatagattattattattattattattattattatatagctatctagcatatctgggtgttaatcaaatcaccatcatcatcatcatcatcatcatcatctgggtttatgattatttt

SEQ ID NO: 297031 - DNA, 4030 bp, Cannabis indica
aggaggggtgttaggggaaaaaaagacggatgatttgccaaaattaacctgctggccagtggcttgatgataaagttggagagctactttaagagcattacaggaaggttgagtagccttagcaaacagaagtgtgtcatctgcaaagagcaaatgcgagatcaccggagtagatcgggcaattgaaatacctttaaaattcccaagtctctgttgaatgcaaagagcagcagaaagcccttcagaacaaaggaaaaataaatagggagacaagggatccccttgcctcagtcctcgagaatgaaagatttccttagaaatgttaccattgacattaaatcgaatagatacagaggatagacattgacagataaggttagtgattttatcaggaaagttgaaatgtttgagaatcgccaagagaaagttccattcaacccggtcaaaagctttttccatatccaacttaagacccacccacccaattttacccaacttcctatggataatggcatgaatcatttcctgagcaatgaaaatattgtcaaaaatgagtcgatcggacaaaaaggcactgagtaggagaaataatgtcctccataatagacttaatcctattagcaatagttttagcaacaatcttatacaaagttctgcaaaggctaataggtctgaagtctttaagtgaggaggcattagatctttttgggatgtggacaatgagagtgctattaagagagttcatactggcattgttgttaagaatatcaagaatttccatgcacagatcctcccctaaagtgttccagttttttttttggtaaaaataggcgttaagtccatcaaagccaggtgctttgtctcctgaaagctgaaacaaagctgacttgacttcattagcagtgaaaggagcatccaacaagttgaattgttgagcagttaaccgagtactaataacagacaatagtgattagtagcatctctgttgctgccctgagaatggtatcaacttgactagagatggtagtgccatcatcaagagtgagttttctaatgaaattggttttttttttcccgagatgaggctttattgtggaaaaatttggtattttgtcaccagctctaagccagtgaactttagatctctgcttccgaaaaacctcttgcttataaagaaggttgtttaactgagattggagatttgaaacttcagacaaaatctctttagaagcaggaagggaagaaaggacatcactaagcttcctatcaattttattaatgttagtaaggatttattccaagtttggatagcatttatacaacttttctgcttcctaaggaaatttgataaaggatgattattagaatcaaaattcgaacgattccaagaattactaacagcagtaaagaaagaggggtcggtaagccaatgattttcaaaaagaaatcttttactcttcactttgtgcatactctcataagaaagaactaattttaacaccctataaaccgagccataaaagttaagatgatgaagaatggcttgggggtagttgtggaaccacttatcattagcaattccccactccaatcattcataagtggaactatgcttccatgtgaatttattttccacaaaatgaactggtgataaagagtacttgctaacaaaattttggaaattaatcatagcatagtgaggtggggaagaactactacttctatcattaatagagagataatcattaaaatcccctagaatgagccagggaagtaggggcattatcaaaaagcctatctaaaagtgtccaagtatgagttttatcatgaacataaggggagccataataacaagaaatgtgattagttatattatcctcaaaagttacaatacagtcaatatggtttaagcagtagttcaaaatagtaacattaacatccttttccaaaacaacaaaagacctccaccaagaccatttctaggaacttcaaaagcactgtcaaaagagagtctagtcctaagtacatcacagtgattagctaacaacttagactccataataaagagaaagctaggcttatgattatttacaataagggagagattacggaatgcccgggaactccccaacccatgggcattccaactcataagaatcatttttttgggcggggttgctctgcagcacccgcctgttcaaaggaagaagcaacaacagatggaacttcattgatgacagggctagcacgagctcttttgaggatattcctaagagaatcccccaccatgatagaatgaggaatgaaggcagagcgcttcgcaccagcaatagctttacctttggacttctcagaagtcctagcaatgtcctgaacagtttcaggctcaatgtcagctggagtatgcacaacagtagcaattgttgggggtgtagcttgagaggcatcaaagtgaacaccaaatggagtaacaccacagaggccagggttaaagccttgaacagaagtgattctctcaaacgtagagaattcaagagtagaaataggattgtgttcaaggaatctttgagaaatagcctcatccctccttatagcagtgccagaggaggatgatcctgcaccaacatcctcagtggtaagaaattggcttacagcagcagcaagactctgatcaacatttccataaggcaatagaagctcctctaaaggaaaggagttagagagatcaaatgggttacgcttaaagttagacttagcaggggctttcaaagggattttgtaatggagtggggggtgggtaggcattgtcatcacactttcttagataagttacacatttagttaaggtgtgatcaaacataccacaatggaaacaaatgtttgacagattttcatactagaaatttaaccatttctctttatgaaaattcctaaaatcaactaggatacctcttggaatgggtttggagacatcaagcagaactctcacacgaaggaataagttagagactttgaggagagtggttttatcaacttcaaggaaatccccaacttcatttccaatcaatttggcaagcttataggacttcataccaaaagggatggagtgggcttgaatccaaaagggagagtatctgagttggttaggaaggagagtgtcaaggccagctggattagcactagtgaccaaacagtggtcaaaatgccatggctgaccctcaatcaccctctgcatatcaccttcacaaccaaactcaaccatgaacatcccattaccataattagagaaggtaataggagctcgaatgatccaaggatttctcatagcctcttcaaaccactcaattttgatagttcgagtagtaaggacttgaaacacaagacagaaggctttcctagtttgttattcccctcctacatcatccaagagttcatggacagttgcttatttttcagtaagagttaggacatgagccatattttcagtaataccctccatttcctagagtaagatagacaagagagattcccagtattttccaaacaacgatagcaaaagaaagcagaaaagtaaagatcgccagagtattcacacccaggaagaattagagaaatacttgcatgtacgattcttattgaggaaggtagcttcagagatcatcatccttacctgcaaaaatcctaggccaaatccaaggatcctaggtgtaatcatcaacttcctccttgaaagagccaaaaaggcagcctccattaatggggatgggatatcaaaagagagagggcaaaagatccaaggataaaaacccctgaagtaagatttttttggagattttcatctgaaaataaatgaagagagaaaaggagacgcgaagaaatggctgcaaggtaattaattagaagagcaagaggacaaaagacttaaagaaagggttaaatcacaataaatgaagggagaggtaggaaattacaaaatgagaagattaagcaaagttgagtaaatcaccacgagggagagatcaagctggaa

SEQ ID NO: 297032 - DNA, 2129 bp, Cannabis indica
ggttttttaattaggtattcttaaagtaggaaactcaatgactaaattaaccaacacatgtacagaagcataatagtactatattatctaatcaaattgtgaaattcgatgggatatatgaaaagaaccagaacatgctcaaaaggctcctaactcaatccgtagttcaaacttcaaagatactaatgcccatgagagtgtcgcaattaatatgttcaaagcaacctattgtgctttggtttatccgaaaacttgcatacatatatagctcatatgagaattaaaataaacaaaaaacttcatatggttcaaagtcaacaaattcaagaattacaccaaaagaaaaagagaaaagaagaagaagaaactaataacatctgtaattgtctaaactttggaaagaaacaagagtgaaaaaatgccaagtaccaacagttacagcatgacttttgagctaaaccgacagttgactactgaagcaaaagtatatattggcatatattggcatatatttatggataaagatttcatcaaatatataatttgtttgagaaagcctttttcccttcaaaggcctctcaccaaacacttttgcccacaacatttctcaccttttccataacaaacattactaatttccaattactcggaacgattagcgtacctctcgaccttctcatcgttgagattaatcccaaccatagcctcgcccagcccacagctcacctcagccagcacatccgggtcgctgtagtgggtcacggcctgcacaatggcacgggcacggcgggcagggtcgccactcttgaaaacccccgaacccacgaagacaccgtcgcagcccaattgcatcatgagcgcggcgtctgccggtgtggccacgcctccagcggcgaagtgaaccacgggcagcctgcccagctgcttggtctgcatcactaggtcgtacggggccgatatctttttggcgaaggagaagacctcgtcgtcatccatattcctcaaaaccctaatatcacccatgacggacctgacatgcctaacggcctcgatgatgttcccggttccggcctcacccttggtgcggatcatggcagagccctcgcggatacggcggagagcctcaccgaggttgcggcagccgcagacgaaggggatcctgaagttgtgcttgttgatgtgattttcctcgtcggcgagggtgaggacctcgctctcgtcgacgtagtcgactccgatggcctcaaggatttgggcttcgacgaagtggccgattcttgccttggccatgacaggaatggtcacagcctgcttgatttccttgatgagctgtgggtcactcattcgggcgacgcctccctgggcacgaatgtcagccggaacacgctccagggccatgacggcgcacgcaccagcctcctcggcgatgcgggcctgctcggcgttcaccacgtccatgataactccgccacggagcatctgggcaaggccgactttcacagaaaacggcgatttctttgccgtttcgtaaatggcgccatttccgtagacggtgactactcccgtgtctgccattataagaagaagaagaagcttaaacttaaccctggggtagaagataagagagaagcgattagagaagaggagacgaagaagatgaacgagagagaatattgagagaaaggtggtggatattcacattcaacaccgtatataagtggctagggattaccacttcaatcttcttctttcttttttggttaattttttttttaaaaaaaaaaaaaaattgtataataaataaatataaaaataatttgcagaaaaaatataataataaaataacacgtgtgacccgtctgaaaaaataatttaaataaaaaaaactaataataattttaaactatttcactaatttactaattaaaatggaaatttattctattttttttttctttaacaaccgaatactcttaattttaatttttttttaacgacggaacattaacaaacggaatataaaaaaaaaaaaaaaaatacattttgtctattattttttactcttttttttttctgaagtaaaatgttgatacatatctcagtacatttgataaaaaaaaaaatgggtg

SEQ ID NO: 297033 - DNA, 4012 bp, Cannabis indica
taaagtcagtatcaatttgtaataatcgaaaccatggtctcatatttactgaaaggtaccaaaatatgtttgagctagaagcaagtacaagagtatagtgtcaattctttttcctaaaatgtgtcaatatctaaagattagttacaagaaactgttgtcgatgactcaaaccttgcgccatgtatagaagtcacataaagcttataggcgggtatattcattataattaacatatactcaagaaaactaaaccataaaagaagcatccacttcaccttctccactttcctgccacacagatcctgccttgaatttacaaacaggacaagttccttgctgcctcagccaaggatcaatacaattagcatggaactgccaaaaaaaagtactattgtcactaaaataaccagttaaagtccatttgtttatagattattaaacatctgcgacattagctcaagagtattcaggtaatacaaaagaaaatatattgaacctgatgcaagcacggcaagcttcgaaggacttctccaacatttacttgctccaggcaaacactgcaagtcagttcatcttctgaggccttggggttcacaactgcatcattagatccttgtttctgctaacaacagagattactcactacaaagtattacatgcaagctaaataaaaagaaaatgataatttcattcttaataatgaggtgagcaagagacataaacaccaaactctgaaacttagtataaaatggggcaaaaagtagcaaaattgatcacatacctcagcagatgctgacgatgaggcctgttgcatagatgaggcactactgaaaacaaatagtctgatgaataatctttttcattgccttgtaattattagtgaaactatctttgaagtttcaaaatgtttgtttcaatttcaggaaacaaaaatgcaagaaaaaaaattacttcgccttttgaaatctctaacaataataacaagtatgaaacttacttttgtagatcagcaaccttgtatttatggacaggaagagcatttatctcttcctccgtcatagaatgagctgttggagcattatctgcatctagcgctctcaaggtctcgtaatctgttactatgcatcaaaggttttggaaatacatccaagaaccgtggaaatatatcatacatcaaaacacacctactaatacttttactatggaatgtgtatagtgagaaaaactagtgttgttcaccataattgctcaaggtaatgttctgtgtcctgggaaatggtagtaaacaaataattgacttgtgttttttaggtaattataaatcaaaaaaggcataattgctgggaacagtacactacaagcttgatatgtacaggaaagaagagcctaagtagaagttgatgtgatgacatcatgaaaatttgaaaattttgggagtacagagttcatttgtaagaccatctccaatagttgcaccatttttgtgcattttattcaccaatatagtgcagaatctattacttttagtgtaacaactcctaatatcacgaaataaaaatattttgcttaaaaaatctcacattttataatgtttgcatttacattaataaccaatttatgatataattatgcatattgccaacaaataatttataattattttgtaatataataaaaaaaggttaacatgaaaagaaaaagttatgcacaaatttggtgtagatacaaaatccaccaccattaatgttgtgaaatttggtgcacaccaatttgataaataatttggttgtatccttggagtgaaatagtgtgaagagatacactatttggtggaatggtgcacccttggagatgctctaatgaagaaatattttttgaaacactattacacagtatattaacaagtacgcacctaagtcatcaaattcgcggtcaagtagtgcaagttgaagccttaggccctgcagtcgtcctcgtgttgctagtgagatagatggtgggatatgcaaccgcaattcagtatgaccaagaagaccaccagctgctgcagcatgagcttgggcttgagcttgaagttgctggcaagttgcatacatccttagcgttgtggccatcaaaaagacaccaagcacaagccatagctacataaataaatccagaggatcccataaatatattatgattccaaaaaccaacagcagacatcaccagcaagactaatattaactcctaactaatagtcagagaaagaagataccagaaaattaggggacatctggtgtgagtttagaatcatgaatagcaataaaactgacataaagatacagtaagagaaattaatatttatatttataatacagaataactggtgaaacatatcagtaagaatcaatggagaatctaatacctacctgtaacaaggaaggcaagagaattagaattgactggacgtgctgaatgtagacgctgaggagaagagcgaacagaaaacaaataaaataacacccttatgtgaaaggaaaatctaatatatgaaaataaaaagttaagaggacagcatatctgaatctgttataccattggacgccgctcaggtacaaatccagtaaatccactttctatatctgatcttgttccccggaaaacaaaactcatggctatggaaatttacaagcacctcaataaaaaattatatactccaacttgcaggtccaaagtaatatactgagataaaattccaacaatctgcacatttatgaaataaacacttacatacagaatttgaatttataataagcactaacatctcataaacctacaaaggatacatgttaactaacgaatcaaaaattaaaacaaagaaatgatactgagaaacaaacttagaggaagcatctttcaaaagctcacaagcaagcatcaattgaattagctcattttatttgcaaaacagcatacacaattaattccatcaactatgacccaaataagcgtcactactcacagtacatcgacaatgtacttagttcataaatttatcagtccattacagccttggtttcaatcttaaataatgaactgacccttgaggcaggtactgtaattcaaatcattcggtaatatacaatatcattacttatatcacatatcaagtcctacgatttcctccatctgaattattcaacataagtataaagggaacatattcaccaaccatatccactacatcatttcttaacacatatactctttttcttttttcaattaaaaatatggttaaagaaacatgtccagatcttaaactaataaacgaaagtcctaagcatcctacaaaaagactactggaagattgatcagatactgcaccatcaatttacatatcacagcaatgggcttcatcataaatttaccaactttcatccaagcataacaatctagcaatgctcaacgaaacgatccattcaaaataacaaattggagataaagcacagtaatttcccaaattgttcagtatgctacaaaattatatgacgattcgaaattttgacaaaaggaaaaaaaagataaatctacaaagttgatctagttgaagacacgtttaaaaacaggtgtatataggttgaagattagataataaacgaaaccctaatcccgaaatcagaaacaaaaattgaagtaactagaagaacaaaaatcactgaaaagacaatcaaagcaacctgtaattcgatcaggaattcttggtaggacggcgttttcaaaatcttcgattcttaacgtcgtcaatggccgatattgagaggacgacgagttggagtgctcacagtcggatatctgatttttgactccaactttgttgttgggttgaattttcggctgaatgttttgggccttttacttttgtaccgcattaaatccaatcttgaaaactttaacactttgtaagtttgtacactttcaatggtattattgtatttttggattttttttttgaataattcagaaaaaacac

SEQ ID NO: 297034 - DNA, 6921 bp, Cannabis indica
tgtaaagctttatattttaaggttatgaataaataaatgtttgttttaaaaataatgagatctcatgcttagttatttttcattaaagaagtcttttattgtctttatcttaaatggttttaaacggactagctagtgtgacgtctcgagaaatcggggcgttacaactgtcgagtcgaatactgttgccacataatgtaatttgagtcctttgtcaacccaatgtaactctagtactctgccatttacttgtaattcttttgctttgtggcacaaaagattaggacatccacatcataaaatagttcagcaagtgctaaactcatgtaatatccaaacaagcaataaaaacattgaattttctcatcaactttgctctgcttgttgtcttgggaagcatcacaaattgccctttcctaaatccactattgtttatactccccatttagaacttttacattcagatttttgggatcctaccccaatcaattcctcatgtggatatcgatactatattagctttgttgatgccttctcaagacatgcatggatttacatgttaagaactaaaaatgaggctctttccacctttatcactttcaaaacccgagttgaacttcaacttggtctaccaatcaagcaaattcaatcagattagggaggtgagtatcaagcattcactcacttcctccaacaatctggtattttccataaagtctcatgtccccacacacatgagcaaaatggtgttgtggagagaaaacataggcacatagttgagaatggcctaactttattagctcaagctagcatgccattaaagttttaggatgaagcttatcgtgctgctattttcctaattaatagaatgccatcacctcagctaaacaatctgtcacctattgagattctcttccatgtcaaacctgcctacacctctttaaaggtgtttggttgcttatgttaccataacctaagtccttacaataaggttaaactccaatttagatctcaaccatgcactttcctaggctataatttagctcacaaagggtataagtgtctctcaaaggatggaagagtctatatatcaagggatgttctatttgatgaactaatttttccattttctcttgaagcaaataacaactcatcccaaaactcctcacccactctcactcagcaacatggccctgctcctagtcttccttagagactcagccaacttttccctcctctaggattcaattatcctcctgctgggtcacttagacctagtcccactaatgttttgaatgttgcttcacctactgcttctgctcttgttaatgtgctttttacaggcaattcaccacatgttgcagatcatgaagtttcatcttcaacaaatgccacggccagcaatccaactagacaacagcaaccagagccacaaaatactatcacaccagttgttgttcctaatactttactagccatgcctattaatgtgcctgctgcagatcaggttatcactccagatgctaccggttctaccagtattactcctccatcagttatgcaaaataacacttcagcaccacctgattactctacaccagttgtcaacaagcatcctatgacaacaagagccaaatcaagaattaagaaacctaaagtgctaatggcttcccttattcccacatcagtcaagaaagccctcaatgacaccaaatgactggctgctatgtctgaagaaaatatggctctcaaaaagaacaagacttacacattggtgcctcttcctcctaacagagaaccaataggctggaagtgggtctttaagatcaaagaaaactcatatggatcagttagtagactaaaagccaaattagttgccaaggggtatcaccaataagctgaatttgactttcatgaaaccttcagccctgttgtcaagcagtgactattcgtgttgtgctcactattgctctatcaaaaggttagacaattagacaattagacaattggatgtcaacaatgtatttctcaatggagatcttcatgaagacaattatatggtgcatccacttggcttcattgatccagatcacccaaccaaagtgtgcaagttacacaaagcaatatatttcttcatttgttgttatcttgttcttgagctgtaacaaataacactaatgtttcgttcttcaatacacctaaaacctaaacctccttgatcttttggcttacaaacaacattccaagccacaagtcctggttgtttataaccagaagtgccatttcatagaaaatcatgacatattttatcaatagatttaggaatttgtttgggaagaatgattactatatatgaatagcaactaagaatgagttaattagaattgctctcccagcataagatagatgtcgataagttatcggcgataactctaaacttgaattcgagccactatcttttctatgaggatttcacattcagatgagggaattttcttagaaaataggcacacctaagaactgaaatggcaacctactttgagtaaaaccataagcattcaatacctattgtacatcactcgaatctattcctaaataatacatggcagttttgctttgattggccattaatcccgaagcatttgagaaacgcttaaagctttgcaacaaaagcattatggattgaatgtcaccatgacaaaagagtaataaatcattggcaaaacaaaggtgagtaatctttaacccaccacatctatggtgaaatcgaaactcctcacgctcataagttttggcaagaatgcgagacaagtacttcattcccaacgcaaagacttattacgttaacttaaatttatttttattagatacgataacttacaagaatatgaggtgctaattatatatagttttctaatatatttaataactagtaattacacaattaatattatttattagtaattaatatttaatatataaattttttagtgattatggtaaaattacatggtgtaattagaattaaccaatgtaactagaactctataattaattactcaattacagtaaaattacatagtaatataaattaatatattaaattgtgtaattacatctaaatttaattgaatcttgggaccataaatatttatggtatccaaataaactttaaaataactcattttaggtgcccataatacaagatttaaagatatttctctttttgggtttttggcacatacattgattaaaattttagtttttctatgatgatgtgtaaagtagttatttacagtatgaaaatttatagtgtgaaaatatgattacaaacttgtttacatgattttcaaagttattatacttttatttccacccatatataaatactacgataattggtttgtacagtgagataattggtttgtaaattttcttcccaactctaaaattaacttaggtattcgctgtaatatttatttaattagtcaaaaattatatccttattgactaaacaaaattactttgaattttgatgtcttaagagcattggagtttgcatggtctttcttttaagaccaaatttagataaatattactcaatatacaccttttcatatgacatttttttctttttctgtttggaaaaagttacgatcgtggataatttttgttggagtatttttttttaaaaaaaatatgtcaaatctatataaataaaaaaaatattttaaaatgatgtagtatttttagcaattttatcaaaaaatatctacaatttcataatagacattttggcttaattgtttttcatatggatttttttgtatattattaaattaaataaagtattacactaaaacgacgtagttttgtcgatgagtttacagttagagcctaaaaccctaaccccgtctctccgccgcgatttatcggttcaccttaacttgggtatctgtgtttttcactttcttctatgttcttctaagtgtatttatgctctactgtagaaaaattttgattctccttttggtttcgaactgctcattgcgatttctggggtgtaattgggtacgaggttatgaaatagacgttcatttctcttttggatttgcttaattttgttcaatttctttgtttttttactgtgtttcgcataattctgtaaattggattctgtgatttaaggctaccattttgatctctgtctctctctttgagtctttgaaataattgcttgagctttagattagacttttagcttaattaatcaatttagtttgattttgtagaattaggaatgttacatattgtatttgtttgtttagattggtcttaatccaaatctcatttgcagctcatatacttatctaacagagagcctttattttgtgatgtgtttaggtaagagaattaggattggaagccatggttgggtggcaaagacatataaaatctctactaaatcatgttgggaaaaaagtggaacatagttacactccatctgccaacttatgtagttctcgcttaggctcctcgtataagccaggttcatttcctattctcttgctggaaggcttttgcttttccttctcattactttttatttggggttttagaatgctaattgtatcttttctttgtcatcatccttttgcaggtgagttttcttaccttcaaaggctgaagaatccaccctcgccaaccgttttgaggccctttcatcaatattttcagcagttggtaatgctattaggctttataatttcaaatttctctccgaaattttgaactaatatgacatttgttctcaaaaacacaaattgctgtcaagagttttttataatatggatgtgtgagtttgagtagtaactagtaattgctactgtgttgaagtgtttcatctccttgttaacacaggggatttctacgtcgaggaagttactagcaaattcatctgaggaagcacctattcggtctcccttgacacctgttttggcattaaatagtggcaaagcagaagaccagcagcagaaagcagtttctaagccttctacagttcaagctgtcttgaagaacataaaacaggtacattgagaaggttagtggtaatacagcttaattatcttgatgaggctttatgttgctgctgtttatgttttgagcagaagggtttatgtattttctgtcattttcatgaaaagtgatcggaaactaaaatgatgaggaatttattattttattccacatctagagaagactagatctacattagtcccaccaagtgaaatactatttttatcatgtgtaatactaatcttcatgcattgatttgcatttagtacaagtgccttatattgtgttgttaaataatgtttactactccagagtccaaagaaggtaaatttggttgctgcattagtgcgtggaatgcgagtcgaggacgcattgttgcagttgcaagtgaccataaagcgagcttcgaaaacagtttatcaggtgatactatcagtctgattaacaccttgctcagtcaaaaggttactgatatttgtatatattctaacgaagatgaaagtttaaaacatcacactttgtttggcaggttattcactcggcccgagcaaatgcaactcataatcatggcttggatccagaccgccttcttgttggtaaataaatggaagtaaagattcaattttttttatgtggcagtgtcttttacccttacattttcctattttctcctattgcagcggaggcctttgtcgggaaaggctttttcaaaaagagagtttcttaccacgctaaaggaagaagcggaattatggtgagaccagagtgtcgattgacagtagtagtaagggaaactacccctgaagaggaggcagagatagcaagactgaaagtccacaatttccgtaaactcaccaagcgtgaacaccgccttgtccctcataagctgatagagaccactccaatttggaacaggaaaggcaaacgcgacaatcgtgaatcaagtggtatgactgcataagccagcttccctttttctcttacattctcgtgaaaaagttcctactacaaagtgtttgaacttcccaaatatttttgattctatgatatgggatttttgaattgcctaaactttttattctaaataagaataaaattatgaatgacttgaatgaatttattgccattggaaatgactcgaaatgaatttagacttgcttactcaacttttgtatttgatatgttttgactaagtgaaagggaaaagagaaagaagagttgaacatgaacatattcctttcctttggacagcccaatacaaagaggcccatttgtagcccacagttacaacatgggttgggccttattaactactttcttagtacatttgtaaagaaagttttaattccaatttcaattccatgaaaagacactgttctttctcatatgtgtattttccaagattcaattattctccattgttattttgtccctgccctgcctttacccattttgtttatccaaaaccctttgaataataataataataataatacaggaagaaaaaaaagaaaaagaaaaaaggcaaagcaaagattcttttatttattggttaaaattaaatgaattttgatagatgattggggcatgaaatccctggactagtcattgttttcaactgaaaaatggtaactcattgactctatctacgaagattgaaaaataatcactttcactactctaccctactactacaaacaaataaccataaatgatttttatttttttcttctttcaaaaagaaaaagaaaagggtcctcaaatagagaaggaaaaacagaaagaagagtgagagtgagagagagagagagagagagagagagagagagagagagagagagagag

SEQ ID NO: 297035 - DNA, 2328 bp, Cannabis indica
aaaaaaaaacattaattaaacatgtgattttattagcttgtattaaaaattcaccccaattttgactttacatatacaagatctcatttccaaattaattcaaaatgcataataataataatgaaagaattacgaaccagatggaaaagggaagcgccctaacttgctcctcttggttctggctgcgatggtggatgaagctaatgttgttgtttcacagacaggaatatcgaaatttgagtaaagggagggagagaaagaaatttgagttattttttgtgttagagtagcgagttacgggaatatcaaaaaatcgaacttgatttgtgatccacaagggtgaatgtcgatccttgaaaaaggctattggtgtgtagcagctaatctaattcacacaaatattcagtcctaatttgtatcaagtttataatttagaaattttgtaaagttatgcaaataataattatttttaatgagtataaatgtttttacttaattaataattatttttttgaaaaaaattagtatgattttaattaatgaattctaatttatttatttaaacttgattaattatatactgataatattatgattatttcaaaaaaaaattataaaagtttagcaatatttacaaactaatttacaaagtatgctcgatgcgcggtttaattctctagtgtaaaattaatttcgaaaagagaataaaaatccaaactttacaattttgaagaaaggtgcacaaaatcccaacccacagaaatgaactatacatctccaatcgaaaatcattgaagatcaaacttgcacttcttctatccttctaatggcttctttcatatcaatccgttcttgtggattactctccacacaatcagctccaacacgaaggagttcaatcatttggttaaccgcattggaattagcagcattcccagaagcaatttctgggtcaagcaactctgtctccctctccacaatcttgtctgccgaagaaacccattgaacaatgtcgattccgcctttgcctttgttgagatactgagaagggaatttcccagtaaggatttcgagaatgagaatgccgagcagtatacatcggtctttgtgagactctctggtacttgatgtagtctggggttttgtaggcgaacatggattgagctgcgttggtgggactcatcaaggggtgaaatgcatagtcgcttaggactggttcgtggtcgtggttcaaaaggacattgctggacttgagatttccatggggaaggtcgtagtttgagaactctgtatataggaatcctaatcctctcgcgattccttggattatctttagacgagttggccagttgagctctgcatgactggttccccggtctcctaaattttataaattgttagtgaattatgattactctaattaactttcacacaacagtacaccaacactaccactttgatattgcctatgttttaatctaatttcgatattattactagttatttcaacatcaaatttatatattttagtttaataaatcataatgaaattgaatctctagtgtctcttttttctaagggaatgtttttgaaatttgaataacaaacttgcaacattaataaaagaggcgctgagttggataaaagcaaataattagcaaaatgtacaagtggaatcggattgtcttaatgtcgttcatgcaatcaacagcaaagtccatatgttctctccatatggaagcattattaacgactccataacactgctttctgctcttattaatatttttattatttttgttaaattaataatctgcgtataatatggcttatttctttacaagggactcttattctaaaactgattgtacttttagtgggatttctattcctgctaatttatcgtccttattattgaaataacttaattaacaaagatttttattgttcaaaaaaaaaaaaaaacttgcaacattaattaacaatgatgttgttggacattattatatggctaattaggatttttgccctctgaactttgacatgtaccaaattatgcccctgaacttttaaggccattgaaaatgctccctgaactattgagattgttgcagttaaggacttttgtctaattttattcaattttactatttcaataattgtttaagtactaaaccatgttcctcagactttgatatctaccaaatcatgtcatttgaactttgacatgtactaaattatgttccttgaactttcatccatgttaaacttttttactaaaattagaaaaaagtccttaaatccaacaatctcaatagttcgggggca

SEQ ID NO: 297036 - DNA, 3874 bp, Cannabis indica
agagagagagagagtattctttatgtataaatttttttatgtcgtttaatgcgttaattatggaaacttgtaaagaacattttttttcacatgtttttatttgttaatgcctaggaaaatcttaaaatatgtgcaaccatattaattacatatgggttaaatgagctctcttaaaaaggaatgaaaccatattcttgatcatttacaagtctggtctggtactgtgactactgtccagtgaccatttctccttaccggtattcttttttgcttttatagaaggagatggtaattacagaagactctgctgaagctaggaagatgcaaccctcaaaaccaatggtccagagctctttaaatcaggaggtaataatattaatcctagctttaaagagataattgccaagcttgtgaaagtattgcctttaatagtttgtgaagaagaagcttatgataagtgataatttgcaagatgtactgttttcattcttgttctctgtgaaatgttgatttcataaaatgatactgtctactagtttatggctctagtcccttgcattcatggtaaagaatgtggtaatgtagttaggggaaattgaattcttttctcaatccgaaatctggtgttattttcgttctgcgtcattatggtaaatatcaggtctcaaatctttatcctctctttaggttctgaagctacagaggcaattagaggaccagttagctgtacgtcatgcactggaaaatgcattaagttatcagccattgtcacatgaagcagcaactgatgaatcaataccaaaggtaaccatcaattatactctacaatgtgatagtactaatttgaatgttctttctcttattccttctgtgtgtacagtcgaatttctatggtattacaaccccgttgtagttcttctattatttgatggatcaagaaaaaataacttagtgtttttattgcttcacttttttagtcttgtatgttcctgggctaatagttgatattcctttgtttgacatcagcctaccaaggatctaataaaggaaatcacagtgctagaactggaaattcagtatttggaacgacatcttctctcattgtacaggaaaacatttgatcaaaaagtgttgtcagtgtcgacggtgaatggaagacttaattcagttttaagcacagaaaaagggatatcttcagaagcttcttcacaagatattataccccaaaaagaaacttctgtcatttactctgggagttcagtttctcctcggttttctcttggcaattcccaggaatgtgtggatgcatgggaaccagagaaactgctggattcaagtatccatcggagtcactcctcactatctcagcgttcagcttgttcatttagagcatcaccgaggaaatttctaaataaggctgtagattcataccactctttacctttgtctatgttggaggtgatttcacaccagaaattcaactaaataacatgttttagctataattactgagagtagtaccttaattggtgaatatgcaatttttccttattttttgtacagcaagctgagaatgcatccccaaatgctaatctggcagagcatttagatacctgtttcagtgatcatgttccagagacaccaaactgtctctcagaggagatgattaggtgtatctcagccatatactgtgaacttgcagacccacctttgatcactcaagattacacttcctctcctcctgttacattctcctcttcaatatatgaggcctctttacaaaatcagaatgaaaagtggagctcgttgagtaaaagttaccatttttcaattcacatcacgataaccactttcactttgaggggccagaaggacccggtggcccttactgcagaatgcttaaggttcagtggatctgtagagatgctgagaaactaaaagatgttgagcatatgctaaagaaattcaggttcgcaatctaattgttcgaaacctcagttcttttgtttcagagtgacatttcctacacttgattgatgttacaccaatgttgctgctagttgagatctaaaatggggatactggaatttctgcaagtgtgattttcttgtaatttaagttggagattccccatgacttttgtaaatctgttccttgcttttcttcattgtttcatacatttcttgcaaatctttgaagttggaattatttcttggcagatcccttgtctatcagctggaagacatcgatatcagaaagatgaaacatgaggagaagctagcattttggattaatgttcataactcactagtaatgcatgtaaatatctaaaaccaccaatttaattgttgatttgttgtttctatatcacacttttagtaactgattaatacttctgtttgatttcaattattttgaaggcatatttggtttatgggataccacaaaatagtcttaaaagagtttctttactactaaaggtaaacaaattttctcaaataaagtttgaagaagagaaaaggtaaagaatagaaactgcttattacttatggtctgtgtttgattcaggctgcatacaatgtgggaggtcataccattagtgttgatttaattcagagttctatgttgggatgccgattgcctcgacctggacaagtaagcttcattttcatttctagatagactgaaccttattgttttccgaaagtttcttgtactggatctaatgaatggtactttgtggtttatatcctgtaattctctatgctagttcgtactttttgttatggcttaactagctcactactatctccagtggttgaggctactgttttcttcaaaaacaaaattcaaggttggagacgctcgaaaagcttttgccattgagcatcctgaacctcttttacattttggactatgctcaggaagccagtctgaccctgcggtaactgtctttcgtaacatacattatgcctcttttttctacttgaagataaaaaattatttgttatttttattgaatttgtttgatgagttgtttttccttagttgtcttcttttctgctctgagtatatttcaagaaaatgaaagaaagtattagataagatactcccaagaggcttgctaaggaatcaggaatcttatcatcaagtgatttacattagagtacatataagcaattactttccttcactaacttttaattacgagtgttaaaattggtccataacaggagcctgctggaagaactttccatttcatagcttttctttaggcacttgttaccaagatctatctcaaagttactgttccttgtgttaggtccgtgtgtacacaccaaagagagtgtttgaggagctggagatggcaaaggaagagtacattcaatcaactttcgttatgcagaaagagcacaaaatccttctccctaagcttgtggagtcttttgcaaaggattcaggcttatctccagcagatttggtagagatggtcgaacattttgtacctgattctcgaagaaagactattcatcatcactgtcagcacaaaaaattctggaagggcattgaatggattcctcacaacttcactttccattatttgctttccaaagaagtggcttggtgatcaaatccttcttgtatgagtgccaagaatgatcctctacttgtactttggccactcacttttgtgtcatggcgggggttaaacatatagttaagctcaaaatgagtgaatgacagatgaatcactactagacctttcattgttggcaccagaaggatgatcaaactggctcaagatggttaagtttagaaaaaaaaaaaaaaaaccttgaaatggaaatgaattcaaattgggtaaagatgatat

SEQ ID NO: 297037 - DNA, 2140 bp, Cannabis indica
ttaacacgatatctctattcaatgttaatcaaataagcactcataaagcaatatgattctatctgagatgggcggggaatgacttcttgtactttgttttaaatcttcgaaaatgccaatattggataatggttgaggtcgacatcgagttgtggaaaataatagtgtacgactatgattctaccatttacaataaaagtgagttgaatgccatcatgaagtcctaggggaaatgttgccttctttgttgcatgcatctgatgagttcctacttaacaatcaaatgctggcagtagatatgaatgactgcagccagacccaaagaatccattacaaccgagctagccacgatattgtcctaaaggcaaaattaaggtaaatatcttaattaaaatctctattattttgtacttattactcatattttttttaatgtagtagtgattgtggtatttacaccattgagtacgtgcaatatttgatgatgcaacatcccttagttgatgtccgcaataggaacaagaggacgtttcaggaaagtggtgtgtggatcttttctaccatattcttagttgatacattgatagatatgtgtatttattattctcccatatatatattttgaaagagctagggtatttgattggtaatattttgacaatgcttgatgtaattgtaattaaaatagttttggcaacataaagtgaaatatcaattttaacaagttgtataagttaatattcctgataaaattgaatatgaagaccattgttgaaatctcaaaaaatttaaatgaaaaatcgaaaaaatattaatattacattgatctattatcgataatacaaatagtgctataaaactgaaaatgagtttttagtatatatcaacaggatagcgacagattgtcgatgttttcttaataatttcactgagtaattatcaaaccatcgagaaaatatcgataaaatctaaagctacaagaaacacaaatgtttctcacgtaatatcgacaagctatcgatataatattgataaaatatcgataaaaaggtaattgaaaaatattgagttactattatagatggtatatcgatatattatgtattgtttattaacactctgacttgggattaaatttttaaagatatcgacaggatatccacacattgttgatgttttgtcgataattttactttttgaagctacttgccaaaccattaacaaaatatcgatataatgtcgaaaaaaatataaagatgcaagaagcacaaatgcggacctttgcatcaacaacatatcgatatcaagaaggcaaaaataacaattttttaacatataaaaaaaccacctgctaactacccacttttaatgtagaaatcacaaaaaatgagtagttttgaagaataaatatagttcaaaatacatattattgcagctaataatagacaaagcctcaaatacgaactttacatattgctttgttgtggcccagaccgccacagttaacgtagttttgaggtagcatcactcttttatcactagacaagaaacatttctcctaaaattttccagaactgttcttccttggacgacctattagtttcttctccacacaggtaccccaacctcatgttcttgatgtgttttgggagaacccaatcatgctcgtcaccagcgagattgattgtatcatcgtaagtcttcctccatgtatttttcaaataataagaagagcataacatgtacacactcgtattcattttcaataccgcaacacatgcatgagtgcaagggattttcaacaacataaacacgctacatgtgcatatcctttcaactaagttcacattaccgcctcttttaccattttacttaatacagaccactaatttatcccagggattggcatcccaaactaatggtatgatttgggacttctggtgggttttgaaaaagaaaacaacatagagtcacgatataaaatcagatttcgagttccataagaagactataatctagtctatccaaaattgatacaaaaatcaagttcctccgaatagagggcaagtaagcaacatcttgcaattctaaaaaatgtcatgtatttaaccgtttcgaactattcaaccttcttcgattt

SEQ ID NO: 297038 - DNA, 1630 bp, Cannabis indica
attattattattattagggttttcaacactatggtcaattaacgtacattacaagtaactaacaatttttcaataataattatcaactaatatatgagtattattattgaatagcactagtgcctataacattgaaattatattaccgcacaaggagtacttttaagcatttctcttaaaatgtgtaacacctcaatataaaaattaaggatccaattaagcgtaaactaacttacttttttaattaatttttttaatatttttttctttttttcagattcgacagagatttaaagtggagaacaggagtagaaatagttccaatccattgttcaagctcaaatgatttcaaaatcacttcatcatcactagaacaagcctacaaccaagcccaaaagcttgacctaaaagtcaaaggaatcctcataacaaacccatcaaatccattgggtacaaccctgtcccgacccgaactcgaactcctcctagatttcgccttagccaaaggggtccacatagtcagcgacgaaatatattcgggcacagttttcgacgaatcaaatttcaccagcatagcagaagtagtcaacgaccgtacacaagaagtcaacgacgacacgtcatcatcactagagacacgtgtccacattgtgtacagtctctccaaagatttaggaataccaggattcagagtaggaatgatatattcacaaaacgaaaatatcatctcggctgccacgaaaatgtcgagtttcggactcatctcgtctcaaactcagtacacattatctcgtatgttatcggacgagaaattcatgaaaaaatacgtgagaaagaacaggaagagattgagaaagagaaaggaaattctcgtctcgggccttaaaagtgctgggattaagtgtttgaagagtaacggttgtttgttttgttgggtcgatatgagaagtttgatgagatgtaatagtttcgaggaagagaaattgatatggaagagaatcgtttatgaagttgggttgaatatctcgccggggtattcttgtcattgcagtgagcctggttggttcagattgtgttttgctaatatgtctgaagaaacactccacgtggcaatcaagagaattaagaattttgctgagcttatccatagagagaatagtgttattcttaaaacccaaacaggttaataacttgttattgagtaggaatttttcaagaacaaggtctttaactagatgggttgttcagttggctaattctgatgaaattcatcttgaaaatggtagataataattaatttttaaaaatttgtattttaattgaagtttaaaaattgggttagaagataataattatttatttaattatattcagatttgttgggttttgttgtactagataggttgatttctatctatgtacaattggatttgtcacacaaataaagacatattatttatttattttataatttattgtagaaattctatttgtaccctacaaaataatttttaataattacttttaatatttttgaaaatttcttttcttgtattgtttttaattaattttaatatttatttttattttattttcttttttttaaaaaaaaaatcatgtgtaatttttt

SEQ ID NO: 297039 - DNA, 4963 bp, Cannabis indica
cgagccgatgaatcgtagagtattgctggacaaagcatttctcaaaatcttcttgacgcactttgtttatcttacaaaacggctaagcgaaaagaccataatatcttcagtaggttctttcttgatcttgactgcaacattccaaaatcatgatgcaaagctccatctgcaaccaaaaaaaaaatggaaggaattaaaaatttgtatgtaccaaaaggttgaagttttaacttatcaaaagtaatgttgaagcagttagaagttagataacttgaacttacctcttgaccaggctcgattttaatatattgtcctgcaaagattcacaaggttggtccctgtctcatccatctgctcttcttcatcttcatcagattcatcctcaccatttgaatccaaagctgctgcatctgaaccttgttcatcctcagactcctctccaagtatgtttttcttcagctcttcatagcgctttttgctctcaaaggaaattagggtccggtttgaaaatatctgaaatcatgttgacattgttagaaaactcataggttgaagaagctgttattgctaatgattttgatttcaagacataccaattttgatttctggatatatttcttcttcaagagaaatcccatgtgtccattgatcattttgctccacaaggtcttcttctggacgcccagccgggtccctgcagattcacacatcacatttcggaaagaatgaaaggaaaatcgagtcctataaagaaagtttattagctagctgcacctgctgcatacactcaactagtttagactacttaccatttctgtatttctctccttcatggagaattccatgaaatcgttcaaaaatacctgaagtagacaaacaaataaacttaactgtatgagcactactaccaaaaacaatgtccatccattacatatgaaaagaaaaagattaacataaacagcaacagcaaatttgaaagccattgtagattttctggtaacgactaaaaagtttataaaataaaatatcttttattctttaaataatcgttaaacattgtacctctttggaaagacattgtagattttctggtaaggaaaaatgcatcagtagatgggatttccttgacttcagattctgaaaaatttgactttgcaatcccgaatgagattatttcagcagttataatcgagtagaaactcattttacactttctaaccacttattgtacaagtcaaatgccttgtcaagctcccttattctgcagtacttgttgataagtatcttatatggaacatgatcaactgttaaacccgaatccaacaactttgcaaataattcttctgcctccttaacattacccttgatacaataacccctgattaattccgtgtagattattatattcggttcaaatcccattctcaacatttcattgcataaatgaatagcgaattgaagttggcctgatctacaagcagcaccaatcaataaactgtaagtaactacgtcgggagaaagaccatagaaaggcatctcctgtttgagtgaataagcatcaacgatgtttccaacctctacaagagcatgaatcaatgcattgtaggtatatacattcggttgaacaccacatgccaacatctgatctttgatggagaagactcgattaatatcaccctgtcttccgtaacaatcgatcataagattccatatatgagttttaggcaccattgacttcttctcaatcatatgaagaaaaagttcattagcattgacaacagctccattgatacataaaccttgaataatcattttgaacgaaatttgatcaggagcaactccagttctagacataatgttgtagatcgaaaaaacctctttgaactcggcttctttgcaatgagaacttatgagtgtattatacgtaaaaacatcaggagacaaacctcttttgatcatttcggaaaagtatccataagcaagggtcatctctccgctcaaacacagcccattaataagggcattgtaggaaacaacgtctacttcgctgttcttttgtaccacatcgtgccaaagatcaagagcctgaacaatatttccggctttaaaatgaccgtccatgagtatagttgaggtaatcaaatctggtgttttcttatcatctctatcagataatatgttattaagaagctttgtcgcatcatccatgaggcctttcttgcacagtgcatgtataattatgttatatgtaactctatttggcttaataccgctattagtcatagcggaaaacaagtacagagctttatccaaatcgttgatgaggcaataacccttaataaaactattgtaagtggcacagttgggaaaaggaccgaatttgagcatctctctaattagctcgtctgccttttccaagtcaccatttttacacagtccattaagaatgtaattgtgtgtaagtacatcaggaacaataccactctgcatcatcttttttcggagacagagtgctgttcccaacttcccatccaagcataaatctctaatcatggcgaatttttcctggtaaatggtttccttggtcaaaccgaaaaagccgattttggccaaagatatgctttccctgcaaagaataccaaaattcaaagtaaccgtagtcataatcatcatcgagcaaaatccaaaaaacaaggactgaaagggagcgtgagaataaaaatgggaaacgagaccgggtaaagttggtgaaaagggaattgctcctgttatgatgagcttctacgaagagtgtctcttaaagtaggtaatggaagacttatacaaaattttgggaagatattttggaaggatatgagactctttcacatgattttctaatctggtcagaatatgttcaaaaaaaaataactgtatctctgattttcaggaaatagaaagctgaaatttcacttctttaggtatcttaaagacaatagggaagaaaaaatctacctttaacttgaggtaaaacagagatagaatgttacactatgaaatgtcatatgagcttattggtaatttgttagtagttttataaagcctataaatatgtaattaattgtctcgagattaaaagatatggtatgagaaatataactttagttcatttagagattggcactgtctggaagagtgcatttcatcccgaaaagcaagacgacatggatttcaagagttcaacaacctcttcatcttgcacggctcaaagttctctcaatgaaagcaccaaagaaagttgagagagtaccaatctccaaaataaaccaaaattcaatctctcattccatatcctttaatatctacacaattacatatttatacgctctataaaactactaacaaatgttacatatgacatttcatatgtaacattaagaaatatgaaagctaacctcattgatttgaaacgatccaaagtttcctttagcattgcatccaacacattaaaagttaaatgtggatcgttttccccactaacatcatcactctttctcgataaaatttgatcagcattcaactcataatcttctccaaatttaataatcaaatcatcaacactgtaagaaaaacaaaataagagtcaaaatgaaagttgatcctaaaatttcatcagataacgtgttgtggatgcaaaattctacaatcaaggcactgtctacagctttcccagaacaagtaggactcttatgaatttatggtgtgtttaattgcacgtaatcgaaatgactaagaatcggattcaccctcaatcggattgatgaatcagaatcacaatatgttgttcacttgacttgccataatcaaaatcggaataagcagtgcaatcagaataaattattttaaattacaaaaatactctttattaaagttttatttggatgtttttagttgaaaaaaaagtcaaaaatgacatttcattattttagaaggaatgggagtgggagtggcaatcccaccaacctcatgggattgccaatcccattcctcaatcccaaatatttcattctcgttccttaacaaaaatagagaagtaaacaagttaatgaatctcattccttattcccattgcctaatcccacaagtaaaaatgtgttctataattatatctgcatacaacctaaattttaagtgtagaaaacatattgatatgctgcaaaaattagtcaaagtccacaactgctgggaagtttcccccagaagatggtgaaaaatcagcaatgtttcctttgtatagtaaatgattagaccatggtcagagtctcattagtttatctcccaacgaaaaaggttgccttaatgaaatggtggttttgtaattgaacagtccaaataaaaaaaaaacctacattgtttctctctaaccaaacaattagaagaaagataaagactttaccttgcatccacaccattgtttcgagagcaaataacgttaacaaactcagcaatgttgtgcttaatggaatccattgttcgattcagaacccttagaatgacgaaaagggatggcgatgattctccacaggcaattgctaactgatacaatacaatccaattcaattcagcgcatatatataagcatacatataatattatagcaatactcaactgaagaataagattaggaatattgactaaccgccattggaagctctctccacgaccttgacttaaatcaagatttgtttgatttcggggattgaaatctgtaagcttcgttagggtttctgatacatttttaaattttttgaagaagaagaagaagagagaaatgggttggacattgaggaattatgatttatggcacttaatttaatgatattattaaatgtaccctcaatcttttgcaaattcaattttgtacccatatcttttccaaacttacattactacactcgatctcagagaaaattagactctatac

SEQ ID NO: 297040 - DNA, 5249 bp, Cannabis indica
aggaacttgaagttgggcagtcgtatttcgagcttcaatgcgttggtcaagagttatgtcagtgttgccatgtttgatgatgccatagatgtttgttccaaacgaggagaagggctttgttcctcatgttttcacatgcaattatcttttgaaccgttttaatttgagcatggtaaaaatggattatggctgtggccatttacaagcagctaaagagaaatcggttttgagccccaatgattatactcatgctattgtgatcaaagcactatcgtaagaaaggtgccttggaagaagctgccgatgtgttcttggagatggagaaagctggtttgaagccttctccttttgcttacagcgcctacattgaggggctctgcactaaccacaggtcagctttaggatacaaaattctacgagcttgtaacgagtcaaaagttaacattgacatgtatgcttatgttgttgtgattcgtggactctttaatgaaatgaaattggatgaagctgaaagtgttttttatggcatgggaaaagatgggttggtccctgatttacatgtatatggtgtaatgattcaaggctattgcaagacacataatttgcttaaagctttggctttgcatgatgatatggttttgaaaggtatgaaaactaactatgtgattgttagttcgattcttcagtgtttgtgcaacatgggaatgtcatctgatgtggcagatcaatttgagaaattcaaaggtttgggaatctttctagatgaaatttcatacaatattgttattaacgccttatgtaatctggggaaagttgaacaagctgtagaattggttgaagagatgaagagcaaaggaatggttttagatattattcattataccactctcattaagggtcatcttctccaagggaaaattgctgatgcgttgaatcttgtggaggaaatgaataaaatgggtttcaagcctgatatcgttacttataatgtgcttgctgctgggttttctagaaatggccttgcaagtgaggcacttaaccttttagattatatgaaagaacagggtgtaaatccagattctgttacgtacaatatgataattgagaacttatgcaaaggtgaaaaggtcaaagaagctgaacttgtttttgatcatttagaacttaagagtgtggataattattctgcaatggttcggggatattgtgaagccaaccatacaagaaaggcatttgaccttgtttttaggttgttgaagcaaggaactttagttagtaaaagttgtttctttaaactactctgtaaagtttgtgtagctggtgataatgacacggctcttgtgttgtttgagacaatggtaaccatgaacatagaacctaccaaagttatgtacaacaaactcttatcttctctctgcaagactggagatgtgaaaatggcccagcatatatttgatatttatgttgagaagggtttaactcctgatgttattgactacacaatgatgatgaacagctactgtaggttgaactgtttgcaagaggcctttattctcttccatgatatggaaaggaaaggacttgagcctgatctcatcacttacacagttctgcttgatggccttttaaaagcgcatagaagatcaattggctcttctcagaaagcaaggaaaatgagtgaaccagtgggtacttcaattgttttgagtgaaatgcaggaaatgcaaataaggccagatgtaattctgtatactgttttgattgatggctatagcaaactagggaaatttcaggacgcttctgttctgttccgcgaaatggttgaaagtggattagagcctgatgcagtggcctataccgctcttttgtcaagctgttgtaatagaggtgacgttgatggggctgttactctcattaatgagatgttttctaagggactagagcctgatacacgtgcaatccctgctcttcaccgaggaattatgaatcgaaaaaagaggagctttagaaatagttagtatattggaaattagtgattggtcagacaacatatataaaggtacgttcttgtatttccacatttgtttgagcaattaactcttttttttttattattttaatcaagtatttgatagtacaggtgtagaggattgaatgtcgtgaggtggttattttgggatgtggtttatgcgtttgtgtcatagacgtacttgtgtatgtgtggtctttataacttgagttttcatggaatttttagttttactttttatttatttattcaaccttactcttttccaacatcaggtatccaacttactacacaacaagcagcctgctgatactggccatagctccagatgaaacctgcgataaacagggatatctgcagctccacaagcccaggtcggtcagtgctcattgaccatctgtcatgaacatcagctgtttcttaaaaaaaaaaagccaccatgaaacagacctgtatatttacggtacacatttttatccctcgtagtattttgggattctattttcttctagcttgtaactgttgtcagcacagctgtagtttaattttgttaaacagatggtgaaaagcagaaatgtatggctgtagtattatgctagtagttttttttagcagaacagcacccaaattttgctgagctttacatccatctttgcagcacccattttacatttgtttcactttggtaatatcttgattatgtaagctgagttgtcaagtcttcagttgcggagatgtaatgtttttatgtgagatgtcaaatatttagaaattgttagagaaggtagattcagcactggggcttcaatgttatggaatattagtggtaatttgtctgatgtgtctattctagtcatcgtcttatgtgttgattctcaatgccttgaaatgtaactggctcttaagtgttttgtataggaaagatgatagacctcctgagaagcttactctatgcaagcgcaagatttccatccgagcagatgaggctatcgagcatattaaggtgaagctgcccaagattatcaatcgagcagaggagtttaccaaggaggaaatgagtgtaaagctgcccaagattaccaaccgagcagattaggctggtggctaaggctgttttattttgaatgagctgtcatgcaagtcttaggctcttacccctaaatcagtaaataccctaatacatttgtaagtaagtaatttttctgtcagagattggagtgtagatctcagggagataccaagcatctcgaatagcttggaaccattgtacagaattttggctataaaagaatatgagtaatactatcttcattcctagtaggctagtgtataacatatatagtggccgattatatgaatttgttctcctattctttgcattgtcaaattttcataaataactaattattttattaatttacaatttatataatttattatatgggatgaaataaaacacggtgagtattaaactcttataatggtcattattatatatttatagcaaaacatttaactggattaaattaaacgtttaagaaaaaatcttcttctaccattctgttttttttcagtaaggcattatctcccatactttatttcttcattaataaagaaaaaaaatgagacaaaccctttactaacgttaagatatgatatactatttaattaaatggacactaaaacgacatgaaatttctagattttcaactttcaatttttcatgaagtgaaacgttaccttaagaaaaaaaaaatctacagcaaaatataaatgtgagtattttcaagttttgtggcatcatgttagaaaggtggaggagaacattgaacatcaatctagagttgtaggtttgcttcagcaacttgaaggttctggcttacaatgtaggacaaagctctattatgcttctaaaatagagagcaaatatttgcttctattttagaaagagagaaagttcttctacttgactagttttaataacggggtaaggttcaagtatttagctcttatatttttgttcacatttcatttctggttttgtgttttattcatttagtgatatggtgctttgtgttagacctttctatactagcttttaactaacaaagtaagatttgagtacttagtttttgtaagatttaagtagtttttgtgctggcattttgtttgtggttctgtgtttcactcatttggttatatggtgatttaataactttgttaaatttttgtttggttatcagtcaatatatacttgactctcctctttatggagtttgatattttatacggaaaatatatctaaactgtatacaaagattgaacttgattgctaatgatatatttcatacagagacatatgagcctttttttttttcttctccgcgacctatgtatgatgatttttaacaattaaatagaagagagatatgaccataatattatgaatattgaagaaaagtttatacatagataaaattttatttgataaattttctttctaataacacagaatttattattttcaacatatatatttttatatttttaaaaaaaaacatatatatttttatttaataaaattactattttttccattttcttcttttttttattatatttttctagaggtatggattaaattacagaaaaaacatatatagtcaacatttttaccaagtataatgtacttgtttatccaaattttaacgacgataacgtggcaagagtaacgacacgtgacacagaaataccaggactgaattaatagagaatatttaaagtcatgaccgttgaggtgatcgttagtcatgacgggtggtcatgaccgttggaatggaagtctggcagtcacctttacccctagcttgtgttgggaatattttaccaggatctagatttactaacaagtatgttgattaacatcctaaatatgaatatctctaaaacaatgaaattaaacagataagagattagaaaaccttacattggttgcagcggaatatagtgactccttccgctcaagatctctagcccttgattcctttatgtcgcaaagcattattaagatctgagcctgaatctctttctctccttcgggtttggttaccaccgtcttactcactataattgagtacttgacttgctatgtatgggcataacactctttcactaagggttcgaatatgatgaacaataatgaaggaggtgaaatcactat

SEQ ID NO: 297041 - DNA, 2117 bp, Cannabis indica
aaaagtggggcccaatatcctaatccttggccggccacttatttagtgtttatcatttatttttttattattttaatgccaaataaatctaacctaatcctaggtggttgactatatataggtagtgatggccttagaaaaagatgatgcatcttattccttcacagaaaaactaagtgccttctccctaaacctagccgccactctctattcctcgtcttcactactaaaactgaaccattgagtgatagagtgagtgcccacacacatcaagtggtatctcaatcatagtgtggaagattatgaaggatgcagattcaagagaaggacattcgggctcagatcttggtgaatactttatatgtgtttatttaatatcgttttagaagttcatatttaggatgtttaaacaacatacttgttaataaatcttagatccttgtaaaatatttccaacaaaaatttcttcaatttgtaccaaaccttcactctcaatgaagtctttaaattcgtaattcatcaaatccataagtatctctatagagttttaatcaacccaaggaatactctaagaataaaatactcatagcaagtaccaaaagtaaatttataagtattcatttctcaattcttcaactgataatcatcatattgaaaatcaaccttaagaaaaatgatcttcccttgaattagtcaattagatgacccatccttaataaaggatgcttaccttaatagaccatttataaactctttggttatccatactatttttagtgacctatcctttatcttaacgaatactctgatgtatcccggatcaagtgcacagtctagtataccgtaagtcaagcatatctataactgaatccttaattcattttattttaccaatactatttaatacagatcttaggacctaactctatccctcaacattactttaattttaaaataactttatcgtttagtagtaaccctgatagctttctatgtacacatttacaaatttatgttcttcttgtacacccctattccttttgataacccttgtgtattagttaccatactaacttgtaaggagtctctcgttgttggtgctatcttattggaatctgtagttcttatattctttcaaagatatgaatggagctttgttctctttttcaaacatttctttccctttcctccagttaataatatctccatattaagcaaactgatccaagcctcatattatatctaattatacactttattgtttaataaaacaaacaaactatgttatctaataagataattgatgaccactattacttaatgaagtaaccaattatcttatgttgtctagtaaaataactatatctaccaaacaacgtgattgtagagtattaactctatcagtctcattgttacttaataaactaacatgatatctctggtcgtttcataagacaaccatacatacataacccattctctatactcaatagagaaattaacctcacttacaggaggtaatcaattatctcgtaggttaaaacatacaacacactcttgataatatgccacatggtcaaaaaatcctaccatgaaataagtttaaactgaattctctctttaaaaaaaaaacacctttcattttttttctaagacatcttgggtaaacttacccgtcttatttttgttccaacagaaaattcattaccctaattcttttaattaagacccacatcaagaaggtcatttcagtcataatccttggctaattaaaaattgaatagagttctaagaatccttctggatattactttctcttacagtagatttctagtccagtccaatagaaattcctagctcaaccacttgagtatatatttgttaaacgatgggttgcttggtcatcccaatcatagcccaggctatgaactcttccattctttgggtgaaccctgcctttctcaagtcttatgttgcctctacgtacaccaagttgaccatctagtcaaacttaggggcatattccaacatcatcatgttacattgaacgatctaaataatctccttcatccttgtaacaccacagatctcataatcattctgttgggttttatgcc

SEQ ID NO: 297042 - DNA, 4361 bp, Cannabis indica
attgggcgggttggacctattttgacccgcccaattaacaaattgggcggtttgtaatttttttcgggttatcttggtttgtaatttttaatgattttttcggtttggttcgggcggtttacgaatttttttgtatagttctattgggaagtttgtactcgccaagcctcttcatattatttctcagaggggtttcaatgacatcttgagggtgaatatattatcccacttttacttatcttctttgtcaaagtcattttctgaccttattttttaattggtaggcttacgtgggattttcttatgctatggacaaagagcataagaaagttgttaagcttgtagagaagttatcagtcactgagcacaagcatctgatgcagagccatggtcattaactttgagaacatagtcagtgagcttcagactagtgtctcaaatcttcaagggaccgtggatagtgccataaactgcaaaaatagcttaaataaagagctctcaactgggaggaggaaaacttctgaagtggaagagtccctcgacaaaaaaccttaatttttgtttaattagaaggtcaatttcgtcgtcttgaagaccaagtggctatcctaggggcaaaggtagttgaggatgttacattttatgagggctattgctttgatgccatctaaaattcttggtcggccaatggaggattcttcagcagttagtttattgaggacgttgtcttagtcttttttagaatttagctttagtgtgttagtcggtcatctcgagcgaccttttggtgtagatatgccttagtaaaaactttattagaatttgtcccaatttcattagaaattaattccaatatttatttttttttattttactttgtctgttgacctttaacacttgcacaatattccatgtgttaagaaactcacttactgggaataaaatcaacattctttaatgtttcattaccatgaaagtactactctggtgtgtaaaattttttgaatgcccctataacacctagctcccattaataagggtgtatttgtcacccaagtgattaagaagtgccttcattggtcacttatcataccaaatctcattgatctttcttgatcataaatcttgaggagttgttacatgttgagaactcgtccactcatctaaagattcatgggttgaaagtgtttgactcactaaagaggtacctgatgttacctcaacaccatctctacaagctttacttagcacttgagagcgttgtcaggtctgtgagctgtaatttcttaacagcaatgaagtatcaaaaaaactttgtttaacatttttattcatcaaaaattaaatacaattaatgttagaaaaattgaaaaaaatgtgttcacaaacttgcatttttgtcagagatagcttagttgaaccccactacacttatgtcatgttcaactaatagtgtaggagtcataacttggtgatggacctcttgacctatagatgacttcgctgtatatttttgttcaagaggcgattgattcacttgcacgtggaaatgtgaatcttaatgtgaagcaagctgttttggagacagctaatttattagtagtatcatcttggatgcaccctgttctagtgccttggtatgggcattggattcaagtggcaatcatagcgggccaacttgtacgttctgggttctagtgcttcgatgacaacaaatggtccttttaagaaggtcagagtactcctacttttgcatcttttttattcaagaatactcgttgtaacaccatatctcaacacttaaatttcctatctttaaccttggatttgtagtgtcaggcgaccctttgttaatacgtaaccttacaaagctcaaacttctctctgatttcttcaattctgtctagagctccaactttgtccagagactcagccagtaattagtgattggattattgatgataaatgagtctctagtgtgattatggtgtgatatctacatgtatcaattcttcgcacctataactcaaagtgaatggaggatggccaattactatttttttcgtggtacggtaagaccataacaccttgggaaattctttagtttcctttagctttctccaggcacttctttagagtatctttaagagtttggttaatatctttcacttgtccatttgcttgtaggtgagcgtttgctgaaaaactcttaattattttgtgtctttcatagaaattagtaaagaggtcgttgtcaaatggttttctattttctgacactatcttttgtggaagtctgtagcgacatgatattcttattagtatgaagtcaagaactttcttcgatgtaatagtggctaagtgctctgcttcggcccatttggtgaagtggtccacttccactaccatgtattggactctaccttttcctttaggtagggagtataagaaatcaattccccagacagtaaatgtccatagagtttgcatgcttttaagctcattttgggcagccctaggtattttgaagaatcgttggcacttgtcacatcttttgacatagtccattgaatcttttagcattgttacccttgcctcaatatctttttttagaggctttggtcccagtgtgacaaaaacccacatgtacctcgaccatgagtagttttgcctcttcatttgtgaaacacctcaaaagaggcattgagtagattcttctacacatcactccatccatgatgatagagcgagctacttttctcatcagtttcttagcctcgttctggtctgttgggagaataccttgttctaagcattgagcaatcgaagtcattcatgatggactattatacttagtttgtatatcatatgctaaatatcttctcaatcaatacgcatcgctttcgtcttcccaggtgtaacaaatttgatgtctcgttttatgcatcaaatgacgtatagtttctcgttaatacacgaggtaacagtttgtatatctttacctcacataagaccttatagtcagcgagttgcaagtatactctattatttacgcaattaatgagttattccatcaaaggagatttcatcgatccatattccccttaacctgacacgtgtcctctattggaatggtagccaaatttcgggtataacaattttcccttaaaaagttctttttaataaaaagtactttttaataattacagagggcattcttgtcataattccttttaaaaaaatttgtcctttgatttttgcggttgtacggtttcgagggtcattatgaactgtcttttcatcttctacctcacccaaccgttagattttccaacggccttcttgttactggactttgaatataaaatggtggcttaagcttgccatattcaacaaacttctggttttttggtgaatttcatcttgagattaaattgtcattctcttgctaagatgtcccatccatgttcagaaacttatccctccaaattcgtaacaccaaaatacaccaacaactttccttctctgcacgttcccaagaaccttaatcctcaatttaaattggaaatgaaggattccaagatataagagcttccgattaatccaaacccagaagatgcatttgatcgttacaggcgatcctcacaagagattttttagggtaagtatcattccttgtgaatggtagtttgaactagattatatatatacatttttttgtgttgctccattgatcttttatctctgtctccacaggaatggacatagattttgagagcgagtttagaggtcctcctcaggctgacaaggaatccaagaagaaggtagtcccagttggcgtgtcatggattctactaaagaacccaaccgcaccaagacccaagcttggacaagaagacctttggaccagtcgatctctggtgttgaaaatttcctgaggctaggaatgagttctcgactacaggaaacgggatcttctgatgcggagaatgaggtctatgttacgtgtaaacagtttttctcaggctacgtgtaaacggtctttctcgagctatgtgtagacggtctttctccgagctatgtgtagacagtctttctcgatttcatcaacctcccacgaataacctcgtattctttgtttaggaaaatgtcttaatggtttgcccctagtggcatttttgtaaagacaagtttgtaaaccaacttggattttctcttatcttaaatgccttgtactcttttcattcgaactataatataattgtgtttgcttgcgtttttattcacaatgtaaacaattatactttgatcaaatgtaaagtactttttgggtttttccattgctcgtaattttcctgttt

SEQ ID NO: 297043 - DNA, 4219 bp, Cannabis indica
tctcaaataatttcacataattaattctacaataatataattactctactataattaatccatttcaattagggttgctaatctatttattaattctaaaatattacgatatgggtaggattttgggcatcttttcttataatacgtttgtctgaaaccgactgggcactaatgctttttggttgaattatgtgttttccttttttctagagtcattaggactgatttatctagtgtcttttcttctaaccatctagcgttgagggtcagaagcgatactgctcctttcgttgcaaaaatgattgatttatttgctagtagcatttgcgagctaacttcggtgaaatgggttgtgcatgtagcacaaaccttgctttattagcccatgctacaagacagtaggccacgagggtaagactcattttatgtatttgatatctattgccactttcggtttctaccaatatgttctaacactttgtctcttttacttttggtgtactagatggtcgttcttgccgaaagggcgtgtgactctgcccaatctgcagtggtggagctgcataagcttaggaatgagaacaagaacttaaattccaagattaaagaggcgttcatcttggcggaccaataggctaaggagaagcttaagcattgtgccaacgaagtcactacctctttcaaagaacaaattcttgaggctgacaccatagccaattataaagcaaataaggccttgagtcgcgctaaacttttggatgctcaagttcaagctaggaccaatgatcttaatgcaaagcaaattgaggtcaatgcaaatgagcttaagataaaggatctgaaagatgaatctaatgaatggaggtggaaggaaaattcattggaaatcagcctagatgtagagaaggtctagaggaagtcactccaagatttggagaaagcttgggccactaaaaggttaaagcttccattattgtgggggcattcagcaaatttgcattttattgtcccaatttcatcaagtagtcagaaaggctagccctcaagatctaacatgagaatgaagagaaaatgagggttgctctccaagaggctgctgaagttgtggaagaatattgaaggcggtatatggatcaaactccaattcacacattccactatttgtggaagaaagatcccactattttgaagattctcggggaagaaaaggaatcttatcaagccgaaatcagatctttagaaactgctgaatcttctgaacctccggctactgaggactatagcaaatccaaagatgctactattgaggttaaccttgcccaacctttgtcagatcaggcataattctagaacttttaaatacctctctcttccttatatatatatttatttacgggccattggtccccttttagtatttgtagagacattctaaatgccttaactgcatggcaatttgtaatagcttttagattctttttcattcctttacttgaataattttacatcactttgcctcacgtaagtgcttgttgttttcataactgctttcaggcaactttggatgtcttgagttcttggttccaatggcctgaactccaaggcttaagatttagttaggatcgttctaagtttcacgttatgtgtccctcgtgttaggaagtgtggagaagagaatccaccttttaagcctattactacttaattccaaggattaatacttatgatacttaggacttttgattctagctttttcttccaaacactcacatcttccaaacttaggacctttttgcgaaatgaaaaccttagtctgctggctccgagtgattaaaaggctacacttactcccggttcattgggttccagttctagaggttacatgcttatagactttagtttgcacttttgctcccgaaccaacttgacttagcgagttattaatcttaggtacggtgggagagtggcttccttctagctttaagagtttctagtttcaggcaaaactttattcttccgtaactagtttaatattgattcgcaattacaccaaggtttgctaatttaaaatgtggtaagaaaagtgttgaatatgtttccagattcaagcgagctttctattcccatatttttaattaacaaaacaaaatgatacgtgatgaatttatctttctcaaaatgtggtaagaaaatagctaaaaatgtttaaaatttcaggtaaagttttctagtcccactttaaagacataaaggtatgaacaattagcttgaatatggcaagaaaacaactgaaaatgtcaaagattcagacaaagttttctacttccacattccataagttttaacaataaaagtaatcagtagaacttaaacataacaatgaaaggacattctacactttcaggggtacatagatgtatatcctactctcaagtgagctgagaatttggacgtctccaaattcctagtcacttgtttaagatgcatcttaaaaatgaaagtataatgcattcttttgaataattcttcagatttcatttcattatgcctggaggcgttacataaagaagaaaaattataaaaatacaaccaatagaagaatatgcttgacgcaagtgatccacattccaagcttgtggaatctttgatccatacagtcttttcaattggtacgtactattacccactttatgttggatcttgtaaggtccctcccagtttggtctgaagacccccactcctagttcctgagaagctgggaatacttttcttaagacgagatctccaactttgaatgttcggcccttaacttaaacattgaagtgcctagaaatatttccctaatacattttagttagacctgagactgttcttggagatccttgattaagtccaaagactctttaagcaaagcgtggttctaagttaggtcataagtttcttgtctgcgcgaaggaatggtgttttcaattaggatgcctgcttcccatctataagccattgggtaaggtgtgtgcccgattgaagttcattctgtggttcggtatgcccagagaactctaggaagttcttccaggcaatgggctttgcaggcctgcaatttttcttcaatgtggtctttaagatcttgtttacgacctccacttatccattttcctatggtctggccacaactaagaagcttttgataatctcgtgttagacacaaaagtctgtgaactacacgctgtcgaattgcttctcattatctgagacaatcttatgtggaaggctgaaacgacacactatatttttgatgacgatatccaaagccttcttcaaggtgactatattcatgggttttgcttctactcacttggtgaagtagtctacaaaaactatggcatacttaactccttattttccagttggtagagattccactaagtcgattccccaaacagcaaaaggccaaggactattcatcaaagtgatttctattggcaaagctcgtggaacctttgcatagtgttgtcattgttcacaattctgaacgtactcaatgcaatctttcttcattgttggatagaagtaccattgacgaagaatcttctttgaaaggctcgatccggaagtatagtctcttccttcttctcacggatgcacctcttggtcttccttgttcgggtgcacctccttaactctctagagggcgttgtctactccatcacctagaaggctgaaagggctttcgggagcaggaggatctcgtctctaagggcgaggctcctagaagtgtgatgggcttgagccacacttaggcccgcctccggtttgtactgggccttcgtatgctggaaggctcgagccactgatcacacggatcttaatacgccacatgtcgtttttctaaaaacgtgaataacaaaaaaaaattatgcataattaaaaaaatgaaaagaaattaaaataattattggaacacaatataatgtagataaattataaaaatgttaagagttattttttaaaattaatttgagtttttttttaaaaaaaaatattgggtattttttataattttgtgagttgaaaaaaaaatagagaattactccatataatatatagggtgattctacaatgcaccccttaaaacgggatgtactgatgcacccttaacttgtttcagcatccagaagaatttttagtctaattttgttctacattcatatacgttata

SEQ ID NO: 297044 - DNA, 1176 bp, Cannabis indica
tggagttacagagttgtattctgtaactacggaaaaactgttttcaataccagtttcattattccgcatgtaattaaataattaaactgggaatataaaatacggaaattcaataataatttgacttactataaaatttaaaattttaccttttttaatatgaccatcaagtagtcttctaatgatattactccaatcaactcaaatgaaataattaaaacatgtagaaataaaagataagatttcaatatattatcaactatgaaataacactttattatatttatatgagttttttcttgttgaaaaagaaaaaataaataaaaatcttataataatggaatctacagaacatgagattgagacatttctttctcttcctctctttcttgtcactcccatcattcttactaaccaataataattaggcaatataatcaatgaaagaaaagattaagttaaccaaaactaaatcattctattctgtgtacatacatatacatatctttatttatttattctttttttttttcattccaaatccacccaccaacttgatcattataacccaaaacatatttaggataactctctaaatattttatattatgatcgttagaataaaatacaagaaaaaaaactgtcatcatgagttctggtacaagattcatagtacactaattataaatttttggcttgtgcaaaacacagtttctagcaccataacagtaacttattttgtatataggataaagataaaagggaccaccgagaaatttaagttggtgaggcacatatataaatataggacacttctatacaagggatgcttcttttgtttctataatagagacactttattacatattgattaatgatccaatgggaagaatgtaaggagtaggagtgttcatccgatctaatctgcacttttttggtcaaacaacatccaatccgcactaagtgcggatttcatattttggatccaatccgatccgcataagagtttaaatccaatccaatccaatccgcaatagtgcggattggatcgattattttggatcggttactttaaaaaaagactattgtttcttaatctccaatactaatctatttccatctctatttatatacaaattaaaccaatatacataatatatcaatatatatacttat

SEQ ID NO: 297045 - DNA, 5066 bp, Cannabis indica
ccgtatttttgttatttttgtgtgtgaaataatcctaaaataaaatgtaagttgaccaccatggaatggtaccattctgtaacctttaaaaaaaagacattagccgaggtacataaactaaatatcaccattcattttagtttaatactctataaagatattatctttataaatttaatagacaactaaaaagtttaaaattagtaaaataacactattaagtaataaaatagaacaaaacattactaaaacaaatactcaaaagcaaccaataatattacaaattttacaaaaaaaaatataaacagctattatacatataattaaaataaatatttttatttttctaaaatattttttattatatataaataaatataaatcatttttaatatatatatatatatattttgaataaaagttgtaactttattaaagcatttcttgcacaattacatcaaagatgctactcggtatagaggtaaacgagtaactacgatcagagtgtaaccatgaggctcgagcaaaaacatgagtaacacaattggcagattgttttacaaagcaaaaattaacattgttcaagtcagaatgaagacatttacagtcctcaatacaactgctaaacagagaggccataattactgaactctgaagagcttggacggtaacaaggctatccgtctccacagtaacaatgaaaacattcgaattttttatccaactaagagcctccttcactcctaaagcctctgcaaagcctggatccacacacccttgccaagaacccgtcctaacttgaatgacaaatcctctagcatctcgaagcacccaaccaaaaccaaatttgtgcttgtccctaaatgttgcagcatccacattaatcttgtcataatcaacacaaggagcacaccattgctcatccccttctcctacatcaaccgagaaagaaatgggtgaaaagtttttttttttgagaaaatagccactgttcaagatcagttcttgctaatgccacaacattcttggccgatccagatttaccattccaaaccttattgtttatgtcttgccaaattgcccagcagagcatggcacccagctgttttttatggctgctccaaagttgaaaatggttctgaaaccagtcaccaaaggaaagattatcaatgctttcattgcataaaccagcaaaagtgcagccaacaatgcagtgagcagtcgattccgcctctcggttacacctgggacaagagggggcgatctaaacaggtctttggatgagctgcacccgagtggcgagacaataagacaaagttctccacaacatttccttcactttctgggggatcattaaattctaaatttctctccaaaaacgcgaactgttagaggagacatgagaagacttcaagtcttggatcaaactataagctgactttaccgagtacttgcccgaagtttccttactccagtaccatgtatccaccgaattggaagaagaaataggtatagagagaatggggtccttgtctctatcattaaacaagttagagataatctctatatcccaattcttaccatccatagtcgttaaacacttcacttctttatcacaaaggctggggtggaaagatgtgatgaaaggattttcaatatccgggagccacaggtctctagtaatagagatatcctctcccgaaccaacaagtaatcttccaccttttattattaaatccttagcttcaagtatactcctccgaacatagctaggattattagccaattccgcactcataaaagaaccgcgaggaaagtgtgtagctttaaaaagctttccaacaagagagtttgtgagtgtatgaagcctctaagcttgtttgccaagaagagctatattaaattcatgtaaatgacaaaaacccatgcctcccttgtccttaacaacgcacattcggtcccaattcatccagtggatgccagttttatgcttagatgatgctttccaccaaaactttcacatcatccgctcaaagtcctcgcaaatacctttagggattaagaacacgctcatagcgtagtttggtaaagattgggccagaaatttaataagcacttctttttctgctcgacaaaaacttactattccaactctctactctctttctcattttgtctttgagaaaacccaacaccgtgtttttattgtgtttcatgattttgggcagacccaaataaaaaccatcgtcgccagcctcagtcatccccataatagaacaaatgctcccccgagtagccaaagaagtatttttactaaaaaaaaatagatgacttctgacgattcactttctgacctgatgcttcttcaaatttctcaagaagtgacatgatcctttctgctttagcctcaagagcccgataatataggtagctgtcgtcagcaaaaaaacatataagtaatatgtagagtcctccagctacttgacaacctttgatccaccctctactttcatatttttgaataataaatgacagaccctcggcacagattacgaatagataagggaataagggatcaccttgacgaatgccacgagaatgggtaatgggccccaaaaaattcccacccgatgtgatccagtaacggaccgatacaactaaggccataatcaactgcacccatctagaatgaaaccccatcttcagaaacaacgtctctaaaaaaggccattctactcaatcgtacgcctccctcatattaagcttgcacaccatttgccccactttacccttactttttctttagaggtagtgcattatctcaaaagacaccaaaatattatctgtgattagtctacaagggacaaaagcgctttgagtctcagaaacaatgtcttccaaaaacaccttgagcctattagccataaccttagaaatgattttatagacagcattacaaagagcaataggacgaaggtcacccatattttcaagattctttttctttgggatgagcaccagatttgtgttatttaaatcttcaggaatagaggctgaatcgaagaaatctcgaacaagttttaccacatctgaacccacaacaccctaacattttttaaaaaaaactcggtatcataccgtcaggtcctggagacttgtcaggatgcatctgaaatagagttgttctcacttcttcagttgaaactggtgccaacaaatcaacattcatctcttgagtaatggaaggagtaatatcatcaagaacatcactaccatggccacctgaggtagtaaaaagctccgtataaaatctgaccatatgttccgctaaccccgacccccaatcaagccaaccccattctcatcttgaagtttatgtatcatgttctggcgtttacgagcacttgctgaagcatagaagtacttactatttctatcccattccttgagccaaagttgcttggatcgttgtctccaaaaaacttcttttttagttagcagttcaaagagttctttttctgcatttcgatgagcatcaacagacacatgatcattcttccctttcagatgcctaattgaatttttacaggctgcaatttgctgtttaaaattacctgttatctccttaattacccaagccacaagaatgtcaccacacttagatatttttgactgaataggaagcgtgctatactcatgccaacagtctcggacaacttggagacaatagggttctctcaaccaagtattttcaaaacgaaaatgtttcacaccattaaaaatgtttcgaattatagggtccaaaaaaattagacaatggtccggcgaggaagcatgaagattaaacaacttggcaatcaaaaaattatcaagccatgaaagtgaagccaaagctccatcaagtcttacctcagtccaacttgtggtaccgcttcctctttcccatgtgtaaggatgcccatgacgctccatgtcaatgaggttgcagtccgaaagaacctaggaaaacccatggatcagccgctcaggatacgatcgtcccccatgttattcacggtggctggtgacattgttgagatccccgatgaacacacaaggccaatgagcatcttccgaaagttgaagaataagaacctaagtgttctctctctgacttctattaacttcaccataaattccaataagtctccaagtaggcatattcggaacgtgtatgagaatattgatatgtttttgagaaaaatcaataatctctcattctttactatttttccataacatggcaagcccaccactatgtctatgggcctcaatcacaaacagactctcatagtccaatgacaaacgtaatttgattagcttgatttttaattagattttaagattgacatctaataactaatccaatcaaatcagaattcaattttaatatttaatctaatctaattgtaattggatacctaatattttataattaaattaaattaaattaattcagttcaattaaattgaatcgaatcatgtttaccctatatttacaattgtttataaatgatgagaacatttaagtagatagttggatatgtaatgaatggctattagagtgactttacaataattcattgcaaccgtattataaaataaatgaccaccaacacacgtcagccatttaagataacatggacaaattctacctactataacacaacctatggactcaaattattcattttggttacaacatgtctctttatatttttattataatatcaaaatatatatatatatagtgcaagactatgttaggacctagcaaaagttccctattattttttacagttttaatagttaagttatatttttgaacttttgttggaacctgaccattaaatgttaagtcattattcccatatcatttattattggtataatgactttgactaatcaaggactgtcacgtgactattaactaattgacatttaacggtcaggtgcctactataaattgttatttttagtaacaatctcttagtcacaacaaattttgttgtgactaaatgtgactt

SEQ ID NO: 297046 - DNA, 4706 bp, Cannabis indica
aaattgcccaaccaactatgacggcttcttaccaccaaccctatattacccactgaccaacacttccataaactagtactaaaaaaaattgtatgactttaaatttaatattgagttatttacttaagttatttaaatttaacttaagttatttactttttaatattcaggtacataaaatttctctttataaatataattaaaatatatagaattttttagcaaattaaatagatattttgtccttaaaaaaaaatagaaattttgtaaaacaaaagttattctttagattatttttaataagatttttccattatctcactcactatactcactcctgtataagcttctagagcaagaagaagacgactcaattcgaattcaggaagatcaagatggataccaaaccgactgagatcagcagctcaaagatgtttggaggattcaacaagagatacaagcatttcagcccaactctcggttgctccatgactttccacatctacttccctccttctcctcaatctctttccaaaaaatttcctgtaagttaatcattatcttcaattttctcacgtacccatttccatattcttctcaagattggaacttggcatctgggttttcataaagctgcaattttattagatgggtttatgttataaggtgaaattgtataggttttgttgggattattcttactttgttttggttgataattaatggagttgggatgttctgaatttgcatgttagaatttaatccttttctcaaattttgattaaaggaaatttttttcatgaaaattgtgatcttgcccagatgctaaaagaagagaaaatgtagggaattatgactgttatttaccagagattggttaaagcaagttcccaatttctttttagagttacaaattagaaaacatttgtgtaaactatgacatgtttgtgattataatcaatcttgatttattactacaatcagtgagtacaacatctaagctcagaagcttcttgtgtaaattttttgctaattgagtcattttagaaaggattttggaagtgtttttcttggtattgagaagtttttctttccatatttaactatgccagccagcttttgtgtatcacaacataattacatgaatgtaaaagtttgcatttctatcaatgaacaggtgctttactggctctcaggcctcacttgctcagatgagaattttataacaaagtctggagcacaacgtgctgcttcaagtgagagtgttgctctgattgttcctgacacatctccaagtaagcaacttttgtaatgtatttatttttcatgtttgaattggaatgacaaatttcgatagcagcattaccagagctgccaaaacttcaatatattttaacactgtaaattctgtgtttttcttattgctttagagtagcatgcaactattttgagtgtctgttatttggtatttttgcataaaaatgattcggagggacatgagaaattcactttgtacttcacttcttcatcaaagcctcttcgctactctgaactctacacctatttagttctgtcttgtactctctctatttgcttttctagtgccacttttcttgtttttccggtattaagttagtagtaaataagtgaagtggtggattggccattgggaaggaggaatagggcttatctcgcttatatttagttattcgacttttattcttttgtaaggcaaaccattatgtcaaagcaatagactttcttttatcctttcttaatctatctaactgtgtcaaagattctgcgaaacttgtgtttctatagggtaagtaaaaacacatgcatggtttagaaagaaaaacacttggcatctatacccaatatagcctattattgatcagtaaaatttatcagcttatgactgtcttgttatatattttcttgctcaatgcattaagataattcggtagattaaccccacttttctatttcatggtacctcataaaaactgagtacaacctagggaattttgaaacctcatacaaaattagcagttcattttagtcatgccctgactgtggagtatgtcttactgttttttttcttttctttataatttacaggaggtttgaatgtggaaggagaggcagatagctgggatttcggtgtaggtaagccgcacaaagctgattatttttcattctgcataagattttctaacattaaattgttatacgtccttggaaaaacttttgggtgctcgtcttgcatcttggcattgtcttcaatctctataataagcattgagcatgctcatgtcaacttggatgctctcaatgtaatttgaatttcggttatatattatcaacttttgtctacttaggcccaactcctagtatagttctttcttatcaagtgaaattgttacttcatttaaaattttcgtataaaaatatagtgcaattgaagatgccattttctccctaccaatgctttgtttatcatgggcatttggttagcatagtacactgaattatgattccgaaaagaggaaaaaaaaaccattaaattgttttaatgaaaacaatataaagaaaaggtgtacaagctttgttaggaagtgagcttttatcaaaatgtgctaagttatttatctaatcattattttcttttaaccaggtgctggattttatctcaatgctacacaagagaagtggaagaactggcgtatgtatgattatgttgtcaaggagttgccaaaccttgtgaaagaaaattttccacagctcgatacttcacgtgcctcgatatctggtcattccatgggtgggcatggtgctctaacaatctaccttaaaaatctcgacaagtataaggtaatcaccgttgagtgcacttaaaagggttgagattcagctaatcatctgaagttctttgaaaactcggagaaacgtttttctatcataaatcattgtttccatagaacaacttaaaatctgttcttttttttttgggtattttttccgattcttcgtattctagtcagcatcagcctttgcaccaattgtgaatcctacaaactgtccttggggccagaaagctttcacaaactatcttggtggcaacaaagctgattgggaggttagttgctacacaatttaacaaatgcaacatttctcgagttcgaagtgtttatacttgataatataattgttaaaatgcaggaatatgatgccactaaccttgtagctaagttccgtgacgtttcagcaacaattctaatcgatcaggtacgtactattttgtcgaatatttaattttcgtttacacatgactgcagctgtttgtgttgttatgttcctaagttcatcattaaaaacttgttgtgttaaacgagtgggccggtttgatttcggatattgtaactaaagttatcaagtctcaaaagtttttgggctggaattttatcatactagaattactataaataaaaatctcttggaaatagatatatttatttgttctcttcaaatattaggagtaagtacgagtctcatgaccatcggtgagattagcctttaaatttagagtaagtacgaagtgagaacaagcctttcggatgacaacttcggtaagagaaggcacttgcttcgagatagctaatccctcagaagcgtgagcttgcaaaaggctaacacttgggttgcgtgattaggtttgtgtgaagtcatgaaagtgacttaaaaagaatcgaaatttagaagattggatctttctgtgaagaactgcatgtcgttcaggtttaggtagaagaatgtatgtctctatttcatttgagttaagccgatattgcaaattcatgatacaatctacaggagcaaacttcctttaaagtagaaaacaaaattaccttgtctttgttatgacaaaattggctccattcttttcaaaaatatgactgcttctttaatgcagggagaagatgacaagttcttggccgatcagttaatgccgcacaagttccaagaggcttgcaaagctgctaatgttccattgctactgcgaatgcagcccggatacgatcactcttactatttcattgccaccttcatagatgatcacattagccaccatgctcaagctcttaatctcccatgaaggttagcaaaacccggaaacctcggtcgactataagccttatatattctgttttcgtttgtgcaatagttggttttcgggtgagaactatgttatagtgaaaaacaaatcagtccacttgtagtaaaaggatttgctggagatgttcatgtttgttgtgtggattggaatttaagccttgtcagtgttacttttgctatatacatcttcacttttatataactattgtagttattctgaatgctcttctttttaactcgaatcgataatttgaacaaagttcatgtcagattatgttgggttccagattttgtgagcaaatcaaatgcaagaatttcacattaggcaaaacccaaatattagatttattgagttaaattaggcaaagtgaagattagagtagttttggtagggtgcgcctgcctatgctgtagtgcaagacataggcgacactcgagagccccagcagcaagccactgtgatgggctctccccttacaaaaattaatttaatatcgtgtgagtcattgactcacatatcagatatt

SEQ ID NO: 297047 - DNA, 1740 bp, Cannabis indica
ttaggatgttaataaaacatacatggtagtaaatctagatcctggtaaaatatttccaacatatatgtgatctttagagtattttagtccaacttccattgactgaccttccctgatcttttgctttttgttgtgtttggtgtctatgtgtctttctttgggttcaactgagctttagtgtcttgactctagtgttcttgttttttttttctttcaatgttttcaagttgttcactttgtgttatttttattacatgatagtttatctcatttgacttcaccattgccaattttttatccaatagtgttcttgttctttggtcttgaggttgttattttttaaagtgctaataggcttgggctattttctttaaatgggccaaagggtatttttgtcattagattctcttgtggttaataaatatctgaagttaccattgcgttttcactttatttatttcatttcttcctcgttaagtcaaacactcaaccattttgtggtactgttcatcttctttgtgtgtcttcttaggtgttttttttaaggttcaactatggggaaaaaagtgtgccgtaaagtcaaaccctcgtctctttttggtgatgcttcatcgtcattgttgaaggctgtgagtccctattcctcaccagctgagtctgactcgtccccttacacaccaggccaaggtaaggtctcttcttcttctagcatacccaggcgttttacacgttctatgtctattccttttgctgcaccacgttccaccactatttcccccactgaaccatccatgaaccatactgagtgttcccatccaagcctcatagccctaagtcaaggaaaagagtttcatttggttctcctcacatctttgttcctaagaaagccaaaagttctcaaccaggttcatcctcaaaccctagtgtgtctgtgccaaacgaattgactgggcctttctattcgaatgataagttgcttaagttttaggataatgtttgttttcattctttatggcttgaatattgagttaaactgaaatattttcctaaaatttgtgagttgattgaacaaagagggtggttgttgtctgtcactcatttgcagccgccaaatgagaatctagttagggagttctatgctaaccttaagagagcattttgaacaagaaaagcaaatttttataccttgcttatattcggggaaatcgattttgtttggcccattcaattattatatgtgtcgtggagatcaaaaccatttctaatcatgtcttcattgaggattataagccttcttttaaagaagtagggtctgagatcacaagcaactctgagtctgtctagaatggaaaggagtcacctgtcacagttgtaacagagttttatagagttcttcacaaaattacactgtcaaattagtgggcaaatttacacatctctactatcaactatagcatagcaatgtttctatttgcattgggtactggtgtcagtattgatctttcttcactcatgtatgattggataatgaactctactactgctaaaggggtgaaacacacgtttccttatcctagtttgattaatcgtgtggtaaagatggggtttcctttggtgtttgagcacgacaagattttacctgttcttactcttggcgaaagtttctctcctgtgtgtggcaagcctttgcctttatcagttatggatgttcctcctgatggaatttattttaccaggatc

SEQ ID NO: 297048 - DNA, 2743 bp, Cannabis indica
aattcggtttttgtggttaagtgttacaaaccgtaaagttcaggtggtttagccgccaatatcccaaaataaaaatagagggagtggagagtacgtaccaaagatgtagcatcaactttgagctcggtcaaaaagatgaaattcggggagcgtgaccgaatcagggacttcaactcatgaactgtagaggtctgccccaaccctctacagttctaagagatgcctctcatggctcctgtggaggagtagtgatctcctccataggggtatgagagtgggctgacccaaaagatccagagtcctcaaccacgaatgtgccttccattggcctagatgagatcacattttttcctttagtactccactcatccaatccaatgaagtcgctattggataaagagatatcatctgagggcttttccactacaactttagtagcattagctctgacatccgtatcccaggggaagtcacgaataacctcgcgatgttggtggagaagcttccaagggcatgaacaaagggatgtagaggcctcattaacctttctcttcttgaaaggagtggttcttacattagtcttcgaggtaggtagaacccctatgtcaccgccaatggctttaatctcatataagtccaagctaccaaattatttaagctcttgtaaaagagtgtcttgagcttgaaagaaattagacaaagctaactcttcatcgtgatggaagttaacctcttgaccacatatagagctctcattggaaatattaattgcgggcccttcaatcatgcgaatcttattctggttgcaaccagcaaggcccacctctccctcagacggcaaattgagagcgtaaggacccacccccttatcgttaccccttgagcctgtgtgttgcttaaggttgggaatggtcccacgagctgaagttactgcttcctttgccccatttgatccaatgtcaatgttcggcccacaagagaaatcaatagccttgttaatattattattaattgtaaccggccttatagaagaaagagtcggcccaatcttctttctaataagcccaaaactatctcccaactccttttccaaagtcaacggatggtcaacctttttaaaattgatacaaggaaatgtatcaggcgcctttcgtgtatcttcttccccaacagaaaacttattacccagtaaggaaacattaggcgtgcgattggcagtgagccgtttgggaacccacgcagcctgtctagccgtccttcccaccaccaatttgcgactggtcacattcaaaggctaccttgagccgcaagtcttcgaaatctatttagtcgagccagtcgcaccgggttccatgtccgctggagaagatgaaatccgattcaaagccagcccagaccgaacccgagacatcggggatggattgaaagtattggcactcgagaacacatccaggtaagatgacgcagtagaaagccacgaccaaacatagggaaaggaatcccttttttcgttttccactgtaataggggatgatagggagaatcctcttctttgatgccacaatcgtccacaattatagtaaaagatgccaagtctctcatatttgaactgtagccaacgatggttacccgattccaactcaaaataacaaccggatgaaagaggtcgattaaaatctaactcgattaagatcctgagaaacctactccacaaggctggttttccttcatccaacgcaacagtggtcaccttgccagcctttccccccaggatattgccattagcgatagaaaagtagtccctagggaggttgtggatttgtaactagattctcatagtggtgaagttgacagagagggacttcttaggagtccaagcctgaagtatcatggagtagccgcggacacaccatggtccgttatccagggccaagaacaatcctcagcacgagcgaaaccaaactcaaaacagtttgggttgttagtgttctcattcaaggaaacaactgtcactttgaactcccaagacttgttaacaaaatccatggtagtagcttcattaactaccataggggcaacaactttcccaaggaggcaaaaggttgataaagccttttgagaagaaacacaatgaattagcttgacaaaggcttccaagcaagtaaaacacttgccattaatggaggagttggtggcattaactattgccataacaaacagcaaaagacaagccaacaaagcaccaaaaccaaacaaaccaaacaaccccacaagtactactaccaaccccacagaccacacatacacaccctcaaagcagacacacagaaaagaataaatacacccaaataaataggaaacaaatggagaacaagaaagaaagaaagagaaatagaaagagaggaaacaaagacccgagtcaaaaccaaaagagaaacaagaaacgagaaaaaaagacactacactcacaaatccacggcagagatgcacaagaccagaactacaaagggagaaatagtcacactagcacagagggaagaaaagaacaaaggggaggagaagacacaagagagactgatagatgaccaacctctattatgtgaacatcaacaaataataactcaaagacaagagaatgatattttgatgcatttaccttttcttatacatacatataaagaaacttctatattaatcaagctgttgcttaaattatgatgctacgcaagtgcacgcaatcaag

SEQ ID NO: 297049 - DNA, 2686 bp, Cannabis indica
  modified_base (27)..(27): a, c, t, g, unknown or other
ttgactagacaagtacctaccctaggngtatatttctcaatgaaaaatatacaaaatatgactagattacctgcaaagtttgtccatgtttttgtcttcaaccacacggaacaattgttgatataagatcctcaaacacatgctgtgaatagttgtctatctacaaaagatgataatcacaataataagcatacaactaacatcaaagaaagaggatgttaaggatattttcattttcaaaaaaataaataaataaatctttcatgcaacatcatattcaaatttcaaaatatagatagaaatttaaagaatcccaaagtttcacagctctaaattatataactcacaaataaagcactacaaatagaaccaataaggcaattacatatttgttattacagtgactcataacagcttagtcaaggcaaatgaatatatcatcaaacctgtgtgactgccgattctccaataacagtaaaaatgtcttctatgtgctctaaaactttctctggtgtgatctttgtaagagtggttatcagtgaaaatacatgattccgagttaccccgtccttcgcagtgcaggcacactcaactagaactttgatgtttatctcatttcttacattttcctgcaatgaaaggacagaaaaattaaacaaaacaacatcctaaaaaacaaatgagcagttcattcataactccacaagatgagaaactacctttagtggcagactgttgataagcgaagtactaatatcttccaggattattagtagtgtctgttgtatgtaacgcactgtggccgcagtggttttgtaaccatccgaagaaggttgaaccatgtttttatcaaggacaacaaaatggtgaacccattcatctggaaaagtcttgccaatcaggttgaataaaggccccagcagcaaatctctacatgatccaaattgaagctaattaagataagaaagcacttatagaagctcccacaacacaggactgatgagaagtttatgtgctcatgaagtataagattataataaaaatagcatcatcaaacctgttaactatgtctttcttcagtagcaaaacatcaagaaaggagctgagaaaagaaagtgcattttctcctttataaatttcatcaacaggcaaagtggacttctgatctccaactagtttccttttcttcttcccatatgctgaactaatcacacgacctttattcttaagaacatgatcaagcatctgaacaatagtggaccaagtaatctgatacaaccaaaggtgttcaatcagtctccaatgcttcagttgaactgagagcaataaatatgaaattcaccattatgtatactgtaatttaataattatgatgtccagctagttacatacattacattccttgaagacttctatgaaaattagatagtaattaaaggaatttctagacaacttttaagtatctagtggctcttgaagttcaattttttctttttttagcaaattaaagtatattcctgcaaacagaatagtatgtagaacttgtcaggttaagatttgtttcgacaatcagttgcttaaaatggcattactaatctagaagtttttttgttggtctctgcagttgtatgattgtatcttgtctatatggtgtccagcactctttaatgtacttgatcggcctagtttatgtaattttactgtaagttcaaatcccatattagcctccaagtcaaaatgggaagggaaagaggaataagacaataagttagtatattttagtatacacatggcatacaaccatgttctactttaagatcaactgtaccaatataaaaaaataaaagatagaagaaaagagtgtacattcaagcgcaacaaggcttctctggcagcattttgtatatcgccactagaattccgaaacaaaatgacaagttcacgaaacagaagctcctgcatacacaaaaattaaaactccttttaacccatcagtaaaaatcttttctgtcaaaggagcgaagcaaaaataatgacctagaaaaattattctccaagtagtagtccagcagttattacatgcctaaatacagaaacttgaatcacttggctaggattttacttggaaaagaaaacgcttaagaaattaagttcactgtataaacgcttgaaacacttgagcacatgtaataattaaacacttagtacatgacctctctgaacaaactgcagttcatacatatcccccgtactgagagatttagtcaaacctaaaaatgcatcttatcttgaaagctctttagagaactcaagagacttgaaaaaaaaaaggtcaaattctcaatggaatatataatcttttgtttcctgaattgattgcttacaactactttacaaattgaaattcaacttgggaaaagtataatgaattggttggaatcataacaataaagtcctgtgcaacatcatgtttaactttaaccttcaaaactggcgaactttctgaattggaatactaactttacattattttcatcttccagaatttagggaatcaatgtagcatgcttcttacttgttttaatatgttccaacaaaataaagaactataaaggaaggaaaaaaaataccagtaaaaagttttaattaaatgaaactagcttgtactctccttccttttccaaca

SEQ ID NO: 297050 - DNA, 4302 bp, Cannabis indica
taaaatatagttttttttttaaaaaatgttatctcatataattatcccaattaataataggaaattttgatgccaaatgccaatatcccataatttacaaatatatatatataataaataaataaatttctatatttaaaaataaaaacaaattaaagtgaaaaaccctaactaaaccctttctcaatctcacgtctctccctcgtctctctcggctacggcaagccacaacagcacgcagcggctgcgacaggaccaccggttacatacgccgacaatagtgcagcttagaccaaaaggtcagttcttacattatgtttctaatgtaaacgaaacagaactgtccgtacccgaatatctcttagttgcaataagttttgatctattgtttggcatttagagactggtttttatgaatgatagtttatgtattgatttcaaatttgaaaattggtttgctttcctcaactcgtagtcataaccgagtgaaaaatcgtattttaagggatgattggattagaagggaaacaatgcaattatacatgtttaattgagatttgaagtttgtaatgaactgaaatttacgttggccaattagtttcccgttattaatggaggtcttggtggcctcgtcttctgttgacgccggcatcagctgctgggacattcaaaccggcgcagagcagctccgttacaagtcatgcgtgtccccatctcatggccttgtctgtgttggtcgaagcttcctagcgtcctctcagctccgcgaggccaaaaccgcatctggttctattttctactggtcttggacaaaggtttcttcctcttttactcgttctgtgtggataagctctttgattaattgtctttgaattttcactctaaagtagtattgggtggctgttccttttttattttgcagcctcaagtcgaagttaagagttttccagcagaacagatagggccgcttgctgctaacaccgaagggacttatattgtcgggggaggtttgtctggagatatttatttgtgggaggtaaatgttcttgttctttgtttgagtatgaattcgtaacatgattttaactgggttttacatgtatattgatgtataattaaaatgtattattttccaggttgctagtggtaaactgcttaggaaatggaatgctcattatctgggtgttagttgcttggtgttttctgacgatgactcactacttatatccgggtctatggatgggaatattagagtttggtctcttttaatgtatgatgttttgtctagtggctctaattttgtttacgttgtttggacttagaccctgcttaaaacaaagttcatgtctcttgacaaattaattaggatttttgatgattaccgaagacaacaagcaccttttgcatatgaatacaactttatggagcactcatctcgtgtaacagatatcaaagtgggatatggaggcgccaacgcagatatggtgtccgcttcaaaggataaaacatgtaaggtacgacatgatcttcaacaaattgtaaatagtgtgctaatttatttcgtatggtatgatcgatttatgttgtcaaatgggtttgtgttgatgttggatatggtacacattttttatgctgtctttttttctataaagatgtgaatgcaaaacaagttagttggttgctgaaattaatttgggatgggtgactatagtctgtactctatgctttctaaattattaaatataatagtgctcaattttaagctctaatgataatttgtaatttatgctgtgtacagtatgtccatttggctaatcttattttatggttttgtcaatggcattttcatacattcgattgttctcaaccttttaagtttgtgtttatctttggctgtacattttattaggtctggagcttatcaaaagggaaattactaagaagtattgtgtttccatcagagattgaagcaattgtaatagatcctgctgaacgtgttttttatgctggcagtagcgatggcaacatatatgttgctgcacttcatactgagatcccatctagcaaaaatcatgggctatatatcataggctcatttcctaatcaaaggtttgtctcaaaaagattaaatctttatgtttacatacttttcttttcttaaatagtcatttgtttacgtacttttcttttcttaaatagtcatttgtactagagcctattatttcattcagctgacaacattatgttctaaacattcaaacagcaaggtgaattgcttggaatacagcacaagtagaaatatattgatttctggatcagatgatggctgggttcggctttggaatgttagttctcgtaaaaccattggcaagttcagacatgaaaaaggtagatttgttttgtactttctttttttgaaggtgtaacacgatatttatttatttttccagtgcttacgtatctttgtgtatggttgtttcatatttttgcagtttaagctttaagtttcttttatttgacttggaacaggatgttcattgtgctaaatgaatgcaccatttagataactgccaatcattataggcacgtaggagttcattccacatggtttacagaatattttattagagcatgtttacattttctactgtgaactaaaatctctaaccttttctactgtgaagtagtatctgagctttttcatggacttcttctctgtttagaatttgttaattaatctcatagttattggtgttttacatcgagtaataatactttttccccctctgttattaaattgttgggattacctgtattaggccttaacctgtattgcatttattatgttaatcttttttagatctagatgaagattatacaattctaaagtttcaatgtatgctatgctgcaggtcctgttaataatattgttattgttagacagccatatacatgttcacaaacatccaatcgaaagcgcggatcattattaccgcctttggaaaaatatgtaaattcaactgacgacgaagatacagatactaaaactgtcattaatttccagaagacaatcggggattctatggatgccacatacctcagctcttttgtggttaataatcaaatcaaagaacttcaggttttatttcttggcttaaacattgatttactgatactgatcaataatgttattctcccgtgccctttcaaaccgcttctcttgacttgttccttttgtttaatcatcttagcaacaaggttccgccagttctgaaatggagatggagagactaaagcatgacaacaaaaaatcggtgcaaactattcagcagtggaagaaaatgtatggaaatttgcatcagttttgtgtaaatgagctcttggaggaaggtgcagaaccttgcaaacttgtgggttgctcgaacaagggctgaggtttgagacctcggtttcctaatcccaaaatattgtggggttaggcgggagctgtgcataagttggaaagttcccggcttaggcgcagctcttaaattttgcttgagttattttttaacaatgttagttataagaagtacatggttgtagaatgaatgttccttatttataattgttttaaaactttaacaatggcatgttttaccacccaattgagaagggtctttttttgtattttttccactttggcctcgttaattatgggagacatttttatgataatatagtaatttttattgtttataataatatgtttgctaaatttgaagttttatttgatggtggagaaagattattactttatttgattcagcgttttagtttagagcatgagcattgttcaatctcatatattagcaaattaagcttgacactaaccaaataacttgtatgtatgagatccaaattgaagtgtagttactgaactttgatatgtaatagttcttgtctcccaagagcattaactatagtgtagcttaaaatattgctaatcaaaaagtaggattaattaaaattaaaaaaaaaatattagttttagtaaattgacaagatttgttacctcatgtaaacactgtatttgtcttatttttttaatccatttatttatttaattggttggagtagtttataaattaattttaaaaaataatagagtttcaagtagagttgtgcaaaaatgatctaatctaataacaaaccgacatccaataaactcgaccgaccgatccaatccaataaccatctattaacattcaacattaaaattaaaaaaatattatatttgcaccccataaaattataaataca

SEQ ID NO: 297051 - DNA, 2414 bp, Cannabis indica
atgaacaatgaattagaggagactacagaggatgaggttagtctgaattccttatctaatcctttgaaccctcgaatatttcgaatctcgactctacatggtacggagactttggaggtattaattgatacgggtagcaacaataattttatacaagaatcattggcgacacaattgggattgccatcggaagagactaaacgttttaaggtgtatatgggcagtggccattatctgttgtgttcaaaaatatgtagaggagttgaattgatgttgcaagggcatcggtttattgtggatttgtgtgtcctacctatttgcgggttggatgttgtgcttgggatgcagtggttacaaaccttaggtccttgtattcatgaccataaggctctaactatggaattcacatgggagggtaacgttgtgaagttagtaggttcgaaggaggtggaggcgcatcaaatgtctttctctaagctgcacactatgattttagagggagacgtgcgagattgctttcaaatttgcacagccattttagacaacaaggagagtaccgaagcattctgtgaggttcagagcaatcttcccagcaagggattggcattactggctgagtttcgcgatgtattcgatgaaccaaaacagctaccctctcggcgagccatggaccatagaatttttctgcaaccaggaacatctcccattaatgtaagaccgtatagatacccttatttccaaaaggatatcattgagcagttgattcaagaaatgaaggcatgtgggtttattcgatcaagcactagtccttattcatcaccggtcttgttagtgaagaaaaaggacgggacatggcgattttgtgtggactatagggctctcaacaacattaccatcaaggaccgcttccctatcccaacaatagacgaattgctagatgaattgggcaacactcgagttttttcgaagctggaccttcgagcgagttaccatcaaattagaatggatccgagggacattcacaagacagctttttcagacccatgatggtcactacgagtttgtagtaatgccatttgggttaaccaatgctccctccacatttcacgcagcaatgaatcatgtctttcggccatttttacggcgttttgtcactgttttttttttacgacattctggtatgcagccgttcgagtgaggagcatttacaccatctacaatcggtacttcagttactgcgagaccatagtttttatgcaaaactcagcaaatgccagttcttccaagacaccattgagtatctcggccacattgtaacaccacagggagttcgggcagatcctaccaaaactgaagctatggtcaattggccagtcccaacaacactaaaacaacttcgaagattcttggggttgatggggtattatcgtcgatttgtagctcgatacgcaaccatcgctgcaccgctgacttcattacttcggaaggacaattttcaatggaattctgaggcagcagaggcgtttcagcaactaaaaatggccatgattactacaccagtccttcatttgccagatttttccaaaccatttgtcatagaaactgatgcttctaatgtgggaatttgtggtgttttgatgcaggaaggccacccactagcctttttcagcaagaagttgggcccgaaattcataaatgcttctacttacagcaaagagatgcgagcaataattgaagcggtcatgaaatggcgacaatatttacttggcagacacttcgttattcggacagaccacagaagcttgaaagagttactcactcaggtgattcaaactctggagcagcaacaattcttgcataaattaatgggctataaattctccatcgaatacaagtcgggtcgacacaatgctgcggcagatgcgctttcaagacaaccaactgaacggtagtcgacgatacttctagcactcagcatcggctctttcaatttcttggacgagttgaggcaagaaaacttgacatgtcccaacttacgacagttacacaatgagttgcaacaaggaaagggtgatacatcgctgtattcggttcgtgatgggcttctctattatcgaaatcgcctccttatcagtaagcattccaatctcagatctcagttgttatcgaaatttcactcttcgcgtattggaggtcacgctggggttgaaaggacattcatgaggatatgagcaagttttttatggtaggggatgcgtaaggaagtcaagaactttttccaagcctgcccaacatgtcaaactgtgaaatattccactaaagctccttatgctttgctccaaccactaccaatgcctgaaagagtttgctccaactttttcatcgtgggattacctgttgggttttatgctcta

SEQ ID NO: 297052 - DNA, 1802 bp, Cannabis indica
agcagaattactttcttgctgctgcaaacgcgtacagttttttatattttcgtatatacaactgacatttgcaaaaactacggttttttcaattttattagtcctttcaactaccccttgagctattgttttttttttttaaaagaaaaactattttatttattaagagtgaggttggtataccgtacattgtatttcgatgtattatattatatatcatatttttatataactagtactatatttggtatttatttttatgtaaagataaaaatatataatatttttcatataaattaagatttcacataagattatgtatataaaaatataatatatgatacaatttaatataacaacactatttaatacaattaatatggcataccaaaccaatttaatattttttatatagaatttatccattatttatatttatgttgttaaaataattacacattatatatgctatgcacataaaataacaaatgcaacaaacacaaacataatgacaatttattttcttcactcatttttgtagtttggttgaagaacatcctagatttctttgtccctatagtgttcttttcatgacaatattttccaaacacaaaacattcaaattgttcttcataatatgtgtatatataaatttgacacatacttatgtagtaagtcatttttaatgactgatcatgcccattttaaattaaagataattaatttaaattacatactacataaatatatattaaattatgtgtaaatgctttctaatctcaaaacatgaaaatgctttttgctaatataatgagagcatggccccatcaatgaattattttgtgtaatttttgttgaattagtgccttttcttttatgaaatctatctatgtatctcaagggtgtaaaactcgacaaaacacatggtaatgatgatgagaagctcccaatgtaataattgattttttttttttgaaagaatgtaataattgaatttgagacacaatagtaatttattttaactaaaataatgtgctacttttttcttattgaatctcatcatgctaataatataaaaatgtaaaaataattcattggacattttaattaatgcagctttacataaagccccttctcaatattattgcaatcttatcttataatcatatatattcatataacaatgtatcactttattacacatacataatctcatcccatgtgctataagatgtggttgattttaacttcaattccccttttggtatatgtggattcatacaaatttcactttgcatgttcatgttatttttataacaataaatattagtcatgctctagctgtgatttaacaacttctcaattagttaaagttggcaagtgttacaagtcatttaacaatgtagttcttagctcatacttgctcatgatttttagatatttactttgacttatttatttaaaaaaacgttttttaaattttaaataagataagaatgctatatgaccctatttaatgacaaagtttaggaatatttttccaaaagttcatattgttataattaagttgtaatttattgtagaataaaaattattttttgtgaaaccatttttgaaacgggtaagtctatagtacactccctaaaatagtgttttaatagattttttatctgtttcagcatctagaaaagtagttcaattttttttttcataatcgtgtttgttatagtttttaagactaaattttcagaaaattcgagtagtttacaatgccaaagataagatttacatattttattaca

SEQ ID NO: 297053 - DNA, 6415 bp, Cannabis indica
aaataaaaatgacttgtggagtgcgtagattttaataacaaaatcacgtaaaaatctttatcacttatattagaatataattaagtatatatatatattcattaagtatttattacatattattaggtttcataatgctaaggaaattctaaatttcattgagaatctttgataattaactttgaaacacatttctctacacaaaaaaaaacaaagttgttattatggacaatagttctcaagacattcttgtcgaacaagaagaaacggttcttcgtcctagaaaagagccccaagggactcaacctgtagacaatccaaatacagaaatcggtcatcctcaatgggactttgaaagaactgacaatccatagggcattccagaaaagataaagtaggcaacttacgacctcactagatatgttccttcagcggaattggaaaatcgccaactttggaaaaggttggccaaatccaaccatagaaacgatgaattagagcgtgaagtcgctgcagcacgaacaactgcgaatgatgcacctgtaaaacaaattgagcccccattaaggcgtccatgaggaaggcctcacgaatcgtggactagaagggtgcgacatgccatagttgaagcatagttgaagggaacaatgtgaataatcctacacgtccccatgagtaacaatcagggagtacaagagaaattcccattaaccaagaaacttcgcaaaaccctaatggtcaaagtccaagaggaacgcgaccatatgttccaaaatcgtcccacaggaatgtgagacctccgccaaaacaacaaataactcgaccatcgagtcatcgtaagcttccacgaggcccacaaagggatgacagaagttatatgtcctatctatttgaacgacatcacctaagacgagagactaattctcaaaggacaaattcgaataccgttgtaagtggatcaaggagaagccaaacacaaggccagttctcaaggtctcgtacaagggagacttctcgcaaaagaaagaataatgtcgtctcaataatcataatgaacaaaccaacatgagtaacttacaaagttatcaatcaaaaagtgcctcgctcacaaagtctgaaacttcccaaaaatttaaatgtgatttattaaggcatattttatgaaatatggaaaaatttgaatattaagaaaataaatgagtaagattataatcttactagattaattatatagggattagggattttattataaatgtgagaaataagtgtcatttattaattacaaagattctataaaaatgtgtgggtaatatgcatgctatttatgaattaaaatattttcaggtccagcaactttagaaactcgattggttggccagaagtatcatagtggtattagtttgtgattttgaagtgcgatgaagttttattagtattggttttattgaggtattgcgaggtaattatttatgataagtttacccctagtattggaagtttattcgaaagtgagggtaatttagtcttttgatatttaagtttatttaaggttttgtattttagtgatttctagactagttgagccaattctttaatttaataaactaagaatttcatttaaggattaacataacacaaaaaatttaaacctaagcctctaacctctaattctctttctctctctctctcggctcactcaaaaccttagtgtttactgggattttcagaaaactaattataagaaattagaactgaataaataatttgtagagagaaatagaacaacatttagagttttttacatggttggagcgttaaagagccttaatctacgagtatatattattatgtattttagcttgaaaagtctttaggaatacaatgaatatatgttctttgtttttgcttgagcaaatattgtaagagaattcaacccttaatttgaaggatttgttgggtatttatagtgttcatatgaattatacttagtttctctttttcctctaatggggagtttacattaaaaaagatacaagttaagattgtattcgtgaggcccaacccatgagataataggtgtgttgactaagcaaattgtacacgatcaagtcgtcattatcgtgtcctcactactataacaatgggctttagatgctcttatttttgctggaaattaaaataagggacgacgtaggtttattaatctgctaaaggttataaatctcttatggcatcaattttttggaaataaccgatgtcatagagtaagcctctatgtcgttagttatttctaaataattgacgccatagagtgatctttgttgaacaacgtactcttatctggtatattgattactgataatgtccttattggttatgtgtgtattaacacactaaaaaaatggtgatgctgggtatcacgctattaaacttgatatgtccaaagcttatgatcgggtggagtggtcctttttgggtaaaattatccaaaaattgggattccatggtgattggattggtaaggtgatggagtgtatttcctctgtggaatattcaattctcttgaatggtggtatttatggtaatattcatcctaaaaggggcctttgacggggtgatctcatgtctccatacttgttcctgttgtgtgttgaagatttgacgagtttggtgaatcatgattgtgataataatttgttgtgttggattccatgtggacggtcagggcaactatctctcatctgttatttgctaacaaggtcgactctgaggtgaggtgagccaggcgtgtgccttggacctctgcacgctcgaggtcccgaaattgtaaaaataattcacgaataaaatattaaaaataagaaaataaagtaaaatattgtttagtgtagtggtagagtgtgattttaagcaaagaggtcaagggatcagtttccaacctctacttttacattttttttagaaatatttaatgtgtagctatggaaaattgaaccttagagctcttaagagttttaaatttgtttaccactagtactacaccaaaatattagaattattatcttcataataattaaaatatttatatcggggccctaaaatttaatttttttcttaggccccatatacctaaggacctactgatgataatctttttgtcctaaaggcttcagtcttagcatgtaatagattcaaactcatgctctcttggtatggtgctgcttcgggtcagagtgtgaatttcgagaagttaactgtttgttttagtcctaatgtctctgaggaggataagattggtatgacgatgattcttggggttgttggagtagagtgcacaaaaattatttgggtctttcttgttttgcaaggaccactaagtttgccatgtttaattctatttgaaattgcatttggaaaaagttgaatggttggaaggctaaatccttctgtatggaggtagagagattcttataaaacatgtcattcaatccattctgacttacacaatgtccctcttcaatttgtaaataatgtccattgcatgtgtgcaagatttcggtaagggtgatgatctgaagatgaagatgcattggtaaaaattggaaaaattgtgttgggacaaagatcatggcgttatgaggtttctggatttacatcttttcaaccaagttttattggctaaacatgcttggaggctctatcatgacccttccgctttggtggctttttggttctaaaaggtttatatcatcagaatagaccttttaaggcaataaattcttctaaaagaggctcttatatttggaagaacgttttgtggagaaataaattatttgatgcagggacactttagaaagtaggggatggtagggatatttccatttacgaagacaattggctcccaatggctgttggtttcttagtcttgtctctaaatttacttgggattggtagtatagtggatttattgcaatctaatttcggagattgggatgcatatatgatttatggtttgttttctcctgatgaagcttcttctatactttctgtcccttgaccttcttctccatctattgataaattaatttatggccatgattcttcaggcttctattctgtcaagagtaattactagcttgctactcattgattagagtgtgatagaccttctccttcacatgattttataacatgatggaagaaattttggtgccttaacattcctcccaaaagttaaaatatttgcttggtaaatttcaaacaatcggatcccttctaagtttaatttgatcaagtatggtatgcttactgatggcctttgtcctttgtgtgatgtccaggaagaaaccactcatcagctttgtgtgggtgctctactttttcacaatgttggaaatattgtgagtttaatctcggagaccctttggttacttgtattgattttattagttttatatactttattagaacttgtttccaatctctcaagtgagatcaactcttgttattatgtggagagtttggtatatgagaaataaaatagtgcataacaattctctaatgtctcctgagttggtggccacttgagtctgtgattttttgtgtaattatcagaagcctcttttgagtccaaaagagattgatggtgtgagggccacaaggcatcttgtggcatcttcttttcctcccaccatgcctcgctgggtgccccctttggcgggttttttcaaggtccatattgattcagctttagatgtgtcggggatttttatggtatgggtatgattaatactcatagggttgtctttacctcgactatttggcacatgatttgatattttcaagctgaaattcctgctcttcgtcgtgtaggagtccaatgtcatcgtttgtgtttggaaaatattcaatttgtgaccaactgtattcatgtgcctaataaaattaacaataatgtttttttggactaatcgttaggcttagttgttcgacatattcattataatttgactctctttaataatgtgagtctttctcatttttctaggataaataatgccataatcttgctaagtttgctttatttatggcataaagtttaagagttaagttatctgaattatattcatttactcgtggttgatgacatgaatttttaatgatatcactctcttttatctttttcaaactcttgctttttaatgtggaattttggggtgttcttacaaaaaaaaaaaaaaaaaaaccttcaactttaaataaatatattaattaattacaaaattactaccaatatttatggcattacacaacaaatacttattattgttcttttctttgttctaatacttaattaacaaacaagatgaagaatcaataaaatacaaattttgtatattaaaacactcaaaattaattatttaacaaaaaaaaaaaaaatcaaacacaacactcttagatcattcctaggcatacaaaataaagaaagaaaaagattcaagagatagagaatcttcttcttctaggcttagtgacatctacaacatcttcaatattagaagtgtccttagaaccatgcttgaagggattcaacttaccaagagtcttagacattgaggagaagaaagtctttttagagcctgatcctttagaagacgacgtcgttccgactgtgtgaacacttgtattacccgtactaccctttttcatatctgaaataaaaagcttcattttcataagctcgctccttaaagcctcgttctctcttaccaaagaaacgtctgtttggagttggttcttggtcacagcggtcacagctatgtcactcttatcatccacgcctccgctccttagttttagctgatcgtagtagagagcgtgaagaactatttgaactggtaatcgcttgttttgtgacgcgtgcacacgcgcttcgtacgagagttttagtgggtccattacactgcataccttttctcgttctatctcgtctaagttgggatgagcctgtccaaaaggaaattaatgatcaacattattatttatacaaaataaataatttaacttattcggaattaaaataaaaataatattagatcttgatttattattgcatttggtaaattattttacgttaaaatttattaattagagtagtgatattgtagattatatatgagacttgggtttgtttggtgtaagttgtattagatccaatattaaattgtattttatataagtgatgcacttatggtatctgttaattacaataagtgtggttttataattaattagtgattttttataatatttattaaaataaaataaatgagatttgatattaaattgcatttcgatattatatttcttaggaattatgtgtatcttttagtatttttttatataatattat

SEQ ID NO: 297054 - DNA, 3097 bp, Cannabis indica
gcagccagagtgacgtactcgtgtataagatccattcattccgtgggtgtaaggacccaatggagacttaaagcggggacgttacatgtttgaaaaccaaaacaatggaagaggtacttggagttgagccaactgcttttactgatgatgaaggggttgggaaatttgatggagctaggagaagcccctggaagtcgagatgtcttccaagcacccttaactccacgatcctccttgcagctaatttaatgtcaggtatgggtgacaattcgtgttcgcaggtcgtgttcgtgtcttgtcgagactcatgtataataggcttatgctcgacccgaacatgatccgtttaataattgtgtcaaaaaataaaactcgaatacaatccatttataaatgggttgacacagcatgacacgtgtaacccgtttataaacatattttgtttaaacatgtcaaccaataacacgtttgtgaattattcaacgcgtctataatatatttatgacatgttaaagtactaagataactttaaataggtcattaacaggtcaatttcgtgttagccgtgttaacccgaacacgacatgtttattaaacggattagacgagtcaatccgaacacgacccaaacccatttaaggtaaacccaaacccactaaatctcgtgtgagtttcaagtcgtattatcgtgtctgacccgttttgctagccctaacgtcaagaagatattcatgctaattttgccaacaccctagaagcaaatcaatagtgttaaaaaattattgctcaaggtaactcttctatccctccaatacttagatctggtagttttgtgaggaatttagaaaattcatttgcaagttttgtgagaagtaagaaggttaagattacaatggaggacgttcaagaggaaatttcttattgggagttttcaattgtgtgctacatattgggagcaaacccaccattaatggtactggaaggatttgctagaagagtatggaaagataaagttgataaggttaatctcttagcttattgtgtgttcttaatcagaatgcactctgatgacattatcgagagaggctataccttcttgaataaaaggccaattgttatgaaggcttgggaccccaaacacgaattttagtaaggaggatattcaaacgattccaatttagatgatctagaaattaaatactagggtaaaaattttgttcaaaatttttgtataatgtccctagccaaaatagttggtattggaaaattgtggaatgcaataagagagagttaaacttctcatggcctgcttagttttcacttactcactatacaatctttgttggatacaaattgatggatgatgttgggagtatgttcatcggagtaaggtagtttggtgcaaattaaatatttctaaacacaattttgtcttgtgaatagctattctaaatagactcaagatcagagaaagtattgttcgaagactaaatcataaagtatcagataaaattataaaaacatagattatatgtaaaaatattaagccatatataagaatatgagttacttcactcatcactaaattattttgagatggaatctcataattcttgtcataatattaaaagttatatctctaacgagttttcgatcaacgcctatccaatatttagaaaatagctagcaaagattagttattatgttattaaatgatggagcactatagtggattacaattcccaacacgtatgtaactcattagaaaatgaaatatcacttctagttaggatacaatcttttcctcctctttttatggatggacttataataatattatataagagaaaggataataaagatatgaaaaaaataaaataaaaacatatatattatatacatatataaatcctactttgaagaaatgatcttgaggatgagaaaagatgtaataaataagtatatgaaaataaaaagaacaaaatacaaatacagctttatatgaaattggcaagcaattaatatttaaagataaaagaaaagaaaaatgaaattaacaaacaaaaataagttatattttcccttaaattcatgtcaaagggttttttcacgctactaattaaacacttctcatagtgttatagctagcgttaaaagagtttttcgcagctaaattttttcaattattatttaattattcgtatttaatcatctaattaaacttaaattttggctgtaaaatcttctaaactatcgaactgttaacaaatttaaggtattatttagttaaatgtcatcataaactgcttatgtatacactcttgtacacatgacacgtttatattagtacaactattatttcaaaattcatttaaaattaaataacataaaaaataaaaataaaaataaaaaattacattataaattttgaaataatttattataattttaataataatataaggtgtaccaatataaacgtgtcacatgtacaataatgtacacataaacagtccatgttattagcagttaactgtaaaaaataaataatatcttaaatttgttaacagttaagtagtttggagggttttatcaccaaaatttatgcttagagaattaagtgcaagtataatgatagttgagagagtttaattagttacaaaaatatttatgttaaaatatttaattaattaatgagaattgctaaaaagtactattagtgccttgcaccttggtgtcataccgctattagtgtaattaaatatcaagtcctatataatttaagaaaataacttttaggaaatatcgctaaccagtcgtggccacctataaaaggtgatgggcaccactaatgcatgcccaatagcaatactcttaattaatacatacatggctcgtttggtacgccgtataagggttgtattgtattaaataataagtaacattatgtttggataaaataatgtattgtattaattattacgactattttttttttaatacaatgaatgttctattatttaatacaaaacaaatggtctgtattagcttgtattataatatttataaagaattcggggtcaacactaatctccga

SEQ ID NO: 297055 - DNA, 5050 bp, Cannabis indica
gaaggaaattcagcactctgtcattcacctagttgatctagcagcaggcatgaacagagttggtctgaattgaaactatttcttctttaaaaaactgcagagttcatgggggagcacattgtatttgagcaaatatgcaatctcagttcatgcacctctaggcctgtaataaaaatggagactttatagaaattaatgtaggccaaactctagatgttttcgttttcttttccagttaccactggtggagaggaattaactttcttgttggaatatagaagttagaataaaaaaagtaaattaaaaagaaatgttctcttgtttggttactaagattgagacaaacttttctctctttatttttcagaaaaatgataactcaatttagtgtcatatttttcatataatatgtaattttttttttttttgaattatattcatacattttcctgtatcttattcttctttttatataaatataaaattttctttgataaaattcaagttccaaacaaaacctaaactgcaacagtatttatagcttcatgaaacaatagtgaagtgaaacataccaaattctttataggagaaactcaatcgccgcaatgtctttcttccggaaccatcatctcaagcaaatgcataaaatgatagattgactgaatccatattctctgtcaaaagcctatttctttcatctgtcagcatagttactgttgcattcattcatccaactaatccaagttcctttgtctacgcatattttcttgtgcctgaatcagagatttcagaatttcaacaacagaagaaccatacaagaatgaataagaatactagtgtaaatttgaggactcagaagtaataatttgacataaattatggtgtgcaaacataccaataatctgaaaatatatcctctacacaaaaaaagaacatctacactttacgagccagggtcctctgctttgttgcatgttgtactactttttcctcaactggaaggcccttccgtcttcttacattatcgatgagctttctagcagtgttagggagcacactagagccatcaccaaactcttcaatttcctcctctgttttggggacaaagaaaggatcctcaggaagtgcttcccagtggctaagcacaaggagagcacttgcagccccggaagtccacctcctaagctcatctgcaaaaccgaagctttcagatacaggaacatatgcgtgcaccgtgaacaatggagaaccttcctgcatttcttctttcaaaacccgcgccctccttcgtgaaaggacagcatacataggacccagatattctgtcgatgtgtttagctcgcaaaagtacattgcttccacaagtcgtggtttcttttctaacacagctgctctacaagcatctttaacagctgtcataacctgaccactaaagataccatattgttcagactgcagttgagaggtttcagattcatcaggagctgtcattggagaaataaaagcttcaacaacaaatgccaaaccccacatgggttcgtcacataacgggccagctgctgtagctagctgaaaaccagacactatgctactctcaagacgctctgcctcaacatacagtgcttgagttgattctgaggatgtcttgtctgctatgtcagagagaccggaaccatctacgaatcctagtttgttggatacatgagaggaaccgcgaatgagaacagaggagtcagtacttttttcttcagagtctggagtaaagagaatgttaggaccaatctgccgaggtccaagtgaccagattctcttcagaagctttagccattttccttttagtttttctacccggtccttatcattctcgttccttgacaaaatatcactctccacagcatctatcatgcgttttcttaaggtttctattggagtatcagtgtccgtaagactagatatctgtgttgggaatcttttatttgtatgtccagtcttaccaccaataatatctccaagtaaatcagaactttcatcaagaaccttagttagagaaggtggtagctttatgacttgcacccgaacgacacaccttttatttggagtggtcctctcaacataatctgagctcccaactaaagtttttaaattctcaagagtattaattgcatctccctcaatagtctctttataaaaaacaagaggcggtgaaacttccaagcttactctagcaaacctctccttcaaatccattatgcatctctcaagatgaacttcccctgcagcagacagaacatgctctccccttgaagaaactgtgacctctacaaacgggtctgctctgtttagaagctttaaacctttcattaatgcagttatatctgcaggatcagatggttcaatagcaactctaagggttggagcaacttgaaactccatacttgagaatggccaagagttctttgtggaagaaagagttgcacttttcagaatatattggccgaggcctcttattgccacaacatttcctgcacgagcagaaggaacagagtttaaaccttgacccatcattaggtacacagattgcaactcagcctcctgtacatgattttgcattgactctgcttttaatggatcatatagagctgaaagtacataaatcttctgtcctgaataaagaaccccactaaagatcctcgcaaatgcaagaaagcattcgcccgagtcatcatcttcactttcatcaatataattattgatgaattcaccttgggaattcctttgaggaagcattttcttcggaacagcaaacatcttggatacaaaagcaacacaaggagcttccggactcaaatcacaagcttcaaccgatgctctcacaagctcagcctctgcaagcacatcagaatcaacttcatcaacgacaacctctcttttggggagtaaacgtggaattcgaaatgcctgtgctgtaatagggtcaggcatacacttgactaccattgataacactgcttcagacagaggaagccaacggctcatcactgattgaagtacaattttgggatccttgttttgaagctcccgaggtggtacagacagattaaatgacttaattactttctcaagcatctttttgtctccatcagtatccaaagcagcctggtaaacttgccaaagtggctcaagcacaaactgaacaaacataggacgagctttacttcctccaccaattcccttcttccccacaatcatcttactcttcgcattgaaataccgaggaccccatagcgccttttgcaatgcagctgcacttgccccaagcttggaagcatagaactcggcgaaatcatgtatagtaaaaccccatccatccaatgcacacacaaatgccacatttcccttttggggttgaaaagtatcttcctcatcgtcctctacaaattcatgactctcatctccaaattcaccagaaggcccagcaagtatagaatcaacttctgacaaatatttctccgacttatacgcactcacaatgccattgacttcatgaacaatcctcaacaacctcgtatacgcctccatgggactcaacataagctcactaattaatctatcaatcttgttaagcaccaaacacggggttagcttctcaatccaagcttgccgcaaaaccgcatgggtttggatatgaacaccttcgacggcatcaaccaaaactaatgctccgtcactcaatcgcgccgccgtagagacctcgctacagaaatccatatggccaggggaatcaataaggttaatggaatgctccttataccggagacctattgaggagctcttcatggtaatagcgcgccgctgctcctcatcgaggtagtccatgaaccggagacgcccggcgagcttagggtggagtaagccaccgccggaagaggcgatcaggtgatcggcaagcgtggtcttgccgtgatcgacatgagctaatatgcatatgtttcggatattacgtgtatcggaatcccccatttttgtctaaaaaaatcaatttgaacagtatacaagaaagccgaagcttgaaatcaaaactaggtcaaattcaactaccaaacgaatcaaacaggtttctagttctggaaagatgtttggacggagagaaagaggttacagacaacggtacctctccttcctctcttggtcgaaatcaaaatcaatggaagccgttctcccttagggcaatttgctctttcccacttcttctatttgtatttgcagcaatttatgcaacgcgttcgataaaaattagggctttgcataagaaaagaaagaaataaaataaacaaaattagggtttttcagttggtttttttttttttttaaatgaaagggatgcttttatttaaactttaatatcatccaatacaatccttaacaattcagaaggagaattatccttaacaaaaatacgatcggacaaataagaattacgcgtaaggaaatgcacgacctcattagcagaacgcttaacaaaacacaatttaacatgagacatctatgaaagcaagtgttggcaatcttgaaccaacataccaaaagttgaaggcatgacgacgctggtatgaatggcttgaacagcaagaagacaatcagcctcgagcaaaatattgtcgcatgatttatctttaatccaactgagagcctccttaataccaatcaattctacaatttcaggtgaagatgtcccactcttattaaaagaaccagcttcaataatatctccattacaatctcgagcaacgaaaccaaagccaaaagaattcaatgcctcaaaaatagctccatccacattaacctttaccatgtttatgtcaggtttcgtccagtgctccacctcctttccaatctcaaaatgagacaaagcaggctctaacttacattgttgagcacactgccattgataaagatgagttcttgcagaaagaactgttgggttttatgccctaaataaaactccatttcaatgtaatcaattttatttaacatcaataaagaaacagaa

SEQ ID NO: 297056 - DNA, 5637 bp, Cannabis indica
tgagagctgagaaaccttcagcacaaattagagaaaggtatggcgagattggatctccttgccaaagtcctctactaggaacaattgtgcctaaagtgtagccactactcactatattgtattgcactatggataggcaaccatagataagacgaacccaattgtcagtaaatcccgaccgagtaagcattgcacaaagaaaatgctaatccactctatcatatgctttactcatgtctaatttcaatgccatatagccatctttaccaactttcttccttttgagatagtgcaatatctcaaaagaaatcattatgttatccgtaatcaacctccctggaatgaacgcactttgattgatcgaaataatctctgaaagcaatcctttcatcctagtcgcgatgactttagtgataactttggaaataacattacacaaagaaatgggtcccaactcacaatctgatcaggtttctttttctttagaatcaacacaatattagtattttgcatacactcaggcatctcctctgtttgaaagaagttcttaactgagcttatcatatcactccaaacaatactctagtatttttgaaagaatttaggattcataccattcgggccaggagacttgttggggtgcattcggaataccgcatctttaacttcttagtcaacaatgggtcgaataagacagtcaataacctccctccaaactccatgttcaaccttaaaaactcccttaaaataatccaccattatatcccccaagccattattacaagttcgtaaattgccagaagcatctttcaaatgaataatctgattattacatttacgggtagacactttagcatgaaaaaacttactgttttgatctccttccttcaaccacaattgttttgatctttgccgccaaaagaattctcgttacttaagcatctggaacagttgtcgttttacatccgggaacaattgcttcccttcaatatctctccgccctttaaactgcttcagagccttatagcattccttaatacgagcagtgaaattcctcgtgactcccttgcgccactcctaaagtgcctggccacaatgataaattttttgatcaatccctgccccattcacagaattccaactgttccgaataatactctcacaatcctggtgattgcaccagcaatttttgaatttaaaggacctcaattgggcaacagcttcatggtaatgaacatccagcacgagcggacaatgattagatggtgagatttctaaattaaataattttacagtaggaaatttagacaaccaaccttaattcaccatcgcacggtaaagtctagcctcaatccaatttagagtatctctaatttttttcccatgtaaatggatgtccaagcatgtccaagtcgcacaaaccacactgctgcacaaccccctggaacccctcgattaaccaagtcggatatggattaccaccaattttctctctttggtgaagaacattgttgaaacactaaggagaaatcgatcgagcatagagagtcctaaggatagtccatctttgctgacgtagactttggttaggctcaccgtacatcccagtgaaattatccttcaaaggaaaccaaactgtcaatatgattcttagagaaatagtcaatagccacttcatctttattcttccaaagcaaagcaataccctcactatgtccttgggcctcaacagcaaaagacccctcaaacttcaaacttctacaaattgaatcaatctccaccttattacttagagtttcataagaaaattacattggccctttttttagcaacaagctctttaaggaactgaacattccgtgtcggcccaagcccatggtagttccaacttaatattttcataattattggcgagccccatttccaaggcccaccaaagttggaaatccactaattccttagtacatacccacgtgacccctaatgttttcttctcttactttccttttttattgtcttaaataacaaagttgtcatcttcactgccaataacctccttccccaaattcttgcactgattatctccttaacttcttatcatattatttccctgaccattaacaccctgattaccaccaatattgatggtatcttctccttcattgagcaaatcactcctagcattattattagcaaagtaaactccaacaggactttccgtattcgggttcatcggttcagccataccaggtgcactacctccggtcgccactgatggagtctaacccctggtacggagccatctagctacgatatttttatggttacacggtggttgggctctcataaactcaccatacggtttcaccacttgataaggcggttattgaaagagcctacagcaaaacttttctctatgcccagtaataccacaaataaagcaaaacgtgggcgctcttttatatttaaatgtgacccaaaaccagctgccatcctcctttgttaacttcaatatcctccttaaatgttttgttatatcaagggtaaccctcatatgaatataatccctccaaatgtcaataaaattcttgggatcagattctaagaactttccttctgcattgtccactccccgaacagtcgactctgtcatacacccaggttgaatatcaagaatctaaatccatatatctagagtgtttagcgcaaaagctttggggtccccgcccacgggtaacctttcaatgatcaattgtatcctatcataagtccatggacttctttcaatgaccctttggatgtccacttcgtgataaagctgaaacaagaatcgattattattgagttgtttaacgaacattcccattcccggctgtcatagagaagccaagatattttgcattttgtcaaaatcaatcatttgattagtcagaaacctccccaccaagcaccatctatcatctatgccttcattctccccttccacactcactgccaacccttccaactcttcctcttcaatttgaaagttgaaaacatcctccactgatcctcccatatttctactggtagacgccatcttttaaacacagtaaaacacaaatttctatcacctcaaaatctcaaagaaactattaaaaccatgtcaaaagacaagacatcaattatatttttttatgcttgaattagactcttacatctctaggtattattagacatattagactaaaaaaaataacctaacgacatgaaatcttaagaacaacatatatggatatgatttaaacgatagtaaagacctataaacaatagtgacattagattttatagatgttcaacctcaacttcaataataataacctaattcccttgagtttatattattcaaggtttgtacacaagatatggtagaagtgtctaatgagtttcttgaatacaagaatttacaaagaaattttaggcttacagagaattgagatccccttcactatggtaaaaagatagtatgacataccaatttataataaatgtctgatttcctgcatctttgaattggtggagatgttatgactaactcttcaaggattttagcaataaatgaggatcttgggttaacttggttgcctgctggagataccgactatttactgagttttttgacatcagattataaaagaaaataaaagctaagaaagtaaattcaaaataatgaactggagatgatatttttgttacgtgattagggtgtttaagagctttagttcacgagtcagttgtattgggctaaataatcttgaatgtattacacaagttttttttggaatggcttaagaaccccaaactttggctatagagtttgaatcataatctttcaataccttgcaagaaggtataaggttgtatttacatgctaggatccgggtatgggtatactcgtgacccgctagggtttgtattaaacttggtccactaataagagaaatacacttaatacaataactttgggcccacttaatgagccttagtttgtggggctatgatcttccatacggatggggaccacttgatgttgacagccggtgtgcatgcaccgtattcatacattgttgtgtataagaggtggttgttggataaaaggtatgttccccttagtggtacacacactccttttgtctaacgctgaggataaggccctaagcttgtggaatttggtgtcagaggatcgtcacataagcctgagcttggtttttgggacatttatcggattgcccttctggatgtatcccagatgctcatccagaggggctctgccactccttcttattcgggcaggatgccctttgggatctagagagatccagtcttggatgtaaatatcatgggcctcaaataggattgaggcccatccttccatacagactggtcctgttatcttctttgggcttttcaccaggcattagatgattaatcttgaattgggaatgacacatgtcccccttctaaaaacacggataacatttacccctaaggtgtcgggacttaagagttgcagaggcttgcagtcttccttccaaattttcatggacacgtgtcaaattgtggaaggatatgatccttccaactcccgtacattaagtggtggataactataaatcttctgattatgttcatgcagatagacttttgcctataaatactaattaattcacccatgtaccacttttgttgagatttccttgtgaatttccagaaccaaatgagttcttgctagtgagggagaaactctacttggttgtgtcagcggaagctcttcaaatggagaagttggtcgccacgttcaatctctaaacggttgaattagttgctcctcactagagcattgatccttacagtgtttgagacatctcccatgactcaaaggatgtcaaggataccaccgtcaagattgtggatgatgagatcaagaaggtcgttaaaacagataaaagatggttggtggactgaaattgacccatccaaatcttatgaacaaggaggaggagctaagatcattaaattgaactttcaattgtatccaaaattatctccctagaaattccgattgcatattgatgaaaataaaaggtctatgattagttactagcagcttgagtccttttagggaaatgccttacagatagcaaacgacattctatgtcgtcccatcaaagtctgctcccaagaaaacctcagaatgatggaatggttatatagttaatgtacaccattactagattcatgaatgtcctgatcatgaacttaagaaaagctagaactattaactaaggtttgtatgtttaataactattctaaagagattaagggtggaccatcttatggtcattaagataagaaagtgtttatgttaacaaatactatttttctaagaacatgactaaatctaaaaacaaagtagcaaagtagaggagatagtttatcatttagttttatataagatggtcccactacctctgttgtattgacacaacagatgaggtcaatattactaatgttcctagaaagaaagtcgtcgtacctcgtcatagtgggagggtttcgacgaacccaccctgttatgacttggaagacaattgtgat

SEQ ID NO: 297057 - DNA, 1613 bp, Cannabis indica
aaagaaaacaaataacgaatgacgaataccattttaaaagtagttaagaattattctccatctccaacaatcaatcaataataacaatgataaatattatattttattctaaaattaaactattaatctcgtagataattatttatctcaatttccttattacaattaattatggtgaaatgttcaataatttaatatttttactaagcattaaattctatgaagacatgttaatctaagttacaaatcattttcgcatataattcatttacttttaggttatattcttcatcacaaataattatacttgtcaaaatactaataaaaacaaatttatcacttaaattaagaatactagactattaggtgaatagaaattctaagaatgatagtagaataatgtaaaacctaatttagtggtcatctaaacaagatcaaacattaatcataaaattaagcatagaagaatataaaattcaattagaaggaataaagtaatagtattaatcaaagcatttgagaaagcatatctcggattttgaaataacctttaatttaaaagaggactacttcataatctcaaacataatcataagcataattataaataaaaatcaaaagagtttaagaagaaaaattaaatgtagatgtagattgtcctcttctcctgagttctctcattcaaaaatgtaataaaaaaatttcttgaaataaactctaaaagcgataattataaaacctaaaataaacttaatttaaaccaaaaattgattttttttcgtaaattgtacaaacatcgtacagactcgagtgcctgggcggagtttaagtagcgcctaggaatagttcctaggttttcattatcacgtgctcagatcaatattttacacataattttttcaatattaattaaaattggatgattcaagatgttatgaaaagttgagaacaagattttaaactttcatgcggagcttcaaatcaagttatgcctttaaaagtgtcaaaaaaatcacaattacattctattaagtcaaattgagctcttctgcctccaccatttaccaccaaaatgtgttaaaatcatgtcaaacagctccaaacgtatgattaaccatcaaatctcctaacaaaataaaatcatattaatcagcaattcaaaaaataaaaataataataataacacaagaccatatttataagctaaatatagacttatcagttgtatttgctaggcttcaagttggttaagttagttaaatttgttattgcttagcttgtaactaattttgttatctagctcgtgtagagctttgtagagtgatccaatagcacagaacctttcattcatctttgtccatctctttctctgtctttcctttcatcttctttcttttcaaacaacatgtctaaaaaatctaatactcttatcataagaccgaataatgcacggttagtaattagtataaataacgattaattagtacaatatcgtactcatcaagataatatgatttaatatagggtaaatactattttggaccctctgttttataaaagaccaattagaccctgtgttttgttaaatgacaaaatggaccatgtattttcta

SEQ ID NO: 297058 - DNA, 2218 bp, Cannabis indica
atcctggtaaaatattccaacacctaccagctacaaacagattcgggagataatctttttatcactcttcaatagattttgccaaagttaaggaataagagagacatttggcaccagtcttcatataattccatctgaggcattctgaaatgtttcgacaagggtgcttctattatccttttcacacatggtttcagatattcttctttcaaattaaatatgaccccactttactttcaggcgagacattctacgaacttagttaattcaacaatttgatcttccaaacatttagttgtggcatcttgggattcacattcgtgaactcattcattagtgtgatttctaagatcgttatcacgaggcattgccttctctcctttagctctttctctcttcgcatttaaaagttcctgaaggtcatttgttgagaaactatcgtctgaaactgggtgaatttcctctatttcatcatcgctccggtcaacataattattggggcagtttttgcttccccgaatggtaggcttttgtgcctgagcactaggcctatcattttgcacaactctacctcacggatgagtaggatagccttgctttggagcattgactaccttctttttctgcagaggttggctggcagcattcgtgtgatcctacagagcagttggagcagacttttttagaggttccctcatgacaccttttcctttgtccctagtgggatcaaaagttccatgatctttaaggtcggtcatttttgttgtattattttcccgaggaacaagatcatcaagaatattttcatcgagaaccacattttctagctcaagtctagcgtctagtctgtttaaggtttcttgcatgcagcgagagaatgcttcttaatctactaatttttgcttagttttagtgagttctttggccattttagcaacttcgaggtctggctcacaataatattcttcttctttatttttcccatcatcttcaggatcgtcactctcagtaccgtcatcttcatttgactcaccttctttaatgatgggattctcatcaacatatttctccttacgttgagtctttatagtaggacaactatttgcttctgatgggtctccatcgactcctgtcttcacctaagcggtaggatctacatcgtccatgggagtgtctccattgccacttccagttttagttcgggtgagtaccatggttgtagtacacaacctttcattgctttctttagttcttaataaaagcaccaaaatatttactgagattttttggaaaccaatataaaatatgtaaaagctaaagaaatagataaatgacaaagaaataagatcagagttttaatgtagttggggcgttaacgacgtttagtccacaagtcaatattattatgataagactagaaaagccttactatttacacaaatatttgaaccctagaattttcctgagcactccatgattgagattctaactcgttgcatgaatgaattttcttatatttatagtgttagggttctctttgtttgaccttgcctactgatggttaattttaatataaaaattagtagataattagggtttactttggaattagacttttaattatgatttatgaaattatggagatttatttgaattctaggtgtgttatttatgttatatatagaatttcatgtttttttattttatgtctggtaacagtggaacgcaacgtttggccaatagagccacattttcatatgatttagtattttagtagtagcggggcaaattagagagacatttggtatgtcaagaatatttgaggtattagatttgattaaaatacccttagatggcaatgttactttttggtgtaagcaagggcaaaatggtcttttgccatagatttgcttttgtcctttagtgaattaaccttaagttaatataatctgattttatcataggctattagataatacatagattatctcatttatctaaaattaaaaaaaagtaaagaattcaaccctatctctccaagccccctctctctttcgacccctcaataattgttattaattgaataagctcaatattaattgggcctaaataaaactatcaacgacgatattttatttttagcaacctagtctatttatacatctagcaattaatgagcttcctatatccatctaagcccaaaagcaaacatataggc

SEQ ID NO: 297059 - DNA, 1315 bp, Cannabis indica
ttttttctccatccttctcacctaataccaaacaatataaaggagatcaacaattctctctattcatcttactctctctcctctctaacctctccatccatcttactctctctccctctcatcgaacatagccttagtaccttaaaaagtgtcttatcattgactagaggtattatttaaaaaaaatattactttaaattatgtaagatttaatatttaaatgtactaataataatataatatattaaataatactatgtacaataccttttagtatttttctttttataattgagcatattgttattagagctactctaatagaaagtgaattatagaatgctgaaagaagtcgacacatttttactagatacttccttaaaatctaaatgaatgtcaagtaaatatatgcttaaaagtggcatccttattatttgtttttagagtatgaaattgtaattatttagcaaaagttatctcaatatacatcccatattaaattatctcaataccaatatgccaattaagtttctctcacaatcactttcttaaattttgacctcttgtttgctatccatatggcagttttcattggacccacaaatgacctgaatatagaatgtgggccccggacccacacaatcatctcgcagactctcccccttactgtcaagtaataaatgaaccatacacactaattaataactgcacatttgagattttgtacaagaatggttagagaaagaaatatcatttctatgatttatagctgtcactttatcattatttgtacattgttaattatagaaagaaaaagaaaaacggcagagtgagtgagtgaggtatgaaaatggaggaaaagatagtacgtaatacaaaatgtagtagttagtgtgagtgatgacgtgttcagttagtgggagtttagagagaaagattatagtattattaggtggcaaaagaagaagagaaaggacagaaatgtaaagacaggttaatgaaatgaagaagatgttggattaaaaatcctttgtgggcacatatgtataatgtatatgctattataaagtgtgatacaaaattaagtgaccaattatgttatgggtatcaaaagggtattaaagtgtcatggaattaatgtgtagataccataagttaatttataatttgttgaggggccaaattataaatacccaagagttattctaagatgactctataaataggtagtggtccccaagaaacactaggggttctgtattctctccttccccatcagagaaaatactctagaaaatagtgtattcttggaaga

SEQ ID NO: 297060 - DNA, 2457 bp, Cannabis indica
ttttaaaaacaaaaaacagtttttttgttatgatgccaaacatgcacttattttctaataatcaaagttcgtttctctctgataggcttaatttttataatattttcattgctaatgaagttgttaatgcgattaataataggagaagtgaaaagttaggatgggctactctgaagcttgatatggaaaaagcctttgatagggtcgagtgaaatttcctcaaagccacccttctccattttgggttccctgctaggtttgtttctcttattaactgcattcccactgttttctctcaagcttgatattattaaatgcattttcactgtctctttaaaaatcctgatcaatggctgtctctcctaaagttttcattcttctagaggtatcaagcaaggggacccccttaccccttatctttttctattggtttctgaaggcctctttgctgatatccgtgctaaagtgtctgccaatcattttaagagctcttccatttgcagagctgccccttctattactcacttgctcattatagatgctagtttgttgttcactactgttactcctggtacttgtatagctattaaggacatcttagaactctataataatgacattgttcagtctataaactttgacaaatcctccattattttctcccctaacactagctctttacacaaggatgcttgttttatagtactttaagtctgtctaataaagggttcatcagtaagaacttaggtgttgcacaatgtgttggtaggcttaagagttcttcttttctctatctcctacaaagtgtcaattccaagattaatagctagaatggtaagtttttttccaaggctagaaaagagaccctcataatagttgttgtctaagctatttcatcttatgttatgtcatgtttttgccttcccatgtctatttgtaagaatttggagagccttattgctaaattctagtggggttctagtgctaataagaacaaaattcattggaaaaattacctctcactctgtgtttctaaatttttggtggattagattttagatctatcgtccacctaatcatcctatgttagcaaagcatgcttggaggatttttattaaccctttgtcttctttgtccagatttctcaaggctaagtatttcaagaacaatgacttcctccataagaaaatgctttgttctagactctcagaagtgttgccggttctggttcatagtaattaaggagcctttgtgaaaaatagacttctagctcacaatgttcttattttgcaagatcttttataaggttataaaaggaagaacatcacagctagatgtatcatgaagattgacttaagcaaagcttatgatactgttgattggaactttttggagaatttgcttaaacaactctgtttcccttcaaggttcattcaatgggtgatggtttgtttgaatggtactaagtacaatctcttgatgaatggtagaatccaaggctctttcaaggggaaaaagggtcttcgccaaggagatcctatatcccctttgttatttgttttgatcatggattatctaaccaggcttttggctcagaattcttattgcaagggttttgggttccaccctctttgtaagcagttgagacttattaatttttgctttgttgatgatctcttgatatcttgcaacggcaacttgaattcggttaagggagttcaggaggctttcaacaagttctgtgactcctctggcctttccattaacaacaccaaatctcatatatattttggaggagtgaaggaagagtcaaagcatcaaattctcaggttagtccaggttagtccaaatgaaggagggttctttccctttaaaatatcttgtggtccaacttatacttactagatggaaagcatctgattgtggggttattttggataatcttaataggaaactgaatttttgggctagtagaaatttttcttttgcagggagatctcaactgattcattcagtccttagcataaaaaacttttggatgagcttattcatgttgccaaagaaatcactacggctattgataaatattttcgtgatttcctttggggtgttaaaggtaataagagtaagctacatcttccctcttgggaaaagacttgtctccctaagaaatttgggggtattggcttctatgaaggtaagaagtggaacttggctatgatggccaaatttatttgggtcgtttctagcaaaaaagctgccttcgggttagatgggtacccactacaaaattggctttttcccacagtttataactgtcatttatacaattttccatcggttactaaaaccgttggctatgtgggtgtcataaaaatgcgaagctttaaaagacggtttataactgttgggaattttcctaacagttataaactgttagaaaaaatgattttaaat

SEQ ID NO: 297061 - DNA, 1719 bp, Cannabis indica
gtgtggggggggggggggatgttctctcttggagagagatggtcttctatcatctcctctgtctccttgtttttcctgtcccttctagtgcatccctaggtgtgttagtggccttcctcccttcctcttcctttatgtcatttctatttttcctgccttttagtgttgacttcagttttgcctctcttctcaccttttgcttctttctttgtctcgttgatagttggctgcgtgtcctttctctgcacgttgacccgtgtgtgggtatatcctttgttcttgagtgttgtttttgctgtcttttttgtgtcttcttggtccctcctttgcttttcaatttgtcttgtgctgtctggttggtggggttagtgtgtttcgttatttgttttggtgtctactgcctttattgctatggagttggtttgtcatcctgagtcagtggttggtaagaatatttctctttctgaggccactattaatttgaatcgtagtgtctcttttgtcaagtgtctttactccctttgtctacttgggaaagttgctggccccatttctatcgatgaagctagtctcaaaatttttactgagaaggaatggcgacgccatgtccttgttagtttggtcccgggtgttgataaacggtccaacctctttgaactgatctttgaaaatcctgaagatagaaagtgggtgcttgataatggcccatgggtagttaaaggatctcttcttctgctcaaagtttggaatcctctctctgctatctaacaatttttcagttgcttggttgtaggtccagatacataaccttccatttgaatttttttccattgacaatggtaagtgcttgggtgccttgaccgattctgtggtggaagtggatttggatgaaagtaaacccgcttcatggtctaaatggctcagaatccttgttgatatttccatcgagtcccctctattttcaggccggtacatcgaggttgatggtggtaagaaactgtggattcagtttaaatacgaaaaaactgggtgcattcggctacttttgtggacgaatcaaccacctccaccgtggttgcaatttatcaagcccagactccgtctccatcctgaatggcccgagcttccctttgtttggcccatggctcaacgtcggctctgttggaatatgttttaccaggatctagattcactaccatgtctgttgtttaacatcctaaatatgaatttctaaaataatgttaataaacacatataaagtttgagaaaccttacattgggtgcagcggaattaaaatgtctccttccgctcagatctctaacccttatatcctgtctgtagcagagtatcaccaagatctgagcccgaatctccttctcttgaatttggattcttcacagccttacacactatgattgagtaccacttgatgtatgtgggcacttactctatcactatagggttcgaaattatgaagagaaaaagagaagagaagggttcgaatagcatagggaagaaggctcaaatttttgactgaaggcaagtgtgttcatcctcttttaatttgaggccatcactatctatttatagggaccacctatgtttatgtttgaattatttggcattaaaaaaataaaataaatggtaaaatagagcaatagtggccggccataggatgtgggcccccactttgcaattttgccatttttccaactatt

SEQ ID NO: 297062 - DNA, 4807 bp, Cannabis indica
ttatgtagagaatggaaaacaattttgtaaaggcagtatgtggcttcgattagttttttttagtccttttctggggcagtattggagagtgaaatttgtcttaggactttttgctttgctttgaattgtaaccatagttttcctccgctacaagtaaggctttttaatatatagcggggagggttctgtctaagacaagaggatcttttctctttattaaaaaaatgcaatttaacacattattttctatgtgccaaatttaaatcaattttggcacactattggaatatttttttgctaggtgagctatatttagctttacataacttatttgcatctctattgaaaatgctctaatatgaaggtcaaaaaacaatagttgaacagaatttatcaaatgcaattctagtgaagtgaaaaatggaagtcctaaatatagtacagacaaatatttatagggaagctatatttacaccccataaacttatatatataccccgcaaactaaaaacaccatatttcataatttaaaagatgtctatactctatagtaggtctttagttttacctcattttacaaaaaataaaaatagaataaaattgtgtatctcacattaatttatttatgtgtttatttttttgaaaggtaagtgagaatttcattgaaaaggcgataaagcctaatagaataaataactaaataaaaaatcataaaatgtttaatagaatatcaaatataagtttataaaaatataattaaatatacaataagcttaaaatattatatgattttcttttcgataagaaaaatttactgttgtgttgttataatatattttcaaaagattataaatactcaatttaaaggggaaaagttttacaattttaattaaaataggattgggtgcactcagtaagcttaaaattttataaatagaattaaagatttaaagcagtatatttttggccattttacttcataaacatgtaataagaaaacattttgaaatggggtacttttataatattttgtggcataaatataactgtttatatttattttatatcctaacagaaattttatagtgtttacttgaagactcttcaaagaccttaaataaccatcttttagacataattttgattaaaagttatccagaggagaaataaggctgtatacttaagtagtacttcaaactaacaaggaactagtaataataaatctaccagatggcaacacacgcagctaatttttctgcatttgcatccaattttaaacttaaacaaccagaggtaagaattattactactcacttcatgtgccgtaataggaggtgtcgtggacatatttctttgttcagaaggatcactggaatccactgaagcacaagatatgtcttccatattcagttgtaggtcctcaagggattgttctaacttctcaagtaactttgcctgtaggctgtccacctgccaaaatgtgggttttctgtcatcaaatggacagttatatatcagaaatgatactcaatagatattacttcttcttccaatttcagacttcatatgtaatcaaaccacaaaagagaaagatatttgatatgataaaaataaaaaactacaaaaagtaaactataagacatttgagtaataattataagaggatatatttattttatatttccttattccagttacgtataattttatgccaaattgaagtgagcaggcaacaaattatctgaagtaaaatgaagggcttagcacttcattctaatagtgaataaaaattatttaaagtgaaatgcagtacaaaccgggaaatccagctgcttaagaagcactgcagcttcagctcttgcttgtatggattcagaatctgagaatagcttcccctgaaaaaggaaatcagcacatcataaggcagaattttaggctcccactcctctggcatacacgcacatgcaccaaaccaaaataaagaagacagcaaagcatttggaactaaaaatgcaccctttggagaagtcaaaatatcctatagagtggtggattttatggttggaaaggaaataaaagatttttcaagacgaggaaagtgaggtcgagaggttgtgggataatataaggccaaaagttgctctaaggctgcataatgacaagaatttaaaaaagttcctttcctgctgcgagattttttttctttaaaaaaattctctgttcttgatcagggaaggttttactatttttatttcctttcttttgttcaggctttggtgtacagcttttgaacactctttctcattgtacttgctactctaatacaagtagaaagagtaaaatttgagttaaattttgtccaaaataaataactaaagtttttccgagatttggctagacatggtaaaagatagaattatatatacctgcagattctttgtaattacagctattgcttcttcagatgctcgcttacagtcctggaaagatgattctccgtacacctaaaagagaaagtactaagacaaatatcattttgaagtactacagtagccacttcaaaagcaaacttacaagaaaattgcattcaaagtacataaaagtgattgaatcaacactagaaagggaaaggtcatcaatcaaacaaaaagaaaccttaaaaattggcatcgctccagtatagaatctgactgcatcagcatacgcctctgatttgatacactttccaagtctagcaggtaaatcgtatataaactgctcttaacacagacaacaaatctctgtaactcatacaatgtcaaacagaatatttgcatataaaataaaattctcagaatcacaaaataaagggctttataataatttagcaatgtagcttgaaattttgaagtaagtatcaatgaattgctcagtacaaagtgacattgcatgaaacatcaggattttcttgtatccaaaaaatgcatcacctaattttttaaagataaatacaattccatttaaaaaaaactttgagaaaaagggttttgttatactcaattcccagcctgataatcaagaagtcaatccactaggccagggtacaatgcaaaggcgatctaagggacaagtttgaatttctatttgggttaaatgaataaaaaaatgtcaaattattcataactataaattagaacttaagtaagatttgaatttaatattcaaatacctggactttacggagaagattacgtgttcgatgaagtttttctatgtgctctctcttctcaaacagagaagtgttaacgccatcactcctagattgcacggacattatctgaaatgattttggagaccaacattgttatgccctcattttgttaatcttcccctcatataacgaaagaaaaaatagaaatcaaactacaagatatcacttcacatgccttatgaaggagctgttccatatttacttccatgcccacgatattacttttcatcctgttggaattatggaaagaacatggttttaatgaaaatagacatgaaagtttctctgacactagtcattccatcgtgcacatttctcagtagccaactcaaaaaaaaaagttatatttcacaatgaaacaagtcatatatagagttcaaaagattaccttttgattgtatctgtagcactaataaacttgttatagttttcataaactagcatttgcaagtcagtatcaagattctttatctcagctgccatttcaacatgcctttgaagaaggccttccaaattcgatttttgtacctgcacaattgaaaaacttgactccaaattctaaattcaaaaacacaaatgcaaaccttttcgttacaaatactccaaattctatagtttcagttcagatactattttatttcttgattcagctctaaccctagcatcaactgatcaattgttacaaatacattacttaacataagtgaggttgcaaatagagaagaagggagtaccaggagattcatgtactgatcgggatcgaaggaactggtgttaatggcgtcgagagaggcttgcttggatggagacgaggggagtgaaggatctggggcgtagaagctagaaagcagatccctcattctcttggccttatcatcgaggggaacatcggcgacctccattgatttactagttcaatctccgatctcggactttggaagaccggagcagagtgtaccggaactttttacagagaaagagaagctggttggattaacggcgagaccgttgatctctcttcctagtgttttaatttatttttttatttttggaacaaatctcttcttgagaattattcattgtatttttgttttttttttttttttgatactttgtgattgaaaatttgtgcttgttttatataaattgatccgataacaatttacagatctaattacaattgaccattaaatattggatatctatttgtgatcggatcagattggatgttatttttaaatatacaattaaattgtatctaatatttgatgaggtatctgaaaatccaatatatgcaacatccaatcgaactaattaatatttttatttagtttgaatgtgtaattagattttatgttgttataaattagaattaaaccaataaacatacatgaaatacatttaacggatagaaccgatcaaattcaacatctattggattgattagatgattgaaattaattggatcaaattagattataaaatctaacatccaatatataattagatcggatccagatgggcactaaaaatattggatgtggtctaatgaacacc

SEQ ID NO: 297063 - DNA, 1943 bp, Cannabis indica
aaattaagtgtaaccaaaataacataccaagcaaatttttgcttcttaataggagaatttcttaaagaacatataataacgtgtgaaatagaaccgaccgccaaattcagtaataatgtgaaactgaaaattcaattacaatctcatcggtttggatttttcgatttttataaacactctcctataataacgttgagctgatataataaacaaaaaataaaatagtgtcctaaatttttatcatatatctcttttttttaaaaaaaaaaaaatcaaacttcatttattaattagacaagccataaatcccaaagtaaggagaatatacatatatttttttttctttttacagtattcatatatacatgatatttattaagaattaatttattgtacagattcatgctcaaacatgagaattgaagactgctacatagtgtccggggacgattgtgtgtcactaaagagcggttgggaccaatacgggttagcctttggaatgccaaccaaacaggtcataataaggcgtctcacatgcttatctccacaacaagctgtaatcaccttaggcagtgaaatgtcaggtggaatccaagacattagggtggaagacatagtcaccaccaacaccaaatccggtgtccgaatcaaaaccgccataggccgaggcggcttcgttaaagacatctatttcagaagaatgaacatgaaaaacatgaggcatgtggtgcttatgactggtcattacaacactcaccctgaccaaggctacaatcgcaaggcttttcctttggttcgtaacattaattaccgtgacattgttgctgagagtgtgagaatgactgcccagttggatgggatttccggtcacccttttgatggactttgcttctctaatgtcacggtttcattgtctgccattgctgagaaattgcagtggaattgtagcgatgttagtggtgtttcgagtggtgtggttcctaaggcttgtgggcttttgaaggaccagcagaagactaattgttactttcctaatgatgtcttgcctattgagaaggttgtgctcaagaagtgctttgtcaaatgataatcattaatgattgtttttgagtgtttaatttgtgatatacgatataatgtttttttttaaaataaataaattaatcataatacttatatgtggttgtacatgattcatatttataccatgtgtatgtgcgtgcattaatacatgattcatttttagtgcttttatctaaaaaaaacaaataaataataaataaattaataagatgacagatgtttttagtgaaatatattaatgtataatatgtatactatccagtccaccattgttcttaggctaattagaatttttgtcttctgaactttgacgtgtatcaaatcatgccctctaaacttttaaggttgttaaaaataccccctaaactatggagattgttggatttaaggacttttgtctaatttcattcaattttactatttcagtgatcgtttaggtagtaaatcatgctccccagactttgatatctatcaaatcatgcctctcaaactttgatatgtactaaatcatgccctctgaactttcatccatgttagacgttttcactaaaattggaaaaagtccttaaatccaacaatctcaatagttcagggggcatttttaacgacgttaaaagttcatagagcataattttgtacatgtcaaagttcagggggccaaaatcctaattatccttgttcttaatattaaatagtgaaaataaaagcagccagtgtaactttttacataaatattgatcttactagctgttggaatttattttacaaggatcttagatttactaacaagtatgttgtttaacatcctaaatatgaacttctaaaacgataataaacacatataaagtttaggaaacctt

SEQ ID NO: 297064 - DNA, 676 bp, Cannabis indica
acttctattccaaggaagtagtgtaaaggaccaattaagagtgtacttcttgttgagttcagtgatcaaccttttgaatttgttgttattttttcctatcactatgatgtcattgacatatatcaaaacaacaatgatattagtaccatgtttttaaaagaatagagaagtttttgatttggagcctttgaagtgctagctgagcagggtagcttttagcttgtcgaaccatgctctaagggcctgttttaggccatatagtgactctttttagcttgcaaacatactcttatcttccttgtttcttaaatccttgaggttgcaccatataaacatcctcctccaatgagttatttaagaaagcattgttaatatctagctatctaatctcccaacctcgagtaatagtaatggttagaatgattcttacagttgaagctttgataactacattaaatgtcttaccaaaatcaatgccaggtctttgatggaaccctttagcaaccagtcaagctttatacctttgaaatgatccataacagttgaatcattcatgaaatatcaacttgttgttagttttatgctactaaaccaagtacgcaataaaagagtttcatattatctgattatcatcgtaccatatcccaataaatctccaaataagtgtacattaact

SEQ ID NO: 297065 - DNA, 3751 bp, Cannabis indica
aattaatctaaaactgatataggttcaaattaacctaaaataaataatattaatatttatatatatttaaatttatctaaaatatttgatagggttattcatatcaatcagaaaacctcagtttaaattcggactgtgacaatctgaaccactgtagaccgtaatcggggaaaccgtttttggtggtttggttaattcggaccgtttacggcgtaatggttcagttgcggttcgtaataaatagttaacaattattaaaccggaccagaccgtttataataaataattgatttatatatatatgtatatgtataatttaattttttttgtgtcaagttttgtaggatttttatattatgtttgacttttgagaatatttttatattgttatttatatgttatacatatattacttatcatgttaaatatatattttgaaaaataaaattaaaaatttagtaaaaataatacaattacttaaaaaatatgaataattataaattttgcttaaaccgtggttttgaaccaaattaaaccgttcttaagggtttggtttgagaaatttattggtctggtttggtttccaatattcaaaacactgttatactggtttgcttcaaaaattatgaaaatctggatcaaaccaatccatgagcacccctaatatttaatgttcaaaaaaattgagaaaaataaatataaaatttaaaaatattaaaattgaacatacttccaatattaaaaataacaataaaaaaaataataatattacaagtaatatattaattatatatatttaaattaatttaaaattggtataagttgaattaatctaaagaaaaataatattatacatatttaaattaatttaaataaataatattaatattaatatatatttataaaattgactttactaatactattaacagaatatttttatattcttaagttattttattaaaagttaaacaattacattttatatctagaataaatattaatatcatgctgtgttttgtgtatcattttataaaagtgacaataattagtccttatccatatactctcatatacaaaacatctataattaatgcaagagcaaaattttcatattttttaatttttaaatacaaaacacctaataatatatatattcatattatatgattccccccatgcagtattgcagtagattagatcttatccttattcatatttctgattcattgccaccattacatgcatgtctataattagagtgtactatacctatatatatataacatataataataataataataatttataataataaaaaaataagtagtgatctaatttatatatatttgaacattcacgattgggtcggaatcaatcaatatcatttaaagttctttagaattttatttaattaataatttattttatttttgtttttccacacaaatagcttattctcatccatttacttgtatgagttgtaatcctcaccttttgaggttggccattctcactctagctactctctttgtcgatctctataaaaattaaataaaaatcaagaagaaaaaactctcacgtacttcatcaattaattaattcttctccatattatatatcccagatttccaatactataatctccattcacaattttcttcctttctttatattcatacatatataacacaattaaagatgtttagtaatatgatgattcaatttctcagaagaagccatactctttcatcatcaaattttaaggtttatatatttctcttcttcttcttcaaatttccattttttcaaaaattgattaaaaatcaaacaattcatatttatttttttaattttttgacatgaagttgggacgatttggatttgcatctcgagctgcatctttgcctcaacaaacatatgggtaagattaattatattaccagatttcattattttttttccagaaaaaaaaatcatgaataattaataatggtagaattggggtgtgggtaatgattattatcttgtaattaagctgtaaaattgatataattattattatatattaaatttggtgacgtaataaatgggagagcagaaatgtagggggtgatgtggatgaatatgctgacgtggaatgggataaaattggatttggtgcaattccaactgattacatgtacgttatgaagtgttgtaaagaccatgattttgaacatggacaacttaatccctatgcaaatatccagattagccctgctgctggcgttttgaactacggtcaggtaattattagtaatttcctaaattataaatttaatgtatgagttttatctttgaatagttggtactagaaaaaatgtaatgctagtacgttaaaatgggtgtactgatgcaatccttaattgtttcagtatctataagaattttttaatttaaatttttttatttttatagtcgtgtaccttatagttgtttaagacatcctgcaaaattttaagaaatttgaaaaaatttaacacgtcgaaaatagtgtttaaagagtttgttgtacgtgtgatttttttattttatacgcgtgtgaaatagacggtttaaatattgatttttatattgtaaattattctgaatttttcaaaattttacaagaagtcttaaataactataacgtacacgattatgaaaaaatttaaactaaaagatttatatagatacagaagtaattagagattgcatcagtgtatcgtaaaagtagcctatgatttatctttgaattagttttttttttttttttatttttttttgtaaatgattttatctttgtaatagttggtaactagaaaaaaatgtaatttctataattatttaattaatttattaaacacgtcaacctcaataagttgaaaattcgtaggtagaatgatgtcaaagtcaacacaagacatctatctatcctttcgttttttccacgtggccttatcatgttacagcacatagtcaaagtgaaaatgttgagttactataaagagaaccattttatagattttcctttttgtcttttttgggtagtgcgttcactctttttttttttattattatttttaaaaagaattattagtgtatttttaagtcttatataattttaaaaaatattatttatttgaaatattattatagaacatgttaaacatatatatccaataagaatactcatttcaaaatacattcttctaatcagtaattttataaaaattaatgcatcacgttatataaaaaatttagcatttcttattaaattattatacatagctcgctattatttttttttcactaaatgactcaatgttacataagaacatttaacacgtggttgtgcaataaatatatatatatatataaatattttttaatataaaagatgttttcttttactgttggttagttaatatattattgggtaagtttagaaaatctattatatcttttggcacttttgagaattttttaaatatattatgttataattattatttataaatttttagtaataccaatattttacatattttattgtacatattattttttattatatagtaatgaactatttaaaattttattttattatattgtaaattaattcaaaaaaaaaaaaaaattaaaactaaataaactagttaaaattaaaataacgtaaaattaaaaaacgttaaaactaaataaagtaaaaagtaaaaaggtaaaa

SEQ ID NO: 297066 - DNA, 9201 bp, Cannabis indica
aaaaaagaatatattaatttttcaaagcatattctattgaattggttcgcttaaaaatcttattttaatggcccaaaccaaacgtacgacaaaaagcataaaaaaatagtagttgttgtaggcaaacacagcagcagccagagtactgtagcgtaacatttgttttgtgtttgtggatcgttcaccaaaacgcagggtcgtaattctccaccactcaattcaattcccattcttattctgattcttttcaatttcaatttcaacttctcttcttctgtgaaaccatggcggacgacaccaaacccattgactacgtcatggaagctgcttctggtcctcatttctctggtctccgcctcgacggccttctctcttcttcttcccctacctccgcttcttccgcctccgctgcttctcatttcaccgacgccgatgctccaacgcagcccttcgtcatcggtatacattcgatttttcataatttttttattcggtttcgtcatttgcatagttaggttacggatttttatcatcgattgattaggtgtttcgggaggtacggcctcggggaagactaccgtctgtgatatgatcattcaacaacttcatgatcatcgtgttgtgctcgttaatcaggtttattatcttttaattgttgttaattagtactattttatagtaatttttgtgattagtttagtgttcctcattttgtttttttgtaggattcgttttaccgtggtttgactcctgaagaatcagagcgtgttcatgagtataattttgatcatcctggtactcattttatacatttagagttgttttaaattcaatttatatagccctgtagtcgtgtgggttttcttggtgagaatattgtgtgcaaattttgctaattgcacagtgctttcgttatgtctgtagatgcttttgacactgagcaacttttagagtgtgttaagaagctcaaatctgggcattctgtgcaagttccaatttatgattttaagaaacatcgtcgatcttcagatagttttcgacaggtactagaaataggtttacccttactggtgcaaacatttttgggatgaatcttttaacttcttttgtaatcattgatttcaggttaatgcttctgatgttattatattggaggggattctggttttccatgaccaacgtgtccgcagtctgatgaatatgaagatttttgttgacacaggttttatttctttctgtctggctgctattgccattcaatttctattcttgtactcatggtacttggaattttaactatacagtgtcagttattatcaagttgattaagtgcagctcttacttaagacattgtaaaagaaagtgttttgcctactattttttctgttctatgcttcactgctgtattgttggcaattgtgtgtatagatgctgatgtaaggcttgctcgtagaataaggagagacacagtagaaaggggtagggacataaactctgttcttgaacaggtaatttttcatcacatatgtatgtatttttgttttgtgtttagttagaactgtgttatgtgctcttgaatggatgtgtcattcgaaagacttatgtacatttgtcttaatagtgaggtgaactgtaaacccaacttattttacacaattgtttctagatgaatggaatagttaaccagagagatatcttgaaactcctgataatagatgcattgtgtgtgtttggttggcttgatcaaggactgcaaaccttctggtgcaggtgtatcggcgaaagaagatcgaaaattaaaacttctttagaaaatagaaccttcctgagagtgcaaaagtaggtctgggtatttcctttcaccttttaaagaaagaggaaaattagtccaaaaccattacagtgcaacatattgtgatatttaaaaactgacacacaagacagttaattaaagactattaagaaaattactatgccacttaggaatcttatttaaagaagcttgaaatgactaagaatctcgaatatgataatcgcaactaagtaaatggtccctttagcttcactcaataacagaaaaacattaagctgttagattcaagttatttcactttcttatatagtgttttcatattcaatcttaagatgcaaacttgttattcattgtgcagtatgctaagttcgtcaagcctgcatttgatgattttgttcttccatctaagaagtatgctgatgttatcattccccgtggaggtgataatcatgttgccattgatttgattgtgcaacatattcgcacaaagcttggccagcatgacctatgcaaaatatatcctaatgtctatgttatccaatcaacatttcaggtacaatgtctatgttattcatgaaattgaaaatttagatttctttttaccaagtatttttttcttgtactacactaattatcacttggtagtatattaaacaaacaatatatatcacaaatttttcccccttgaattcagcattcaatatagtatataggctaatgattctacttataaatttttaaaatcggtaattttggagaaagagttatgattctattaataagttttatggctaacttttattcgaatattgctaagtagaagtgcctttaaaacagaggtggtgagtctaccatgtttaaaaattatcaagtgtgacactttatcatccttaatctggtttcctgatcctacagataagaggaatgcatacactgattcgggataaagaaatatcaaagcatgattttgtgttttattcagatcggcttattcgactggtagtcttcaacttttaccttcttggcaatccaattttcattatttcattactcatgaacttacaatgatgtttttttaacttttaactcaactctcaggttgtggagcatgggcttggacatttgccattcacggagaagcaagtcgtaactccaacaggttctcagtttatccttaattctttctgctgaatattaatttacttatcttagtgagacattacttcactttgttttatgatgttctgcctattattcatgctgtgtaaataaaatatacccaattggagaaacaatttggcgccttttgacattcagttaattattacagcatcagtatatactggggttgatttctgcaaaaagttatgcggggtttccattgttcgaaggtgagctttgtcacaggtattgatttggtcagttgtagagcattttgacccttcaatatgaaatatgtattgtggtgctgcttcaagtcttatgttgctaagcgtgaccaattttcagatcccttataaataatagttaataattcccaggtccccacctcatcatgctctgtgtttcaacacttgagcttttaactaaggatggtgcctccatctttactattttagtttaatcatctttccttgttcattgatttagtggtgagagtatggaaaatgcattgcgtgcgtgttgcaaagggatcaaaattggaaaaatcctaattcaccgtgatggagacaatgggaaacaggtaatttttaaataattatttgcatttgaaacatgtgtttgggctaacttgcgcctttccaatattctttaacaatttggtaaccaacttattccaacttaagcagcttatatatgagaaacttcccaaggatatttcagagcgtcacgtgctgcttctagatcctgttcttgctacaggtgaagtttcaatttcatttatgcttatctttctttggatatgcttgcactctatttttcatttttcttttttgaataataattatgattgaaagaactcaatatttttcttgtaggtaattctgcaaaccaagctattgagttactcatacagaaaggagttcctgaagctcacattatattcctcaacttaatttcggtgcgattttattcccgttcctgttttgagaagatttagttttttaatgtttgatcttaacattgactggtctaactgtttgttttcttgacctttaggctcctgaaggaatccattgtgtctgcaaacgatttccatccttaaagattgttacttcggagatcgacgtcgccctaaacgaagaatttcgtgtcattcctggtatgggtgagtttggcgaccgctactttggcactgatgattgaatcactggcacaaacaacaatccagttaaggttgagttggcttatgcaatatattgttcttatatgagaagcaaagtttagagtattttgacacgtaaggcgtcaaatgcatgaatgtgtactgtctgatatagcatacaatacttaacgtaatgtgtttggaagatatggttttacaattttataaccttgccaagtctcgtaggttagcagaaattcagcttgttttatattttcatgctgtacttttcaaatttcatagaaatttggagagaatgtttgcacagctgaaaatacttgttttggaattacattgcctaaagtaccaatcatgttgaagaagctgcttaaaaaaattacaataacctccatattggttggaaacacttttattgaacaaatattctggtttaaaaggttgaggttggagtctcccttggctattggcatttataattggtttttaaacaaatagaattttttttagtctacattcaaatcatattttcttaattttgttgggttgttaaaaaattttgttgagctattttattttccctcctaatcttgacaatgtaaatagaaaactaattaatttaagtaattattgtttaattaatattatttttaatttttttttttgaaaataatattatttttaattttaaaaagttatgtatgataatttaaaattatatattttcactgaataagtttgataaaaaaaattataaataaatttgtaataatttttttatttaaattattattaaatttaaaatatattaacaaaattaaaattaaaaaaaaaatacctgtatgggattatctcacccttaataagataaatgaaattagttggattagttatttagatttccaacatgttcaaatattggacaaattaacatgtctaattcaattcaattagtgcttagaaataaagtaaataaattttgaacaaaagtatttatactttattcaagtcatggtatttctccttaatttacacgattgtgagtgagtgattttattttgactaattctattggcaaagttagtgcggatagttaaaatgacatatattagaaaaaataacacaaataggttggtgggaaaaccacacttgactctatttgaacataagaaatcagtagtggataatttaaaagaaactcatattgaatatttttatttattttgactaaattaaaataatagtgaatgtttaaatacttcaacatcaacatcttgtagaagagtaacacacatatggccaagtcacacatataatgcgtctccatctcaattgtcaccacttcaaaaacgcatttagagatggagatgtcaagtcatggagggattcattttccaatcctataaggttataaatggagaagattaacatacacaatggaacaacataaaatttgatagaaaaaccaaagctctctcacaatggaacacaacatttttacttttgctattaaattccatctagtgcttacaattctcacacttgaatccattcagctgagttttagccttgccaatcttgatggcgatcgtgatcatggtgttgttggttgcttgaaaatggagaggaaagctctcctcgaattcaaacaaggcctaaaagatccttcaaaccaactctcatcatgggttggagaagattgctgcaaatggagaggtgtaggctgcaacaatataacaagacgagtggtccagctcgatcttcgctacatgaattcaaacgacatggatttgcagggtgatggagaagcagtcgagtatccaataggcggtgagatcaacccttctcttcttattttgaaagatttaagttacttagatttgagcatgaatgattttggaggtgtccaaattccacacttccttggctcactagtgaaacttgagtatctgaatctttctggtgcaaactttgggggagccattccaccaagccttggaaatctctcgagattgagttatcttgatctcaacaatgtttacttacagtcaaatgaaagtgaactccattggatttctaatctttcttctctaaagtaccttaatctaaatggctggaacttggaaaaggctaatacatattggcttcaagctgttaatatgatcccttcacttcttgagttacacttgtccagttgtagcatttctaacattcctccaactcttccttttgtcaatttcacttctctttcagtcattgatctgtcaaataatgtcttcaacacaaaaatcccaacttggctattcagtctcaatagtttaatctatctagatttaaactccaacaatttcaaaggagtacttcctgatgcaattactaatataacttcactacatacacttcacttgcatgagaatagcctagaaggtcaattgtcaagaaacttggggaagttgtgtaatttgcaaactttgaaactttctggaaacaaatttattggggaaataacttatttcatcaatgatttgtctagatgctccaacaatagcttagaggcattagatttaggattcaatgcactgacaggctatctaccagaatctttaggattcatcagaagtttaaagtccattcaactatggcataactcatttcaaggttcaattccagcatccattggaaacttatcatgtgtgaaggaaatttacctgtcaaataatcaattgagtggaaacattccaataagtctaggccaactctcaacactggttgtgttagagataaaggacaacaattttgaaggtgtcataactgaagcccatttggcaaatctttcaagcttgaatgagctaacaatttataaagattccccaaatgttactttgatcttcaacatcagctcaaattggatacctccatttcaactcacatatattgaaattagatcctgtcaattgggtcctaactttccaccctggcttaaaagtcaaaacaagttggccacagtggtactcaataatgctaggatttcaggggtcattccaaattggttttggcactcaatttgcaactagacaaatttgatgttgcttataatcaactaagtggtagggtcccaaacacactaagatttaataatccttccactgttgacttgagctcaaacctttatgagggtcccctacccttatggtcatccaatattaccatgttgtacttgagggataatcatttttctggcccaattcctccaaatataggtgaagtgatgccttttctctcagatttagacatctccataaactctctcacaggaaccattcccttgtccatcagtaagataacaggattgacaaccttggtgatctcaaataataagctctctggtaaaattcctgatttctggaatgacttatcattcttgtacatagtggatgtgtcaaataacagtctttctggtaccataccaagttcaataggtttccttaacaatatagatttttggtattgtcaaagaacaacttctcaggtgaacttccatcttccttgaaaaattgcagtgagttaattagtcttgatctaagtgagaataagttttttggagaaattccaacttggctaggagaaaaatatatgagctctttgttgattttaagcctgaggtccaactccttcactggaatcatcccaacacaattgtgtaccctttcaactcttcatatattggacttttcacacaacaacatttctggccaaattcccaaatgcattggaaatttgaatggattgaagtctgaactgacagaaaatgatataacataccaaggaaaattgcaaatagtagcaaaaggaaaaaagctagaatatgacttcattctatacctggtcaacagtttagatctctctgataataacttatcaggagaaatacctatggagttaacaagattaatactattaggcactttaaacctatccatgaatcatttgacaggaaacataccatccatgattggagattgtgaaaagcttgaaactttagatctttcaatgaacaatctttcaggcccaataccacagagcatgtcttcattaacatttctgaaccatttgaacctttcatacaataacttgtcagggaatattccaacaaagaaccagtttcagacccttaatgatgcatccatctatgaaggaaatccaagcctttgtggtgaccctttgccaagaaaatgtgatgagagtgaccaacatcctcaaacaccagaagaagatgctgaagaaaaagatggtggggttggtcatgtgtttgaaaaaatgggctttgtgatatgcactgttatgggtttcgttgtgggattttgggttgttttgggtagtttgattgtgaagaggacttggagaatggcctattttaactttgttgacagagtgaaggagagattcctggagtttttgctgccattgtttatcaaaaagaaaatgccttgggattgaaaataacatcaattatgaaataatgtaaaaataaaaaactattcagttatttactttcatgcttctctctttgtgttttctagtctttctttcccacacgtctaattagaaaataaataggaatttttcttcttgaactatgaccatcattgtaaatatctccctctatttacattgtgctcatttttgtgagtatgagttataagtatagttgaagtgggccaaaattaaagaaagtaacataacatattagtcaataagttaatagtaatgcatggacaagtgtaaagcactaaagctttatgctcactacatgtaggtttagtcttcatataataatacgtacctagttagtgcaggttggaagaaatattattgtccttgttaagaaacaaaagtaagagattggtttagtcacaacaaaagtaaataaaataaataataaatgcttgaattataccaaattaatgtttgtgctataatccaaaatgaaacgttaagaaatttgtatatttggcaaattgggaactcttaattttctttttta

SEQ ID NO: 297067 - DNA, 2843 bp, Cannabis indica
aaaattgtaacaccctaactaattaggcatgttaacgtgatttttaataaaacgtgaaaaaaatcttttcccgctccttctctctctttcggtgcctcaccggagctatggcgaaaagggcgaaaatggccgggaaagggaaatctaaggggaaaagaactggtccttcatcctcggatagagtcataaagactagatccatggatgcagtgctaggaattcaggaactggcgattgaggaagatgtggattcaatggaacggtgtcgagatgatgaactctatgctgagagatgcctttcacctgcagattcggagttaagcattcagcgacaaagtggagtacaaaatgatttttcagaatggctctcgattgcaaattgaaatgcacaagatattagcactgggaaaatggtatcacctcctattctcagatctaatatagtccgaaacctagaaaattcgtatgaacttccagatatagaggttgtgagtactggtttgaagaagaagattaagattgattttgaggacatagccgaggaagttaattactggcaaccttctttagtttgctatgtaattggagcaaatcctcctataagtgaaggctttgtgcgaagattgtggaaggaagaagtggtaaaagttggcttacttgctaagggaatttttatcattagattccagagtatggagcaaagagataaggttatgcagcagggatatgttttctttgataggaaaccaatggtgatgaaaccttggaatccaatagatgatttcactaaagaggaagtcacaaatgtaccaacctggatacaattgaaggggctggattttaagtactggggtgaatcatcgttgctcaagatagtgagtcaactgggagagcctttataggttgataatgtcaccaagaacagagatcgctgcaatacccccgagttctaattcaggttagtttggctcaaaactttcatgaaaaattgatttcatagatgaatttaatcatgaggtggaattagaagtgaagtatgaatggattccacttgtgtgccaaaaaagaaaaaaccagaaaaggagcagcaggttgatgaggagggttccaaagagtaaataatggcaagaaagtgatggtgaacaatgaaacagaagagactattgtgaagaacatgtttggaactctagaggatgaaggggcaatcaagattaacacaggaggggagggagatccctcaacctcaaatggatagattcttatgttggaatgtaagggggattaatggccagcagaagcatgatgagattaagcaattgatcttctcgaaaggtgctgggtttgtaagcctcatcgaaacaaaggtccaaaataaaaatatgggaactttatatactagtctttttttggttggtgctttacaaataataatccttggttggataaaggaagaataatagtagcttggcagcctagtgtttactttgtggatattcgatattgctctagccaactaatacattgctatgttgaatcacagcagcaagtggggaaattctttgtgtcattagtctatgcttttaatgatgtgaagaagagagaggaattatgggatgaattagaggaagtagcacacaaaatcgatgagccatggttaataatgggtgacttcaatgagattttgaaagcaaatgaaagaattgggaaaagagctcagagtctaccatcacagagattccgggatagtatggagaagtgcaagatggcggacctgaaattttcagggtcttttttcacatggaacaataagcagacaccagaggaaaggatcttttcaaagattgatcgagcaatggttaacacacagtggttgaatgtctttccctgctctgagccgtttttttgcctgaaatgaattttgatcatagtcctatcttagtaactatttacgaagataaaagctatgggaaaaaaccatttaggtactacaatatgtggaagatggctcctgagtatgacaagctggtggcaaagtcttgtgaagaagagagtagaggctcgaaaatgtttcgaattgtccataagctgagaagatttaaaacagttttgaagcagatcaacagaactgatttttctaaaattcaaaaggcagaaactgcagcaagaacacagctagcagagatacaaggagatctgaaccagaatccagggaatgaagacttgatgatgcaagaacagatggtaagggagaaatatgcagaaatcagcaaggcctatgctagtttcatgactcaaaaagctaaaataaattgggctaagtttggagatgacaactcccaccttttccatgcttctctaaaattgaggagaatccaaaataagattttctcaactaaggatgagtatgggaactggtgtgattctccagacaaagttcaatctgcttttcttgagtattatcagaggctattaggctcaaaaataccagttagaaggaaggtatttcaatccattgtggatcttggcccgaaaataaatgattgtcatagggagatcttattagcagagtacacggctaaggaagtggaatccgctatgttctctattgacaaggataaagcacctggacctgatggatatagaagtgcctttttccaagataattgggatttggtgagaactgatctagtagaagcagttatctcttttttatcatcttggaagattttaaaagagataaatactactacaatcacactaattcccaagacctgttgccctaaaagtgtggtggacttcagaccaatatcatgttgggttttatgccctaaataaaactcttt

SEQ ID NO: 297068 - DNA, 1778 bp, Cannabis indica
ctgtgaatcgtactttctttttcatcttttttatgtatatttgaagttgaacaggtgaatttgaaaataatcagttgtttcatgtgtttcaggcctgtgtcaaacttcgatgaagtttcattccactttattgaatgcatacacaattacttgcagagttccaagtctcgggtaaatataatttctgacatttcattttgaatatgtcaatgtgttatcttgatggcgaatatgcaaatcttacaactattctttatgtgttgatgtttgttatgcttattgaagcagccaggaaatgctgatactcagcctcagtctgcagactctgcctttagcactcctgtgaaaagtgtagcaaatggatttcagatagcaccatccagtcaggtctgagttcatgctaaccagatttcttttcagaatgtggtttttgatgggtaggtttgacatgtttgtgtttttttccttgcagttatctgggcaaattagttttgatgcacaaaagggttgcgatcagttagtacttgactatctgcagctgccttcaagcatgtgagttgtgcactaagattgtctttgtatcatgcttttttttttttgttctttaccaatgtcacccttttcatttttctgatgttgtgaattctgatattgtaagctacaacaattcttgtcacaattttgaattttctcattccaacttgtaatcacttgtttgcctaatcttgattgcagtgggaaggaaaaggggatacatagagatgaactttcccaacagcttaagattcctgtggataaaattatgtactcattctcacctgtgcctatatatttacacatatatataactataaacatgtttagagcaatgtatggttcttcatgcagtttgtgaccaatctaatgtttctcaaatcacatttttgttaattttgccagggaatctattagatctcttgaagatgaaggattgatatattcaactattgatgaatttcacttcaaatcagctgcgtagtgttggtttatcttctgcttggagtacctatctatcagagtctcattacttactgtacatttcgttccctcttcataggaaatctctggagttcttaattattaggacgatctaattctaatggtagagtttcgttacaatggaacatattatatgctctgttttggtgaacttaatgttgtagtgcattgtaaaatgttttctacgttccatccttctcctgagatttgcagtgcaccaaagttagtttgattcggttataaatatcttagttctttccttttaattgaagctaatgactacacaaatactagtacgaaagcatatggtcaaagatgttaaaagtgttaatgattggttattgaatgaatggcttcccaaaacaagctcatgtgctttatgagattgcaaaaagtaagggctttagcccaagttcatctacatatatgcttttttaaaaagtttacactaaagtcaattatattttgaatccaatctagtgtgtaatagttattttaaaggggaagttaggaatgcacatttttctcatgggggtggggctcgtggggacttgttcctaatggggcaaggattctctgtctaaatggggaacgaggtagggacggggattaaattttgtctccgaatgttaaacggggcagggacggggatgacacttcctgtcctaacggggacccgtttaatttattagttttttttattaatattttatattttatatatgcgtttgtattttttt

SEQ ID NO: 297069 - DNA, 2917 bp, Cannabis indica
tacatttctccattaatttatttcaattctaaatattgtatagtaaacgtgccattaaggtcaatattgatgcaaggattttaaatgcacaattcttagctttgcttacgaattggatagtgtggacccatttgtctcagaaaagacttgattcatccttgtttagataaaggtcatcaaaataaatattaaaaaaaaaaaattaaagacctacgtctttgttctgttattaaaaaataaccgaagacaaattgttcctaagagtctcattttttgatgtgattgttttgacaaaaaatgatgaaggattttttagatcaaatttacacagttaaaatttctttgatttcgtgttttttcctctcaaagttcacaatggatcatttctcttggtttctccattttttcaattccttttatgtgaatcttctcttaagtctttatagtatgttctttgcaagtatggttgtgttgttgcgtccttaatgctctaatagacacatgtacttatgagttgttaatttttcatgattagttttatttaaggactatttctttcaaattaatttcgctttatcaaagataaattgtactattattttcattcggccttatttccatccaagttgaggcatggtatattttagctaggcctgacattcatcccatctcaattatatttaaattgtggtatatcgacacttgattcgagatataagctatcttggacccttgatatgttcagctaggagggtgcataaatcatcaaattcaatgacaatcgaccgatcaaattacaactgactgcgaaacattgaatatccaattgtgattggatcagatttgatattatttttgaatatccaattgtatcagatcggatgttggatggggtgtccaacatccaatcaaactaattagtatttttatttagtttagatgagtaattaaattttatattgttatacgtaaaatatatgtatatataaaagttaacattaaaatttactctttttttcttggattggatggatccaatccaatacatactggacctaaaatattggatggctccaatctgatccaaaatatactaagtctaaaatattaaatatataacctcaattaaaccaataaatatatatgaaatacatccaacgaattgaaccgatccaatccaacatccactagatgttggatcgattggatgactgaaattaactagatcggaccggatagtaaaatctaacatccaatatataattagatcggatctggatagacctaaaaatattgaatgtagtccaatgaacacccctgtgttccacccttacctggtccgaaatataattatgtctttgtttgaccaatgacatatcttgccttggcttaattcgagatataatttaggggtttttttacgaaaatattggattttagataaaagtttacaattttactgtcacaccaatttacaaaaatactatttttttataaaacaacttaaaacaaccgtaaaacaacataacagaacaattaaaaacaacagtagaacaactaaaaaataactgtgaaaatttaacacaatatacaatataaaatttatacagtatttttcaaaaaaaatctacctcacagtaaaaataaataaataaaaattaaacctaaaccctcaaaatttctataatttatatctcggcttgatttgagttttgactagtcttggtcaagttgagagtaggcgtattagcttggcccgagcttaatcttatctcggcctaatccaagtaaaatctctactcagactgattcgagacaagttttgtcctttcctattcatcttattctggccgacttatgcaagttttgagtatgatgtgtcatagctctttccacaaatgggtttgcattttatttctttattgggctttttccttcctggatgagctttaccaaaacaaaatgtttttttctcttccccaaacaatggtattcctaagaatctcagtgttaaattgatcactgttttataatttgatcatagtcatagttttattatttatccttaagaatctcactgtttgatgaattaaaatcgtgaaaaactacaactatctaaattaattaattatagcacttctagaataggacagaaaacaggtaagttgaaatatagccattgttttcatcagttaactaaaaatagccttatttcattaccgattataccctctcataaaggtactgttgaaggaggtgaggaaggttttttcatttcataagggtataatcgggatataataaataaaagaaggtataaattaaatatatagaaaagaaaggtaaaaatgaaatagattaaacaaaaaaaagggtatatggtgcaatttctacacaaaaaacgcgttaaagataaataaaagaactaggctcaaaatttaaagaatatgatgtctttttttcaaaagaaaaaaaaaatcagtcatatatatacacaatgtaggccattaatgttttagaattagataacagagctatttacaaaaataggaaaagaaaatacaaattttaatatatatatatatatgtcataaaaatgtaagtatacaaaatatggtatttcttttaaggaaaaactttaaaatatatataaaaaattaaaaagtttacacaggagacgttatcttgtttttatttacaaaaatggccttatattatttaatcctatttcatacagttattaagtttaaaaatagatgcctcgtataccgttcttcttgttccatattttatgcgtgtattatacaattataggctttgagctatatttcagaagcttctctctctctcaaaaacgatagtcacaattttttctttctctttctctctctctgattacttttctagtcactatcta

SEQ ID NO: 297070 - DNA, 4281 bp, Cannabis indica
ctaaccactgagcataaactgcagcaagtttgacaatcggttctgattctaatgtttgctttactattaaaaaaaggactgataccacaagacaaaaagaagcaagcactgtataattggttatcaaacaaaccaagaaaatgtagtcgcatcacatgccataatttattcatacaataaaatccagatccagggactaccccaattacaaaaagcttgttatttctcgaaatttatctataaaattctgcggatagataaatctacctctgaaacaaaagatttaaaattgcctaatcaaagacaaattcatgcatttttcttcacctcggctgacttgattatgtcaatgaactccggctgtagaaaacagcaaaaattagctaaattggctttgtacgcacatatgatagacaccgggatttcacccattgtcaaccgtgattttcttttaagaattttatgttaacgtagctataataaatatatcagatgattaactttcttctattatttttcttaaagagcacacataaatgtcagcagctttgaatggttaccttgagagaagctccaccaaccaaaaaaccgtcaacatcaggctttgcagccaattccttacagtttgcaccgttgacagatcctgaaataagaaggcatttaaataaagtcaaaggagaagaattaaatatttcaactaaatatttagaacagccatgacacaataagcaaactctaaaagcaataaacagattctgcaagctatgaaccgaaaaaatcatttttttttaacttaaagctacacagtgcatcacatattgacttcaagagactgatcattatatcctgccctctcttacgaggattagaacagttaccctcaagccctaaccaaggttttactagtagaccacatcctattcagaataaaattataaacaaatggtgtctccacacatcaaatagtacacagaaacttaattctacttgtagcaagaaaaaattaacctcctgatcaagtaaaatagatagtaacgcacgacacaaatatctgtaaggaatctaattgtacctccgtagataatccgagttgaggcagcaacttcagcactaatgtttgcttgaagccattttctcaattcagtgtgtacctataatgtaaacaaaatttccatgaaacactgacttagttatacaaataaatgcaacttgacaaaataaaattgtcccatgtattacaagcaacaatctcagctaaatatctatgttccaacatttaatggttataacaaacggggtattaattatggcatgcaaaatttagcccaaaaatatcataagctcaccacacttgctggctgacaagatatattctaggactaaagacgcatccagaaatgtttccttaggagcataagcattatatcacgtctatgcagcagttacagtaaggtgcaatttgatagtaaaaagggcttgtgacttacttcctgcgcctgagctggagaggcaaccttcccagttccaatagcccatactggctcataagccaagacaacatcatcccaatttgacactcggtctgcaatagaattgagatacaaaagaaatttactacagaaaatataaaaattgaactagaaattccagtatacataattaggtttataaacagagctctgttcaataagaactggaaagatatactattcaaaaaaacattagaatagtaaaataaaatcatttgttaaaataaacactttagaaggtcaagggagtgatatgataaacactagatgcatatgaaactgcaaactgagtcttataaacgtaactagagatgtacctgcaattgccttggtttgtgctgcaacaacctccaaggttgatcctgcttctcgctgctcaagagtctcaccaacacaagcaatcaccttcaacttttgtgaaagtgcatatgcaaccttgtctccaacaaactgaaatgatgaagtggagtaacttgttattggtgggaaaatctcttttagcatgctagatgaaaatgcattccatcaccatgcatgtcatcataggtacaattatcgcaaaccaaaataaaaggggtaagaaggcaacagtaaacattacctcattggattcacccaatatgagtcttctttcagagtgaccaacaatgacccatgggatatccaaattgacaagcatctctgcactgcatatttacatgcatgttattaattaaaataaatcatactgcactaacacataagtggatcacaaaacatactataatatgccatagccattcattgggcttaaatttaatctgcattgcataatatatcataccatagccattagtctacgtgaaatttaatgaaaacaattatatacccagaatgagcctctgataagaacttgtgcttcaagaaaaaaaaaaatacatttctgcataaatgaatattgaatatgcatttgagtcaatattgcagctttaaccttatccattccaccttaaggtgaacatattgcacaggcataacttttagcatgatacatttatcagagcttgaacctctacctcacacacacattcacccatccaaccaaatgagctcaagtgacacaccttgaatatgcattcgtgaacatagcagcatttgtgttactagttcactcaggtaagtgagtggcaacgcacaagtagaaccatttaacgatatgacacagcaaaatatttatatgaacagtcgattccaacatacctaacctcgccggtgaaagcaccacccttcttaacccagcaattttgtgctgctacatgaaaatctggcctcaataaactcttcactgtcggaagaaacacatacggagggctaaccacaacctctgcaggtgaacaaaaataccatgagtttaaaaggccaaaaacatcacttttgtctcaataaagcataggcaacaatgcagactggtagatctgctatacaaaaagaaattaaagaatcagtataaagttgctcaagctgaaaaccatacctcagttattcaaacatcgcaaatatattatcataaaagcatgtaaatttctttaaatatttacatctgcacatctggctttctgtactaacaaaatcacaactttccataccttcatgacaaagctcctaattttttttctatgctatatttacaaaacaaacacttataacatcacaatagcggaaaataaactcacccacaacatcttgggaaggcacttgagcttcattgagtgtgttgataatcttcttcacctcctcggtggttccattctacaaggtttacgacaattttaaccacaatatttgatacaattgtgcacatacgatcgcaaattaagatcgaataatcaattaagcggtttcagaaaccacattatatcacaaaaaaaatacagatctgagtacagatcgggtaattattcagaatcacatagctttagtaggataatgatcgatggatatcttctcgtatatacaatcgcaaattaagatcaagaaatgttttttcttctcatattaaataggatccaaacagaagaaaaacgttaaagtgaatcatcggatttagatttcattttctaaatttctcggcaatcaatcaggattcagaacaataatttaaaagataatcgaatgagtagcttacgcatttccagttaccgccaacaaagaacttcctacccatctttctcgagagtaacgaatatcgcaaagtgttgtatgagagtgtgtgagtgatgctttggtttttggctttgtttattttggatgacagtagtcagtgcctctcttatataatactttattttcagccacccaattccttttacatttatttaaaaaaataagtattttcatttttatatttgtggatgaatcttgatgccgtccgatatttgaatgaatttactattttagcctcgaatttggaatattcttgaagcatcaaataagctaataggtcaaatgaagggctagtttcgtcaaattaaaattaaataccagatggagagactgtgggcccacaggttatacatgcatgctttgggccttaggcccacggattcttagctgctaaaatgcgtcacacaaaccgtgggtgatgctttttttgttttcaaattgaaaaaaataaagatacccacacacattttttttactagtttttattatatcgtagtgcagaatattctgaaaatttaatttggcatgagactaagagagtgaaagatgg

SEQ ID NO: 297071 - DNA, 2482 bp, Cannabis indica
tatttggatgttcctttcaagtatctaagaagtcatttcaaggccttccaatatgatcaagccatgagttggacatgtgactaagactagatgctttaccaagtaacatttcataaggtattttcaatttcaaaaccctactaggacttctattgatcatgtaacaagcagcaatcaaagctttcccctgaaacttttccccaaaccagaactaatgaagaagcacctaactttgttcagcaaagtcctatttgttctctcggtaataccatttttagtggggtgtgtgcttaacaattttgtgtctaacaatgccatactcagaacacaataagctaaatccagtgttaaaaaattccaagccattatcagttctcaaaacttttagttttctatcatattagtgttctacctcagttttccacattaaattttagcaagtattcattcttatttttgagcaaatacacctaagtttattttctaaaatcatatactatggacaaaaaataatgtttacatgaatgagttccaactatgtgagatccccacaggtcagcatgtacatatactaatagtattttagacttacgtacgcagtagtaaatttcatcatgtggtgctcccccaatatgcatgcttcacaaacaaaccttgtttgtttaattccttgattgcatgttcactcatgtgttccattcttttgtgccacacctccattttttattcttggttctcacggtatcaactttagaagataaaatgatctcaccttacaggatgtataattctattttattttatcttttcatcacaataagtgatcattttgagatcttcatgtgaccatttttatatttaaagttgaagccttcatcttctagtacaccaagtgacaccaaattcctccttaaatttggtatgtgcctgacattgttcaacatttgaatagtgccatcaaaatgcttgattgtcatttcccaattagtacaatgccaccatcaatcttttgatattcaatgaaatttttaagggttgaagacatgtgaaatgtgaaaccagaatcaagaatccactctttagtgattctttgatttgaaatcatgtacatgtcaccatcagaggaacgttggtctgcatctttcgcaattaaaatagaatcttgtttttgatttttatcttctttgagtttattcttgagctcattgcaaaaccttctaatatgaccaattttacaacataaataatattttctgtatttgtggtattttcacttggattttgatctcaattgagatttgtattgatgccccttagaatattctcttctgtttggatccctttctctagcttgatttcttcctctggctatgaacactttatctttcatcctatccttttccttgttcaattcttgttcctttgaattgagagctctaagaacatcatcaagtgtaagggtatcccttccacacttgatcactgtgccttaagttcatggtatgcagctggtagagatcaaaagagaatcacaacttgacttttttcatctacagcatattataaattagttaaacaattgataatttgattgaaggtatcaagattatcatctaacgatagatatgaaatcattttaaagccatataaagaatataaaaaattgattttgttagtaagagagggtttcgtatagatttcctcaaatttaacccacaacttcttggttgtcttcaatcattgaagctttcttctcactgtgttagacatatacattataacattgtaataagccaactcctccaattcctagatctcttctttctttaatttctcagtaagttcctcctttggcttgagtgccttggcaactttttaatgaagaagaatttctttcaagctttccctccattgaccgaagtttctgttccattgaacttctcgagttcaaatcttgctgatatgtactcatatttgaatgcagatcaatctaggatgaatcttggtccttcacgaacctagctctaatttgttggaaattcgtatacaacaaccaaattcattcaatacctactcagatcaaacacaatcaaagaaacactcacagaaacacaaattaatgaatcaaacttaaacaaaaaattgaaaggcaataaggaagacaagtatttatcctgattccggttctagagatcaaattgatacttggtcatactccagtgagagccatcatcactgtaacgtccccgcctcaagcctccattgggcccttacacccacggactaatggctcttatacacgagtacgccactctgactgcttcctggattgatgactgaccctacagaccaacacgagtgttttcagcgtgctttgtcctcactcacacgcatccttggaaattactccaggcaaagcacgcttaactgtggagttctttcgaggtgggctaccgaaaaacaaaatgcaccttgttgatat

SEQ ID NO: 297072 - DNA, 3091 bp, Cannabis indica
aaaagttactaattgaaccctctgttttattaaatgacaaagtggaccttatattttccaaaatagtaaaaataggactctgagttcatttttcaacaattttattttttaatataaccaactataacacaatttttaatacaaacagatacagaaaatgtaattaattttatcataacatctctagattagattattattaagttttatttagacaaaaaattagttcagggtcctatttgtacaattttagaaaatacaaggttaattttgtcatttaacaaaacagagggaccaattaataacttttgcaaaacacaaagtctaaaatagtatttactcaatgttttaagtccaattcatattgtaacatagcattgaaataatggagatcgaatctctcaaaaggagatacagaggattagctccaaattggagtgaatttctataaaatttatgtttatcatttactttagttttattaggccagacagttatagttagtttcagttagttaattactgttactttcagttagttaattcggttgggatgttagttgtacagctgtagtttgttacagctttctgttatttcctttgtactctttctctatatatattgaataagatccttaagcctctgcattgattcaagctcacttttcatctcttcttcttctcaagtagttttttacatttgtgtctgattaattgttttgttcttccactgttattggtttgttaattgtgttatatatttgtagttttgttgattcaatttaaggttgttgaaaacacaataattaatttttatatatataaatactaaatagaacacctttcagtaattattactcttattgatgattactaaagaaataattataaatataaatttaaaaatattaaaaatatataacttaacatcaacttttttaccatatataaaaaaatataaaagatatatttatgttaaaaatatctaatttaacatcaactttttttatatgcctctcaaccaatggaacaactgtaatgcatataatataaaaataaaatatattttttcaattagatagcaacatcaagcattggaattcatatttctcttataatatttattcataagtaataccatttaaaatgcagtgatatatctatcagtttattattattacgcaccatccaatttgggtggccacggtttcttgaggtgcattattcaacagtacagttgtcactttatattttcttttatctgttttccattagtaactaaatgggtatataatattgtcgatcgatggagtaactagattattgtggttgagagtacgtagtaataattcaatgcaattgaatgaacaccaacgacttatattgattatatatatatacataaatagttcccatgtcctcgtacgcaatacatatatacacaaaagaagaaaagaagagtattgtcttttagggcatgtggctgtgtgggtctccaaaaccaccttcaacaatccacgggtcttctctaaacttcttaatggctttttttggctttggacaaccataagtgagtagtactgtgagtgacccacctttacttttttttttcctttttccctcgttggctatacaaactataaaaacttgaaactagctacttcttctatttataattttcattccatctgagtttgatgatactgacatctcactcattccacacatatatcttttatatattcttttctttcttctgtcttataaagaaaagcattagctgacatcagtgcaaaccccacacctgttcgaaccttctccatcaatatatagatacacatatatatagtagaacccatgtaaaattaatatatgtatatttacatgcatgtggccaagtgattttttaaatgataatttggtcaaaaaaatcactatttttctatcaaaattacgatttgtagttattaaactaaaaagcaaatttagttgagcaaataatgtcaaaagtccaaatccaaccggagcattgaaacacatcgctcacgttgttcacctaaacattaaatagacgttaccactatgaaagttccacttcaacagtactcccaaatatatttcatagttatttgcaccatacatatttatagatgagtgttgttattaggcaatgatgtctaataccatttagagataatattttgtgattatattttataaaaattattatatcaaattatatatatgagacacaatactcaattatactaataataatataacaccataaaaaagtactatcttttagcatatagtttggataattatcaataaaataaataacatttgacattaaaactatctttttattttaaaataagactttgcaagtgccatttcactaataacataatttataaaataaatttataaattacaagacaataacatatcttttttggttaatatctctaaaagttatttttagttaagaaaattagatgttttctggaagggtgttcacagaagtctaactctcccatttggaagaagtatcgcggaatgataggtgtctttcggaagggcattcccagatgcctatcatgtccacctggaaaatacaaaaagggctttttgcttcggtttataagtgacatataaagaatttactttggttggagtaatttacgttatagccgtagatgcaaatagtgatattcggttatgaaccgacactaattgaaccgaagcaaaaaaaagtttttttgtcggttcataaccgaagtaaaaaaccagtgtatcgatgctatttgttttttgcttcggtaaaataaaaaaatttggaccgccgcaccaccgcctccatcaccaccatatttatactagttacggattcctgtgccatcacaacatcataaatcataaaaaaaccaaaatcaccatagccctttttcgaattacaccatagtttcgtctgaaccaccgtgcacgtttccttgcaacagaaaaagaagttagatttaaaactatttagaattgagaccaccaaaagagaaagagaaagtgtgtgtgtgtagagagagagagagaga

SEQ ID NO: 297073 - DNA, 3034 bp, Cannabis indica
atgaagaagaagaaaattatgacatttaatcacatatatatacatatgatttttctttctttattaattacaaatcacaattcaaacttacaagaaggatatatatatttatttttgtcattttgttttgattataatttaaagttgatttttgtatggtggttgatcgatcttttgataaataagtattaagattatatatataataatttttatactatgtgaccaatcacaaaatataatatattctagaatttctagtacacatatatatacatataatttctcaagcacaaaatataatattatattctagaatttcttcatatatgctaatttaattttctccctcttcatctctttgtgaaggtgatcctaacccccaacaattcctcttgttattattgttaatcatcacttaaataaacaaatacaagagataaacaaaaatcaatcatgatcttttcaaaccactaaaatattattataaaatactaccaactaataattaaaaatttatatattaagaaaattaatttatatatatatatttatagtattctaaaacaaatatttcagtacatttttatttgtttcgatttttaagttagagtttttcaaatatatgtaattgtttatattgtagttttttatgatcatttgttttaaaaaaatttcaaataatttacagtaatacatataagataaaataattatatctctaataaattaatttaaaccttatttttagtattatagactatttaaaaaatttaaaaataatcctaaataactacaacatacctaattataaaaacaataaaaagcaaataaatatctaaataggaggtagaaagacttactcaaaaacatttaataattaatagtcattaaaacctaaaacaattgttcttgaagacaatagagtaatgatttaaagataataagataaccaataatacaaagaagagtgacaccaccaaacaaaatgtagtgtccaaccatacatatacatacaccctcaattgttaaaaacacatttctatctatcttatgattattaatataattaaatattaaattctacataatctaaaaaaatactttttaaaaaatattagtaactaattagtaattacaaattattatacgaacattgctattagacactagtggtacctattactttctcgacatatcgcgttgggattgactaacgatactcttttaaaaattattatattaaattatatgaaatccgatacttaagtaaaccaatagcaatattaacacgtaaaaaattattagatacattattatacttatcataaggcagtgggcacagggtccaaatgctgagatataaatacacctatatatatatatataagagtgggtccacatcccatatagccaatcaaaatcaaatttgacaataatgatgatcatcatcattatcaactacaacacaaaaataaattccactatatatataatgcccaattctaaaccacaccacactcttaactttacctttcttcttcttcttctccatttttctatatacatatatatatatatagagatctgaaattgaaataataataataagataaaaatgggttcaacaggaatagagacccaaatgaccccaacccaaatatccgacgaagaagccaatctcttcgccatgcaattagccagtgcctcagtcttacccatggttctcaaagcagctttggagctcgacctcttggagatcatagccaaggccggtccaggcgcgtttctctcaccttccgacatagctcaacagcttccgactcagaacccagacgccccggtgatgctggaccggatgctgagactgttggctagctacaacgtggtgacgtactcgctgcgtgagcgtgagacggcggaagaggaagggaaggtggagaggctttatgggttggctccggtgagtaaatatctgacgaagaatgaagatggagtctccattgctcctctttgtctcatgaaccaggataaggttcttatggagagttggtaattaactatacttaatcacttttaattaattaatcatctatttatttaattaatttttatctatacttaatcacttttaattaattaatcatctatttatttaattaattgttatctatacttaatcacttttaattaattaatcatctatttatttaaggcttgttcggtaattattttgttttttgtttttctttattcaccttaacaaaattttataatttgttcttaatttctcattaattaaacagaaaattgattttttaatggttaccgaacactaccttaattaattatttctatttgtaattgttttagggttttatttattttttattattattattagagtaatttacggtataaatacttaattttaactttcagttgcaaataaatacataggtttaataagttataattttagaactttttgtaagtatctggttaaataaattgtcacgtggtaattcctaattggtccaagtcattaaatttttattattttaaaaaaaaattagtttaaatataccaataaaaaaatgacacgtggatataatgacttaatatttaacggttaggtaattacagaatttcagatatgtaacttaagtattagccaaaaattaaacttatgtatttatttgaaattgtgagataaacttaagtatttatgtcgcaaattattcttattattattaacattattattgcttttttaatgtaagggttgttttagttaattagtttggattgattttaggcataattaggggttttctgtttttattattattaataataatttttttatatatataaatttaactaattattttattaagtatctatatatgtattcctttctatttgttgttgttttagttaataagatttgattgattttaaggcataattaggggtgttctgtttatttctttttttaattttttatctgttgttttttttaaaaaaaaaa

SEQ ID NO: 297074 - DNA, 3353 bp, Cannabis indica
attatccaactaatgcttcaaaacctagtttttattctgtcaaacaactagtgttttgagtcttcttcttcttattattttctctctactatttcaaaattctatagtgttcttcacctttaaaattcgagcctttagtgattgagtgcatgcccacccatagcaagttagtcctcaattatagtgtgtaagactgtgaagaattcaaacaactgaaggagtgtcgggctcaaatcttgattatactctgcggcataaaggaacaagggttagagagtaaaatataatccaacactagtctcagagccataataatgatttactttcaaaaaatatggatttaaaacgatgtatgtgtgatttggatgtgattcatattgttctatgtctttattgatgattgtttgatgcttgcaaaatttttacataaaataattagaattttgttctggaattatttttcttggatagtatggaaaaattaagcgatttattttttttacagaacttgattttaattttatttgaattagttatgatttttcgaaaatttgaaaaaaaaaatcaaaaatcgagtgcttacatgcgcgcacagacccccgagtgtcactcgggtgaacgcgcaattagacacagggctctccaaaggaacatgcccaggtgcctgtctgaaggcccatcccgtgcgcggagaggctgcatgcagcccccacgccgagaatcctcagctatgaactcccatacgcacccaatgcaaaaaaaattaatttttcattttttttcatgttttatcatggaatcacttttgaatattttgtgtaattttgtatttagatttttatttttcaaatctcaaatctaatcatcagaataaaattagttaattttagatattagtagattttgaatctgaaaaatggataaaatctatttttttttttacttaattggttatcttatttttaaaatttgattattttatcatacttttagatataaggtcagacattttattttttgtattatttaattaattttataaaatgacatttattgatcgaggtgttggcaaccaaatgaataatgtaataatgagagcttagggataattaatgcaggtagttttttacgtgattttggcattaatgaaccgtagtccatgagtctctgttattaatgagagagtatttcttacagagaatatttttgtgtccatttttctatgtccccttcataatttttgtgagggttatttatagcgattggtgggtagaagaaaatgagtaacttgtagtaggtgttaggtgagattcttgattgagattcttgattgatgcacaaaatagggcatgcataacaagttcccagaaagtacaaaacagagcatgcataacctacgcagtaggttgcgtaggtgttaggtgagattcttgattgatgtgattcttcataatggagtcgtcgcttagcttccttgattatcgtgtaatcgccctaaatcaagtttatgacgtctgacacgtcctcttatgggtgtggccagacatttttcccatgccgcattaaatgcaaaatgattgttcaacccccagcctttataacctgcagcagcttgtccgtgccttggctcccggagaagaagatagaccttttgctcatgtccgggagttggcacttcgactcgttcattttttttcttcaggtggttttattaagtctttgactcttctccagttgacatgtccatgccagccacatgtcacacacatcagttgccacgtatattcggaataaacgggagcagcatttaccccctaagtcttttttagtcgtaggtaaatgagacttgtgagtcgcctccggcaccaataaatgcaatgacacgtgcctcaagcatgtggggaatatttatgatcttcatcattggcctttgttgcttttacaggcaatgattcgtttcccgcttattgacagtcccctccatcaatgtcggtgtcaaaaaggtacttaagcgtttcaaccgccctctctcatcatcatacccattcatcacattcattggatcgaggaatctgaactgttgtgaaccctaaccgtacgatggtatttgatcgacattgcctcacaccccaaatggtctataaaagccaatactttccccaactgggtcatttctactgccatttagtttccaaatttcaaacccattcaacaaaattccagacgcccctgattttcttctgctcttcctcagccgttgtcaggcaaagtattaccaccaccagaagacttcgacctctgccttgttgtctttgtgtaagttttttgtttatacatttctttcatctgctaggccaagtagtgataataaagtgtgtatttatctaatttgcttggctttttttcgaaatgacggccatggtcgtcgctggtgtgatgccccctttgacgggcgtccgatgacttgtgtcttttgttgcaatatattttattttatctgctagtttcgttgtgtatgcattgtttttcttttttctaggaagagggttgagaatgagggtttttcgtacgcccttttttggtggtccgaagtggttatcgtactcccatatttcctttcctttcctttcctttgttgcttggatattttgcacacgatgtctatctttgtgaatcgttggattccttttgacaaccatccggaagggcccccattccccttttttgacttaggatttgatgtgggggctaactgctagatttcttgttgttgtttcaaatgagtgaagtccttcgcgatcttcacacacacggtttctttgggttcgaccaagaaattcttaatcttcaccagaccaattccatgtccacctccgcgactactgaagctaaatcctccaaaaaaaggggccaaagaaccacgacaccttggaggaggttatagagggcccaattatatacaagaagtttgtgtgctattctaacggttgggaggctgacgaactgtattcaaccttgacttgcacctatcaactagagaagattgtcactgttgttgggatcaaattctccggttctggagtttaccaccgtcttcccatagatgaggagacgccaaatcacaactacaatggctttggggcttggagtcagactcatctgatgttaggagctatgcttcccctccaagattatttcattaacttccttatttttgtcgggctttcaccctaccaattgattgcacaagcctatcgcctattgtcaggcttatttattttttacgtagcgaggaactggggtccgccttgtcttgcagaaattttatatttttacgaactactttcagtccc

SEQ ID NO: 297075 - DNA, 2363 bp, Cannabis indica
atttaacagtcaactttagtcaattttaacagaattagatagaaggattatactattccaactgatatattttagggggtatttttaactacacttataaattaaggggcatcatagtatagtgtcataaatacagggactaaaaaagctaattattcttattaatttatcagattaaagtgagacttaatattgaaatttatcaacaacggtataacactgttggatatttggcatcttaaggatcatatctaataataaacatgttatgaaagatgcttataacattgatacatttttagcattttttaattgatgcctaagattggagtgaaaaaaaatgccacaaaaaataccataccataacatcttttatatcttttttttattattattttattttatcataaaatatgaaaatttaaatatttaatatatattagataataatataatattattttaataatttataaaagtatttattattagattattttagaacaaaaaataccaaaaaataatataaaaaagagatataatatatttttttttcagaacaaaaagcatctcatttcttcatgggtcgaacaccaagcgacacctacaagcgttaaaatcttgcaacccacctaagttcaaggaataatcgctaaaagtaaagacgattgacattgaaattgttgattggagccgatattgaaaattgattttattttgtttcaatttgttatatatggacaattttcatatatattttttgacaaaaagcatgtatcttattcattacggggcaaatcatctattaaaatagtttaaaaagtagtaggcacaaacccccagtaccatagccacgaattactgggaaggaacaagcgacagtccccaaacaattagatgccttattcatagattgtttgacaaaaacacaaaaaatattgttaagatcagaaattaaagtacgacaataaaaaataactaaaccaaaaagagttaataaaagaaccaaattttacagagcatcgatataatgcttttccaatccgactcaacaacaacttgccccgtttatagatccaaagtcttaaagcttctttcaatgcaattgacaattttaatattttaagatttcagatgactatagtatttaattttaattttttttgtaatttttgatcgatatatttatgtttgaactttttttttatgaaatattaaactctaaatattttttgttatgaaataaaagttataaaatcaacccaatatttttaattttaaatattatttttgttatattgttgggttaaatcatttaaataccgttaactcaattaatccaacctatatgctcagccctacctaatccttattcgtgttgaaaattaggatttcgctatatgtatgtgatctatatgtctaactcttgttatttgtttatttattttcgaataaaataaaatcatatatatatgtaatgcttaccctcatataaaagtataaaataaagtaacaaaaaaatatattgatgtagttaaaataatttagatagctaaattatatgataaataacttagtaggtaatatcatccacgtacactaattaaagcataattttctcaattacactaaccataattttgatcagagtaatgctaaagggcactaactaagtatcaggtctcatataatttaatataatagcttttagagagtatcgctagccaatcgcaacgcgacatgtcaagaatgtgctaaacatcactgatgcctaataacaatgctcttttgatcatcactagctatggggtagctctgcactcaatatatataactaattaattagtcatatagaggagatgtactagctctaccatgtcattttaatttatttcttttagaaaaagaaaatatttattagctgtaataattttaatcaattaataatagcatgcatgcattatttaaactcggtttaataatatattaataataactggtttgggtattggtttaataatatattaatacgtgctctgtctcctgataataatcaagtagacgaaaattaaaaagatggttgttttaatatatgattaaataacataaacagaaaaaacaagaaaatatttatatttgggctggacatccaatttattaatttaatattttttctccgatcaaaatttcaaaatttattatttgatttattttattagacctcaaaattcaatatataatctaattactatagttgaattgaatccactttttaattggatattaattcaattacacatatctaattttaattttaattaacataaaaatataataaaaaataatgtaaaaattaaatatta

SEQ ID NO: 297076 - DNA, 4921 bp, Cannabis indica
tttttggttttttttgtttttttttttttttaaataaaattaaaataaaataatagttgaagccctttgattttggttttatttgatgggccaatcaactgtatttttgctcttgttgatttctcttttgtagattaagaccctgctttcctctcacactcacacccaaaaacaaggggaaaatgaactgtttgaagtttgcagttgcaggccatcttttcttgttgcttttgataaaactttcattagaaagttctaatgttgtattcttgcaaattttattcaagcctttattttgctggttatatttttctacttcaatatattgttaagtttgttttgccttattggttctagtcaacatgattacataggtaggtgaatagtggttacgcctttcctaggacacccagtttgatttttggcttcattttgagattttattctgagttccaggtgatcatcttactcgtcggtgttgttgattatacaagtttatatttgttgtatatgttatatgcgtgcgtattcttttgaatatttccttattttgtgttgggaaatttggacaacaatttaccatgctaaattctatacctatttttaattattggagctcaaacgctgtgttatcccagatctgtactactcctttaagtttggtggggtttatagaattatacaaacttttgtattgcatctttggtcagatttgagagtccatcatatttttaaatgaaaagtacggcaaacaggtttcaagaatgtgagctggctttttacaatttcttctatctacatgtctacttgtttccctcttgctatatatatatatattattttatttaatgttcattttggttcttttttccattttctggtgattttcagtttttcatttaagttctctgcaaaaattcttctcaacatgagatgcctgctttatatggtatttccttcctcctgtttcgttttgtttttccagaaaatgtcaaaatcactaaatggtttttgtaaagtatgcattgataggacaaagcacatgaatatgaatgtttaaataatccaatttggtgactgaggtataattttcttcatgaggttctcacctaagtgtaactgtaaataaattttttacagttgtgattgattgtcgtgaacagtaatataaatgatatagatttgattgtcttgaaaagggttttttacgtacataaatactcaactctctgtatcatttatgtgcagtgtcatgggcagggaactttcaggtttggatatggagaagaagccaaatggtatttctcatgatagagttcatgctgctccgacaacatcggacgacagctctgaagcgaaggactacgaagtaaaggaatgtactgaagagaattcggttattgagaaacatcaagaggagcaagctgttctaggagttaaaagcataaatcttgatgagggcctgtccgaggccaaaaacgagaaatctgcagctcagaagtctagctctcctccttcaaaatcacccgttggcaatggacgtacgaagtgcactgttcctcatcctttcgctctggcaactggaaagcgtggttcttccgcaaaaactgttggaactgaaactgcagcagcatatggtaacagtgtgctatctcctaactcaacaaggaatatacaggtgacatttggcttccttgctatttaacttttatcattctaaattgtatatttatttgtttgtttaaagggaagaaaagaaagaaagaaagagggaaagagattgtaaataatggtgttatgtttttcttagtcgaaaataacattaattgcttaacacttttgctgttgtttccagccaagttctcctttaacatcaaggaagttatggcaatctgaaaacaggaagcatgctgatgaagaagacaattggtctgttgcttcctcgtatcctttgtttgctatacttttgagtataattttgtttttttagagataaataatgaaattattcggatttattacatggtgcttggcttccagcacttgaattctctcattttctgcttttaaaagtaaaatatatgatagagattttctccaacctttccccattctggaacatccttaactaaacatagtactgctgcatctgttcgaacactcaaatccagggttactgttggacaagctccaacttttcgatgctctcaacgtgcagagaagcgaaaggaggtaagaatttttacatataagaaaaaagaatattatgcattcttagtttgaagttgtttttgctgaactgttgtgtaattatatctgaacatagcttttgtctcaatgcaatggcctttatttagttttacacaaaattggaagaaaaacaccaagctatggaagcagagagaagccagtttgaagcaaggaccagggtacatccactggctcttatttttttcgtataaaagttgttttaaattcaacatttttgtatgcagacttagttccttttgttgcaattaaacattagcctgctttcgattaattcttaatgatggtttaatttgtataacgatttcaggaggagcaagaagaagcactcagacagcttaggaggaacttggtgatcaaagcaaatccagtacctaacttttactatgagggccctccgcccaaggcagagctcaagaaggtactctatcgaaatttcttctgggattatccttatgactttcaaagcaacatttccacctaatatttctgaaactgtaaaataaagtcttaaaccataaaataatttgagtaatatttaattgtctaatactttgagctttgtaatatcaaacctgacggtttacatatgagtgcagctgccattgacccggcctaagtcgcccaagctgaacaaaactaaccggagaaagagctgtggtgatgcaatcgttgcttcacacgaggaaaaggaaaggtctgctcggatgcaacgtcacagcatcggaagtaacaaagaaggcaccgcctcctccattactcccaaaagtaaggctccgatcagtagacggagcagtagtgactccaacggtacctggaaagtcaaagaccgatacaaacaggaaaatgatgatacgaagacagctccttctaagattgccgaccaggcgaatgtagacatcgcggttcattcatgaacttgtaggtttttatcttctaattcatgcgaggaagaatataagaaaaaggaaaaacaaaagaaaagaaaaaaggtcttgaatttgcctagttatcttattatggactctgaatgaaaatagctttattttcacgttaaatgactatttcatgtgattttgtgttgtgaattgtatatgttttgtaatcgacattggcactagtacatatgttgtcatatataagaagagtcgtccattttagtatggaccaaaaatgtaatctttcatctaatcttcatgttaggaggagaacttgtttgcttactattctgcttcatttacttagtgttcatccattaaagttttcaggatatttccattattattatgaatgctttatagaacaatattcgatattacaatttatgatttgtgacttgagaattgagataacatggtctttccttgtgtttgtcatatagcattctctaccagattcaactattcaaggcagaactgttgaacaagaaagggcccaatgacatgggctttcgcccattatccaaattcagttcatgtcaagacttttttttttgataaacacgcgttcaagattttgaggcatgaattcatattatggtaaaatctaacactatcacatgcatgctcacactttagcagtcccattaactattgagtaactatgttaaaagcaacctttggaagtttcaactcacaatgagttttattggaatgaattatgaataataaaatatccatgtaaaacaaattggtaaccgttcatattctaaccaattgctttctcttgttcaagaaagagatagacataagaggactagaaccctggcaaatttgaccatggacctatctctagtgactttatcaatcataatgggtttacctaaggtgccaacaagagcactaaggtagtttctaccacaatattacaaacctagaccattaaaacgaacctaaataggaacaatctgaccatttttacagtgtccaaatcagtagtctagggacgaagcaccatcgacttttttatcaaagtggattacacctgtttccgaaaccaaatcacgagtagcttcatcgcggaagttaactagagtgaacccagagtgcattcacactatacgatcaattcccagactaccccaaactcatttaatgaaaccttcgaatacacgaaatgggagattggcccttagaacaacacaaatgatcaaggtttgccagaaagaagcttcggtttccacttcatcaatgtcaatcttagtaattaattaatccccctctttgataggttccatgaaagtcaatttagtagaaggagtttgtacctgattatttttgaatctgccccaaatatctttagcagaactttggtagtgaaccttctctacctcttccacccaagatcgagaactagcaggaggagagggacctacaggtagatcactcgccggaacccttaaattcgtaatcgggtcgtcattcgagtcatgaaattcctcgcccaaactcgcaatctcgatgtcatcctcgtttacaggtagctcctcttcattcacttccttcccagcagaagttgatgtcgttgtaaagtctttttttggcaagttaaatgccaaaatattttttactttatggtaagatttatttgcattcataaccgattttcttaccttgtttattcggtttttattgctcttttctttgttaggaaa

SEQ ID NO: 297077 - DNA, 4273 bp, Cannabis indica
atcagattgtaatgggttttatttagggcacaaaatccaacagttggttagtccaaattcgaatatttgtttttttacttcttctctgacctcatttttaggcaaccttccttcctaacctttaaggctcaacaaaagggtcttcaaaacatcaatcagtttatcagagagcttcacaagtctaatgaccatcgtgagcttttggttaagcaatgcagtgatgcccaatctaagatcactttccaaaagaagaatgttgaaaatctagagaaatcagagaaggctttaaagatcgagaatgagcaacttcgtgaggctaaccaacaggcccaaaaagctcttgaagaggccaataagaagcttgaggatgcccaagtaaatgcttgcaagagggttgacttgatggccaagcctttgatttacaaggcttggaaggcaaatccaaacatggatttaggatttttgggtgaggtagccaaggcaatgctagcttactttgaacaaaccaaaaaggaggaaggtggtgactctaaagaggttgaggtcccagagaatgatgaagaagaagaagggccctctaagtctcccacaatatagacttagtttttaaataatttctgaacgatggtcgtttgaccgagataatatttggccctttgtgtcttttatgtaattaattttattttgcgttgttgtatggtcaattttgctttaattatacttctaatttttatgctactttaatttatatatatttcctatttttttatgagaaaattttgtttgagttatgaatattttaaatatgttatgtatttttggtcataaatgagctttatttacataactttaacaaaatatttttctcaaatttacacctcgagcaagcaacaaacttaaattttcttatgtatttgaatatttttgaacactttttatcatctgttgagcaagtagttaatatttgtctatcatatcgattaaggagaaaactttaaatattttgagcggtactttaaactattttgaatatctcttgattgcccatgtgaaaagttaatcctttatacacattttagcttacgtactatttattaagacacactatgatatctcgtttatagtacatttttatttatgtgagccgttatttatttggattacatttagcttgatgttgattcgaagacttaaaagtcttgcttttatttcttttttaagaaaggttcgaattttttgacttaatgttgttctagatcaactttaatttaacacctttccttttacaattcttttttattttctaggcattattgaacctagttatttttaggcactaacgaggctagttatttttgaaaatatacctctaggaaaaacctagttattgtatattcatatgcccccaagtaattttaaaaaaattgagactttatgattacttgaaataacatctttattaaaataaagaacttatttacattacaaaaagaaatgaattataactgaacatgctacttgtaatatggccttaaatgtttgttgttccaagtgttttttatcagtgtgccactgagccatgccaatttataaactcttattcccacaacaactttaataatataagggccttcccaatttaggttaaatacaactgctgtaggatcttgtgtattagtaaacacgcatattaacacccaattacctactttgaagagtcaaaatcttttgttgacgtgtcttgtgattcgatgttgataagaaacatttgtgatttgctacttagtgtgtttttttatcgagaagatctaaggacattttgtgtagttcctagttttgttcttggttgtagaattcatgcatgtgcatcgcaatattcacttctactggtaacattacttatgagccaaatgcagtgaaaatgagtatgtcccgtcatagttaaatctgttgttctacgggcccagagcacctacggtagctcatcaacccatcttcctttagccgcatcgagcttcttttttatagtgtctttcaaggttttataaatagcctcgacttgtccattagcctgtggtctcgatactgacgagaagctcttaataattttattccttttgcagaatttagtaaattaatctccatcaaactgagtcccgttgtcaaacactattttaatgggaatcccaaattttctaatgatgttcttcattacaaagttaagaacttctttgaaagtgatggacatcgaaggttttaatttagtccactttgtgaagaagtcaactgcgattacaacgtatttagcgtgaccttgccctattggtaaagattcaatcaggtcagtctcccatattgcaaatgggtaaggcgaggtcatcattcgtagctcagtgggaggtattcttggtatatgcaagaacagttggcatttatcaaattttttttacaactcatgggtgtctttgttgatggtttgccaataataaccctgtcggattatctttttggacaaacttttccatcctacataatttttgaaaaagccctcatgaatttctctgacaatattattggctttgtaggaagtagacatcacagtaaggacataaaatatcttcttctgtaaaatttaccatcaactagcgtgtatctcaagattgtgtataagagtttgtgatcctcatttttgtctactggaagctctccatttagcaagtatttgacaataggggtcatccacgtgggactcacatctatcatctctacatcttgctttttagtttggcatatacttggattgcttaacacctccactagaactagattcaattttctaagtcaaattgtgatgccaatttttctaaggcatcaagattagagtttcattctcttggaacttgttaaattttaaagtaatcaaacttttctttggacatagtttgtttaggttggtgaagtcgatatatactctccacgttttgttgggtttaggcaccagtactgggttggatacccaaagtggatagaatgcctccgttatgaagttaagggcttgtagcctctcgaactcatctttgagcgcttggacacgctccttgtttagcaacctcctctttcattaaacaggtcgaatgtttaaatcaatgttgactgcacgggtcatcatggaggggtcgattccgaccatggaaaggggtctaggtttgcctttagaaattttatcaataatgattttatttctagcgctaaacctttcctaatctttagtcttcttgttaggaaagtgggatcaacctccacctcttccaactcttctgcaagtctgaagcttcctccaggatccccaaattaaggatttatgtatgtgcccccgctttggcctaaactttattgccctttgttgggctcttcttcaaagctcttgcgggcatcttctctttcttagcttttgacaagtccaagttgtaccagtgacgaacagactgttggtctcccctcaatcatcctaccacatgccttgttagaaatttgaggcataggtggtagatggatgttaccgccttcaagtcgtttagggctggtcggcctatggcattgaaagttgagggtacgttgattacgataaactgtgccatcaaagttcttgtggctggactttctccaacggtgaagggtaatttgatatatccgatgggagcgatgccttggccaaagaagcaatgcatcacttgatcgtagggtgccaagttagtgagttggagccccatcttttcatatgttgacttgaaaagaatgttgaaggaggctccatcgtcaaccatgcaaaaccctagaattaagaaatggattagcaaaaccctaactagaaattgtgaataattaaggaattatattattatgcatggttgctgcagccactgaacttacctgattggaaatgggaggacattactatggacttcgtggtaggtatgcctagaaccacgggacagtttgactctgtgtgggtcatagtggacaggtttacaaagtcagctcactttttacctgttcggatgaatttctccattgaccagtatgctgagttatatgtcagagaaattgttcgtcttcatggtgtcccaaagtctattgttttggatagagatccaaagtttacatcgagattctaggagagtctacatcgagctatgggtactcagttaaagttcagcacagcatttcatcctcaaacggatgggcaatccgagaggaccattcagattttaga

SEQ ID NO: 297078 - DNA, 2972 bp, Cannabis indica
ttgggagttttatggcaccattcgccaactaaacctcattgcaaaacaactcccaaatgtattcgaaaaaattgatattcttgaaggagatggtggcgttggcacaattgtccatctaatttttgttccaggtacgtacgtctatatatttttaatatcagtacctataattattaagaaaaattgctaatcattcgtaaagtatgactttatggtaatgttaagaactactaatacctaatagttgtgcttattttatcaatgtcattaatggggattaccattctttaggtgttacaagattcaagagttacaaggagaagcttaccaaggtagacgatgagaatcgggtgaaggaagctgaggtggttgaaggaggatacctggactttggcttcacgctttaccgagttcgatttgagatcatcgacaaggaccaagcttcctccattgtgaagtccaccattgaatatgaagttaaggatgagtctgctgacaatgtctccttggtctctcttgatgccctaaaagccatagcctttattgcacaaaacgaactcactaagaccaatgcttaaatgaaatgtattttaattttaaatccttgtttctggaaataacaacaataatatgaatcttaaagggaaatatatttcaattttcatctttgtttctggagataatagcaataataatatgagttacaagttatggttgttgtgggtgtttatttgatgatattcataacagcaacagaatcagtttattattttaaatgcatttgtcattaaaaaacaagttcaaaattaattccctcaaattaattattatgtattctatcaaaaacaaattattatgtaatcctgttttttctttttttcttcctaccatagctacaatatttggaaccaagaaattatagcaattgctaattattatgcaaattagcaatgtttttataagtttaatactattataattattataagacacattgttacatttacagtactggtgagaaaataagtcaaaagagaaaccagttataaattggtaacattgatggatatcaaaatcaatccttaccttaaaatatcttatcattattattctttaaaatcaagctaattaacacattaaatttttcttaaagtgactggtttgttttttatttttagggaagccaatcaagtgccttacatgttagccaatcaagctttgttatccaaagctagtgctatgtggattggagtttctccccgtgtgttcatcaagctcttcggtttgtaatgtttcgaattgaatgaattcctttaaaaaaaatcccataaacaatactgcccaaacctcattttgaatttgcaaacaaaaaacaaaaactagaaatgatgtttgttatttgttgcacaccacgtacaatctatagagtcaaagctgctttagaaattttaaataaacaaagtttgtaacaatcaatttgtgactgttgctgatcaaaaatttgaaaaactaccaacatcaaaatcacagtatacagttagtatcatctttactcaatctgttttactactgaaatttcatttgttgcagatcaaatcataattattcattacgagccagcatatcctcagaaacttgaatacaaattcctatgtttgttttttaactctatcatgatttaagtgtatgggaaatcagagttcctataatgtcaggtcgggtcttactcacccacttcgtttggggcgggtcagctgccccaacagcaggtgaatcacagggagaaaaggggttaccatgaggggtgggctgacccgcaccatttacattcctactggaaacccatatttaccaaaaaagaaagcacagaagatacaaacgggacataatataaactgccccccaccatttacactcctacttaggaacccaagaaattatagccattgctaagcattgtgtaaattagctaggaatgtaagtacctagtaaagactcaaacctcaaagtttgtgggaataaaccacatgtttgaccattttagcttctccactaaaatatttataaagcgaaaggaatacagaaattatttctcaaaacatggatttggaaaaaagcaactgctaaattttacggtactgatgtatgtgttcctgaacatgagattgggaagacaatacacagcacaaaggatacaaagaggagatagcataacctaatattttcttagatatagaaatagaaagagaaactaactaatcaattgccatggtctctgaacccccaattgcatcctccaatccattcttgtgctcctccgttgccaacctcatctcctccatcatagtcttctgttcttcctctattgttgtttgcaactcatccacctaatcacaagaaaagacaatttcagagcttgacagactgtatgataatcagggcagggcacattctaaaatgaaaacggttcttaccaaatgaagcacaagagaaaattgcttcttccggagttcaagcagccttgaagtggccgtgttctcagcatcaagagcagcaatctctttgtctaaatcggcaatgagcttctgggtttgggagcgtggtggctgcgcggcgatcaactttctgatagcctcgcactcctccttgtgctgcctctcaatcttactttcctccaattgaatcttgagttgggaaatgtcagaatgagcttgcagaatctgggaattaatctcctccttcaactcattgaaattatccttctcgcggaggttggcctccaccacagctttgctcttaagcagaggaatctcaaaagtagaaagctcctgcaagaaggccttggagagtctctcgcagtcggcatagttggagtcgtcatccttatcagtttcaaggaagaaagaagtaaacttcttctgaagcttcttcaaaggaggttcgcctcgagtggtggtggtgcgagtgagaag

SEQ ID NO: 297079 - DNA, 4776 bp, Cannabis indica
actccaatcattgttcttgttctttaacgttttatatatagtaatgtagtgagtgtcgtttaatcaagtgttgtttgtcagtttgtttgtgtcgtttcgtctattttcgtggttggcggtttgtattttgcaattatgctggagttagggtgtaaagataccaacatacaactaaagtccaacttaggccaactgccttcttcccacgactcaaatcaaattcaatttttgggtacacaaagaggttagtagtagtagtagtagtagtacaagtagagtagtagtggtagaagtaggtccagttagtagtagtagtactccacattacattcaatgaatctaacaatattttttataagtaataaatactgaaagttttaaatttgtatcataaactcaatatttatttcatatttgttatttcttaaacaaatacatataaaatttgtcattgataaaaatatattgtatcaattattataaaatattcttttaaaaaatttaaaataaaatttgtactaataaatttaaaaaaaataacaatttattaatatttattgcttgtacttactcaaataaacattaaattaaatccacgtttaaacttaaaatttaagtagacgatttacaatattttaatttattaattattattttgtatgtttgaaaaaagttgtcaaaggttttgtcctaatcccaaagctgtctaaaagtttttggtctttcacatgttattattagacaaaggacaaagaggttaaaagtatcttgaagacagtgcttgtcttcttcttcttcttctccttctgctactttttctcttttctccttgtgccttttcacaaagggaacaaggtcagaaagcccagaagtttgctttgcctgataatgcattgattttctgatgatgggttttgcttcttttagtgatgtgtggacactcatgaaggaagggatttaatattggttttttttggttgtggggtttaagtattttattctgagttgactgagttcaaagtatgaagcagaagggtgtcaaggattccaaggataagggaaatggtaatggttttgatgagtgtggaaaaatggtggtggttgctgttaaagcatctaaggagatttcaaaggctggtctagtttgggctttgactcatgttgtgcagcctggtgattgccttaagctgctggttgttattccttcttatagctcaagtaatcttctcatcttatccttttctacctctctttcatttcagtgatccaaatatcgaccctacttacattaatgtaagacaagtaatgcaaattctcattaagttgagttgtttttctccattttgattaatctgtcttttttctttattgtttccatggcttcatagaagcaatatctcttgcatttttagagtaaatatacaataattgttttcctttttagtacattgaattcttcacttgaaacaatcatgagctaaagaatttgttcatggggctcttccatagctagctgtagtaagttctaatggccattactgggaaagtatagtcctaacagcccttttaaaagcttgcagcctagcattcttgtcttggaatttagtttaaggcttgatttattgtcgagttaaatgaatatatacagaaggttaaggattccaggactccaggactccaggactctgttgtttcacacatttggcagcaaggatggtcttttattttattttttgtataaatttggcttcagtgggttattttctgaatcaaagaaccaacataagttaattattgttttacacaagttatttatttttttctttgtttctctcctaaatgacatttgattgagatgttgtatgattttaggtaagaggatatgggatatatcaagattcataggtgattgcaccaatagtcacaaatctttctcaggaaacactacagaggagaagaatgacattgtagattcatgctctaagatggtgattcaactccatgatgtttatgattcagagaaggtaagatcataaactagtttttattgtttagttcttatgttgatcacatctaatatattatcattgtcacaataaacatttgggtcctatttttcaggtaaagattaggataaaaattgtctcgagttcgttatctggtgcagttgcagtggaagccaagagaattcactcaacttgggttattttggataagtactatacaaacctactcttcttttggattatttcattactatttgcactgcttttgatataattgtttgtacaattctgatcagacaattgaaatgtgagaagaaattctgcttggaagagcttcagtgtaacattgtagttatgaagcgatctggagcagagattcttcgtctgagctttgccaattctccaaaaatggaacctgatatgagctgctctttatcacctgaattagaagcttctccagatcacttgaacaacaaacttgaaatgtctagagggccgactgtaactcctgctactagtccagaagaagagtcacctctaactagaactgatgttggcacaacatcaatatcaagctcttcagatccagaggcttctccatttctgccttatggaatccgcgggatccttaagaaggagtttccatttattcgtgaaaagaataaaaaccggactgaatttgattctgagacaaacaatgaaaagcaatgttccgatttcacaacttcatattaccagccatggttgacaaatttcatcagtgctagtggtgaattgtcgaaacctttgatagaaggttcagaaagattttatgacaagtctttgatgtccacttatggagcattgctggagaatttgtctaaattggaaaaagagcctgatatagggatgcttaattacaagcttgatttgaacttgagcagaagtgtgagagaagcaatttcgttgtgtagaagcgcgcctcctggtcctcctcctttgtgctctatatgtcagcacaagggacctgtgtttggaaaccctcctagatggttcacttataacgaactagaacttgccacgggtggattttcacaagcgaatttcttggctgaaggtggatttggttctgtatatagaggtgttttaccagatgggcaggtagttgcagttaaacaacataaattagctagctctcaaggtgacatagagttttgctctgaagtcgaggtcttaagttgtgcacaacatcgcaatgtcgtgatgcttattgggctttgtgtggaaaatggaagaaggatgctagtttatgagtatatttgcaatggatctttggattctcatctttatggtaatttttctcttattactctgccatgaacttatatgacagtgtcatatgaaatagttacttgtccataagaagcatctcttcataattttattatcatgctcaaaagccttggcatgccaacttttttggatgatgaaatttatcttcaaaatctctacttttgacaaccatgtgttgcttgggcatgagggcatcactttcattttccatgtgccataatttagtaattggcaggttaacttgtgtcatgctttgctttgtcctttttctctgagaatttttctcacttacgatgaaaaccaatcctgtaagaccaccttttgcatgtacacactaaacaaatagtcaatgcctaacccaattaagtgcaatgttcaaaatttcaggacaagatcaaaatcccttggagtggtctgcaagaaagaagattgcggttggagcagccagagggttgagatacctacacgaagagtgtagagtgggctgcattgttcatcgcgacatgagacctaacaatatccttctcacccatgattttgaaccattagtatgtgctcttttcatatctgattttagtgcttgtatgtgtcaatagaacatgtttcaactttcatttattgatatcatgttttccaggttggagatttcggactagcaaggtggcaaccagatggaggcaaaggggtcgaaaccagagtaattgggacatttgggtaaaaccatgatttgaaaagatttccttctatagttctatactcataatatttggtcaagtgactattcaaaatcctatgtttacagatacttggctccagaatatgctcaaagtggacaaatcacagaaaaggctgatgtgtattcctttggggttgtactggttgagcttgtgacaggaaggaaagctgtggacattaaccggcctaaaggccagcaatgccttactgaatgggtatgaattggaaaactcatacatttatgtttgctatttgaagttcatcaagtgtatttgtacaaatatatgctgcaaacccaagtacttgtctttcttatctataactgtagttttaatgaacaacaaaactaacttaaatgtacaatatgaatcaggcccttactagaaaaactttcagttgatgtacttgtagacccgcgcctaactaacaattactcgaaagaagaggtttgcaacgtgctgcaatgtgcctccttatgcatcagaagagaccctcattgcaggcctcggatgtctcaggtatgacacatgagttgaaaactctagttagttagtttgatgcttaggaaagaaaaatctaatttcttcacttgaaaatttatgtgttcttttaggtccttcggattttggaaggtgacactgatgtgaattattctatgatcaactgtgagtaaatattactattactatcattattgtaattg

SEQ ID NO: 297080 - DNA, 6083 bp, Cannabis indica
aaaaaaaaaaaagaaatatacttattcagtacattgtgttttcatgaaaaatatatttttaataatacttaattagaattttatattttcaaattatacatatgtaataccctaaaataaaatttaataatcacaacaacaaactacaccccacacaaacgttttaataaatgaagttgaagaggactgatggtgattggttatggactaacttcaagtatgaattccttccaaccttctgcttcatctgtggaattattggccactctgaacggttctgtcatcgtatttatgatactccattcgaatctttagaaaaaccttatggtttatggatgaaagcccaacctcagaggaagaacaaactgatcggagcaaggtggctcagaacagggacggaggccgattcataattttccgatgaaggagtaaatggtggtgaaaattcattgaatgctgcagttactaccaccacgcataatcaggaattgatagagggaaatggaaagaatcttgcagttgaccctttactcaattatcatcgacatattgggagaggatacaatttgaatatggagattaatcaaggagtgattgatgatgatttggtaaaaggaaataatcatgatggttaggatttgaatgactttaatgatatggaagaagtcaatgatcagcaagaatctattgtgatccttgattccaagcgtagaaggactgatatgcatggcaaggaaattatggaagaagatgagggggacataattaatggttctaaatttgtgtcaaaaaatgggtctttggtgggttctagttccagggctcacctaggattatgagtgtccttagttggaattgtcgtgggcttgggaacccacgggccttacaattccttaacgaccttgtgagccaaaagagacccaattatgtctttctgtgtgagactttatgcaaaaaagacaaaattgaaaatattcgaattcaactcaagtttgatggtgctatttcgtctgatgctagagggagaagtgggggcattgccctgctttggaggaataaagaggaggtttcactgcttaagtactctcatgactacattgatgttcaagttactaatccaaatgggatcatttggcggcttactggctgctacggagagtccaatcgtgcattaagattttgaacctggaatttattaagaactctctctgctgacaataatttaccatggtgtgtaattggcgatatgaacaacgttttatctcaagaggacaagaaaggaggagctcctgactggttactggagggttttaatcaagcattgattgatagcagaatttgtgatttactcttgctggttatccatacacttgggagaagggcagaggttctttaaactggatagaggtacgtcttgatagagctcttgtatctcaaagttggttaagtacctttagttcagctactctaactaatcttgaagtatcttgttcagaccattgtcctattattcttgagcctactgtgaataatatgtatcgaatggtcaagcaatttagatttgagaattcttggttgagggaacctttgtgtttccaaatcgtgcaagatagctggggggttaataattcaatggggattatggaaaaaatctctttgtgtggaaggaaccttgcagattgggggaaaaatttcactgggagttttaaaaagagaataagtttttggaaaaaaaagattgctcagctcaaaggcgatagagatcctgcttcaatcttagcatctaatgaggcagaaaaatagcttttcgaagtgtatgctcatagagaagtcttttggcgtcaacgttcgaaacaactttagcttagagatggtgataacaacaatcgttacttccatgctactgcaaccactagaaaaagaaacaatgcaattactaagttgcagggtcctaatggggactggtgcgattggaattctggtctaagcaacgttattcaaggctattttgaggatttgttttgttcatcaaacgttaacttggctggtgttgttgataatatttgcccctcggtgactactcaacaaaactgtgatctgcttactcatgtaactgaagaagaggtgaagtcggcactctttcaaatgcatcctgaaaaatctcctggacccgatggaatgactcccgggatttttcaaaaatgctggagcattgttaagcatgatgttgttgctctggtgcgtcaattcttctctaatggttatcttgcccttaatttaaaccaaacacatgttgtccttgtcccaaagaagaaaaatccttgcaacataggagatttgaggcctatctcgctgtgtaatgttctgtataaagttgtttcaaaagttatggccaatcgtcttaaaggagtactcccacatttaattttcgagacacaaagagcttttgtccctggacgatacatgactgacaacattatgatttcctacgaggtcatgcattatctcaagcggaaaagagcgggaaaggaagattatatggcgttgaaacttgactttggtaaagcttatgatagagtcgagtggaaatttctggaagcggttcttcaacgaatggggttcgatgctaagtggatttaccttgttatgtcatgtatctcttcagttgagtacatggtcactcatagtgggagacatgttggtcttatcttgccaactaggggcatctgccaaggtgatccattgtcttcatacttgttcttaatttgtgctgaagcgttctctttgctaatcaaacagtatgaggtatcacatcagattagaggaattcaggttgctaatggtgctccattcattttccacatgttattttcggatgatagttatattttttgtcgtactaatgggaatgattcgaccaacataatcaacctgctacacgattttgaacttgcttcaggccaaaaggtcaatttttcgaattttagctgtaatacccaacttgctacttgtgcttttatctgtcaaaacatgggaatacaggaggctggtgaaaatagcttgtacttggggctgccatgtacaattggcagaaataaaaatgctgtttttggatttcttaaagacaaggctagtaaaaaaattcttagatgggaagggagattcttatctaaggcaggcaaagagcttcttcttaaaacggtttcacaagcacttcccaatcatgctatgtcagtctttttactgccattacaaacttgtaaatctttagagagcactatgagcaagtattggtggcaatcttctaagcaaagtagaggggtttcttggatgagttggaataaattatgcaagcacaagcataaagggggactcggttttaaggacttaaggcaatataatcttgctttactaggaaaacaagcatggagactactggtgcacgattcaacattggttagtaaggttttcaaagcaagctattttcccaatagttccttcttatctgctagtttgggaagcaatcccagttatatttggaggagcatatttgaagccaaagatcttattatggtcggggccaggagcagtatagctagtggtatccaaacttctattcttgaagatccttggctccctgatgtggaggatccttttgtgcgttctgtccatcctgggctggtgaatcaatatgttgcctccttaatgtgtgttgattcgaagtgttgggatgtggagatcattgaggatttgtttgacacaagagatcgtgatttaatcttcaacattcctctcctagaatgcctattggtgaaaaatgcctattgttggacttggaataaagaatgttcagggttatatacggtgaagagtgcctattggtggctgcaaaaccagtccttagttcctggtttggatgatggtatttggaaagcctattggaaaattaaagtccaaccgaaagtgcttcactttggttggagagctctcactgccacacttgcaacaaaggtcgaactcaacactaaacacgttcatgttaatcaactgtgcattttttgtaatatggcagaggagactatcatgcacgttctggtgcaatgtccgtatgccatgtcgtgttggcatcgatcctctcttaacattatctcgactgttccgatgcaattccaggagtggtttcaaggccttatgcagaccaacactcaggaaaaaatagaagaagccttgaaggtgtcttgggctatttggaatgctagaaacaacctaatgtggaaccagaaaagtgctacagcagctgaagtggttttatcagcaagaactcatctttaccaatggcaacgtgctcaacaaagtaagtttgaacctcctttatctcatttcgaggtaggtagggaggtggagcattggactaaaccagatgaatttacggtaaaggttaatgttgatgggtctacttttgaagcttcaaatgctttcagctatggtttcatttcaagggacgccaatggagaaattattgatgcaagttgttctagcaagagtgggacttcttcacctgaaattgtcgaatcgttgggcataaaagaagtgctcagttggattaaaaggaaaacatggagcaaagtggtgcttgaaactgattgtctcattgttgttcaagctattcattctgatgtggtgttgccatcttcgtttggtatgcttgtacaagattgcccgcacttactttcttagttgtctcatgttcagttgtgttttgttaagcgttctactaataaggctgcacatttccttgcgtaattcttattatttgtcagatcgtatttttggtcaaaacaattctccttctgaattgttaaagattgtaatggatgataagcatccttttccattccaattccattcaaaaaaaaaaaaataataattcataaaattttgtttaggctgtgcattcacaagcctcccctactcaataaaaaagatttaactaaacttgatagaggccgcgcatacgcaggcctccgctaaaacaaattatgacataagttccaccaacttgggtagaccttagctcaacatcctttctaagtgcaatgaaaatcaccaagctaggccatgggccttcttgatcgcccattgaccctgtccaggtaagtatgtattattgtataccacgtgttcaatttatagacctctcttagcatagttctttttactcttcaatgtgggattagtgacactaaaaagataattaggaggagaaaggtctacaaattgaatcatggtcgaaatgaagctgaatatacatgtaaaccacatatttttgtccaaataaagcaaaatcagaatgtagatttgtagttcatatcgatcatcaaaagccaagagagtgttcaatgtattgttttggatgattacatgatttttgtagacattataccaaaggagagctctcaaaggctgaaccttttgaagtgatgccaaacttgtcatccatgtccataatttgtgcaacttcatctttccaacttccaatcataggagaggatcagtgagcctaacatcaagtgaaccattgtaatggccagaggcaaacttggacatattattcgtccactgccgaagggagtgagctcaaagtgtcgacctttcattgtttcacatcagtatctgattccaaaaacctctttggaatgaactcatttggtttgtcccgtattttgttgtctctggaactggaaatggtcctccatacattgactagtacctgagctctttgactatggcttgtaagtaaggaagccttgttatgtctgaatctttcacttggtttcccttatcaatgacatgtttaagctctgcttgggcttctgacatgactcttgcttctttagtagctcagctcaggatgtggatgaagttgagcacatatttctgttattgtgtagctgtttgtgtaatcttttatgttctgtttcagtattatttcttgtacaatcttcaactaaagtctcctctcctgaaataattataaccatcgtctttgagaatcacatttgatgggttttagactatcataa

SEQ ID NO: 297081 - DNA, 5530 bp, Cannabis indica
aaaaaaataaaataaaacaaagacgaagacgaagacccaaatgagcactgcgcaatcggagctttttttcaggttgagcctctaaactaacatatggagaagaaatagggaacccacaaaccaattttgttttttttttattttattattattattattaaatatttgatacttgatttgggtttacaatgcaatctctttcgcaatagctcactgtttcgtttcaattccattcaattatacaatttatcatgataataatcagtgtttatctattgatttgattccattacaattcatgactacaccaccccattgacgattcccaattctcaaagtctcagttttgatccatttttcttgtttaccaaattacgatttggtttgtccttattccttattaataaattaattatattcctattccccagctattcgaagttgaattaaatactcatatctaaacctaatgtattctcggctgttgtaatttattggataatcttccattctgcattggggttcttggtcatggagataaatatgatttgggtttttcttggttctttggcttgttgggttttcttaaatgcttgtacgaagaagaattggttttcataataaattgactttgggcatgattgtgttattgtttgatttacttgttgtaggtaatgaatacaattttgtattcagatggcttgaatttttgttgtagctttttcccctaaattcttatatgaagtagaagaagctgcattcatgtgttttacttttacttaagaccacagttgtgttattgtttgattttgattcttaatagtactgaacccttttactttcttgaaataggttgtaataattgtgtagaaaatggaagtgttggtttcagatgagaagcagttttctaataaagacgtagagagagtttcaatttccatgcttgcacggatgagacaatgcccagaaattattcaaggtcaatctaattcaagaggtggcaataggggcaatgaatgctcatccaataataatgaacaggtcaatctagatgttcaatggtcgagtagtaagaagaggcgtcgttcctcattgcgaagagatatagaggatgacttattgttgaatgaagatgaaacaaatttgaaaaagaggcgtagtgcctcaatgcgaagatatgcagaggatgatttattgttggatgaagatgaagaactggagatgctgtttatattcaagcataagaatcagagtagaagaagaataagaaactttggtttgactgaagcaagttcaaaggaagctgttgctgttaaaaataatgaactggttaatgctactttttgctctccttcaccttctcctacctcatctgcctcatctgctaataacaaaataaaggtaacatctttgtttatttaacatctttctattaagagaaaaaaaggtttcttatctgatttttttattgttctggtattataacaggttaatgaagagggttttttgaagtgtcatcagtgtatggagaaaaagaaatttgttgtctcttgcaacacatgtaaacaaaagtcatattgttaccaatgtgcagaacaatggtatctttttgagaaggatctcacttttcctgctaagaagttttcttttaatgttttgtaactagttttggtttttctgccttttgtttatttaggtacacaaacatggaaataaaggacattaaaattcgttgtccattctgccgtaaaatctgtaactgcaatacatgcttgcattcaactgggattttcgaggtttgttttcttttgtataattatgctgtgagtaccaggtatcctcagaagtacactttctaattagtattttcttgttgaacttcagacagtggagagaaagatggataactgtgaaaaggtttggcacctggattatttactgagcttactgctcccacatatggagcaaatatgtgcagaacaaactgaggagatagagattgaagctagaattcaaggtattttacaaacttttgttagatttttttacatctcaattgtaaatataaatgacaaataactgactttcttcttcagggatttcttcttctaaagttgtagtaccacagactctatgctctaatgatgaacgcgtgtattggtgagcatcccttctttattaaatttgatgaagttgtaacatgaatggtcttaattacttcttctttatgtctggatcagcaatcattgtgcaacatcaataatcgatcttcatcgaagctgccaggagtgctcttttgaactctgtctcagttgttgtcgtgatatccgcaatgggtgcctttcagatcgtactgaagtcaaatttcaatataagttcaagggttgtgagtacattcatggaggggatcctttacctgaatcacatcctttagaaacaacatcagagtatggtttggaacctttggatgaatggagtgcagatcctgacgggagtattaggtgtgctccaaagaatatgggagggtgctataaatgtagattggagctcaaacgtatccttccgattgggtggatctctaatttagtagtgaaagcaagagactttcttggggttgatccaaatgaagacataactatacatcacaatcacaccgatgaggagaatgattcaatgaaaaaagcagcttccagagaagattccaacgacaactacttgtattgtcctgactcaaaggaagttctaaagaaagggtttctccacttccggaagcaatgggctaatggcaaaccagttatagttcaaaatgttcttgaacaagctagtggcttgagctgggagccaatggttatgtggcgtgcgctaagtgaaaatccaggagcagagactggcacagattatttgaacgtaaaggccatcgactgtttgactggttgcgaggtttagttctgttatccctttgacattgattttagctaagaaataagaaattaaagttccaagttgtttgttgcaaagatctccattgtaaaattcgtattctaattaacccttgtatgtttttcctctgtaaaatttgcaggtggaaattaacacccgccaattttttgaaggttatactgaaggaagaacatatgacaacttatggccagaaatgcttaaattgaaagattggccaccgtcagatgagtttgacaatcttttgccacgtcatggggaagagtttatgagtgctctgccatttaaagagtacacagatcccaaagctggtatccttaaccttgctgtgaagttgcccacaggtgtcttgaaaccagacttgggtccaaaaacatacattgcttatggcattgaagaagagctcggaaggggtgactctgtcactaagctccattgcgatatgtcagatgcggtatgttgtaattatatctttactgacaattggaacttgggatttgtaaattatatcttactgacaattggaacttgggatttgtaattatagcttaactgaattggaacttctttgtctatagtaattgtctcatgcagtaaaagacataatttctcttgctactgtatttatattattatttgttattctctactcttgcattgcattccaattgcgctgtaatttgattgtaacttctttctatttatttatcaataatatgggatgcaattgtaacttgttcttttgatcattaattgatgtaggtaaacatcttgacacatacagccgaggtagatttaacaccagatcaacgcttgtcaatttcacagttgaaaagagtacacttgcagcaggatattagagaggggataaaatcttgcatgaatcatgttgaagaagaaacagaggacatgatgacaccaagtgaagataaacattcctctaaaagtgatggcggtggagcactatgggatatcttcaggagagaggatgtcccaaagttagagaaatttttaaggaagcactcgaagcatttcaggcatacctatggctgtcctgttaaacgggtaacttaaaatgtactacttttgttttgctaattcaaatgctggaaagaagatatactcacttttgcttgtcctcattaggtcgaccacccaattcatgatcaatccttttatctaacttcagaacacaagaggacactaaaagaggaatgtggtaagtagccttggttgacaattgttttcttttttcttctccaataccattagtttgtttaagaaaaatatatgcttctcatgatcataggcattgaaccttggacatttgagcaacaagttggagaggctgtgtttattcctgctggctgtccgcaccaagttaggaatcttaaggtcccaacctatcttattctctgtatttacaatccaattttcaggagcttgagcttgtctttagtatttacagtctaatttttacttgccttgcagtcatgtaccaaggtcgctgcagactttgtttctccagaaaatgttggtgaatgcttgcgattgactgaggagtttagacaacttcccaagaatcatcgagctagagaagacaaattagaggtacaattcttgttgatgattttgcttccttccaccatttgctatacaacttttgcttccttttcataactcatgtttttttttctgcattggaacagataaagaaaatggtaatgtatgctgttgatcaagctgtcaaagaattggaaaacttgggtgcagtgtataatgtcaataattgttagggcagttcttgatagagattttgtttgagactaacccttcttaggagaaatgcatacatagtttaccttagatgcatactgcataaaaaagcatggaaagtgttgagtatcaatgaataatgaaataagtatttggtgttagcaacaaaatacttcattctttggtttgaatttattcaaataaaatatgagcttctaataagagtgagattagatatttactaatgaatagaaaaagtgaaaagtttattgtatttaaataattttctctttctagattaatgatatagagtatagacaccgtaattggcatgtaaaattttgtgaattaacatatacacattcctatattttgttttacctagggcctaaatcaatactcaatattctaaatttaccttattagtttttagagaagttggatggtgtaatgtaaagttgttgtaaaataaataaagtagaattttagtaaaattagagaaaagaagatgttgagagtgccctaacaaaattgtaaaacacactcacatcaatgttctaatatagaaaagttttaaaatagactaattagtaatttttccctcgaagacatgtactaaatcgtgcctcctgaacttttttggccgttaaaaattctcctcgaactattgagattgttaaatttaaggacttttatttaattttagtaaaaaattctaacatggatgaaagttcaaggggcatgatttagtacatatcaaaatttgaggagcatgatttggtagatatcaaagtct

SEQ ID NO: 297082 - DNA, 7377 bp, Cannabis indica
ttccccctaatttctatgtattctatttcattcgtgcttaactacttttaatttcctgatcaccaattaaatgtctatgattttgatgcgagattcgagaagtgagtgtcaattatgctatagtgagatagaactaaatttcaatataggatgagagtacctatatggtttagatagtttataagatttctgtgtttaatgcctgttgcatgttaaatttattacgagagtagaaagtttgcacgtgattgagatttatatatctgggaagactataaattaccttagtaaacctgttattgcataaaaaatgataatagggagataatcatattagaccataatcaatagaaacaattgaagtcaaagcccttgtttttattaattgttaattttctttttagtttaattgctcattcttgcacttttattattttctagttttaattttttcttaatttttattcaaccaaatagaagtaaaagtttaattttaacgtacttaactacaattctcgtgggatcgacctcactcttggtgagtttactacttgttaacgatatgtacacttgcgtgtgcaaaatatcacaaaatgtttttggtgtcgttgtcggggatcgagccactatcaaattaggaagcaaatagtccctcaagctacggtcattattgttatgaccattagcctggtcttctacaactcctccattgttgccattattggcgttgtcagccactccttgttcaatctctactgccgctctttccaatctcttccttcttctgttgtttttacaagtcttctctatcaacaggtaatctgtcgattgcaacttgacttaaacctaaaaaagataagattctaaaacaaacatgattagtactataattgaaaagaaaaactaaactaaaataaaatttaatttttaataatattaactattgatcccccgacaacgacgcctaaaacttgttgtgatattttacacacgcaagtgtacgtatcgttaacaagtagtaaattcactaatactggtggataatccttcactttgaacattatacgatgagggtattattagacaatgctttgcacagatgcaattaactttgccaagaaatgtgaaaactgacaatgcattacaccatatgtgcacagtctgcccaacaaccttaattcaatcaccagtccatgtccattcacaatatgggggatcgatttgattggcaagttaccaaaaggcaagagaggagtgaagtatgccatcctcaaataactacaggtaaaaccccattctcgttatcttaaggttgcaaggccattattccagtggaagttggcttaggatccattcgtcgtgatgttttcaacatcaatgacaatgacaaagggtagcgtactagcttggatcttctggaagaaaaatgcaatcaagcacaacttaaggttatagcataccaacaacttactacgcgatattttaattcaaaggttaaggagcaaaaattgtaagtaggagacctggttttttgttaaatcatgcccaatactcatagcctaaggcatggtgtatttggcattaattgggagggtccctaccaaatcactgaggtaataagcactgctacttatatcttatccgaccttaatgactcaatttttgacagggcctagaacatcgagcatttaaagtattattatcagtagtacgtgcatgtttatatacttagtcaattttcattgtctatttaatttcctaagtctaacaagaatgtgtaagtacccctatgacacttgaatgcataagtactaatgatttcttgcatattctatttctcatattattttttagaattttcattatctttgcattttttgtaatcggttgttattatgagcgatacttaaaaacgcagagatgttcgaatcgtaccattaaagtttgctactttaattttcatcgattgcaataataaaccccatgaaaggacacataagttgataaataaaaaaatactaattaagttacccgtagaaccaaaaagtgcaaggataacattcacgcatttaaagtaatggaacgaagccattgtctgtgcttaacaaaaattgaacttagtacatatagagagtacccacgtaccactaaatttaaaagaagaaaaaaacttaagaagctagggcattgtcattaatgacgttctcttcaacagtctcccccacaatcacttcaacctcgatgttcgtaacttcaggaaatggagtccccactacaccttgagtttccattggagacatattgtgaaaagaaataaccatatcaatagcctcttgaccaacgacagaaaagttgaatgaagggatggtggtcaaggtggtgtagatgtaatcaataactacttggtcatatgatttcttcttctcctcccttagttgatcctcaaaggttttcttctcatgtgttagatcattgacaactttttttggctttcatcactttctcattctctgcctccaaggctgtattcatgtccaacactacattctccttgtaaaagcagtgacatctttgctttcttcatttgctcctataaggcaacattttgcttctttatcaaatcacagtctttaagcatctagtgtgtgtccataaaggaatgagaatagtcagacatcccttttaacatatattttgagcacttgttccaagactccaagataggtgcactttccagggccgtaaaaaaactcattgttaagaaacgtgtcttgtaaagccacaagatcgcgcaccttagtggctgggtccaccgtgaattttttccctttctcttgaacaaccttgggatctttcttgggtagatcaattaggggagatcgaagaacatcactcttctacttcattggaggattgacattcaatagagttgtgacttccttgtcaggagtcatttttggcctgcgatcgagaggtacactcttcaggaaagtcgtgtatggacaaggaaaaatacaagtgttaaaaacttgtaatgataaaataagcaataagcgtacaaggggcatcgattacttgattatttttgttttgaaagtcaaatttatcttttccttttgcttctcgaaaggttctttgtaaattggctctcgctgaagcttgatgttagggaagatcaaattgtgttgtcataactttggggaagtatacaaaaatctacagtcacaaactttgaaaggaaaaacactaatggtttttcgcagcttacaacttctttccagcaagttttgttcgagctagcctccttgcgagtttagaaaaggttagaaacttgttatagaaaatatatgcaaatataaaataagtgacctacattgatgagtattaaactctatcctaatccctggcatcttaatcaagtaaaaccattttgatttccaatcatccatgttgaaaactacgccatcgactccattttatattcgcattagcccacttactaaagaaaaagaaacagttgtccttaccaatatttttgatgtcgtagaaaatgctaaaatcctcgactgttggatttgcatatccccttttttttatatagtgtgaagaattcaatgacaattttttagctatttgggattatttcgaaaggcgtgacttcatagtaaccgaggatagatttgacaaaaggattgaaaggaccattactttgtagagaagaataggaattgacaagaccacaacttccatttttatgatctcaaaattggtgaagggaaggtggcgtcactatttgggcacatgcctcgtgcaaccagtacaaataagtcttaatttcttgaaagaagttaagtctaattgcctcgtcctagagacgagatccactcaggaaaaaggctcgtcaagaggtgtgttttctccattagaaacatccacttcttcatcctcttctgcgatatcatctccgtggatagaaaattcgaagtactgattgacttcttccacttcaccatctgacaaagcttctagattaataaaattgccacgagcagatacatttgacttacttcctcgtaactccatttctatcagttcttctaaatccataatcatgtgagctatgtcctccatggatagcaaatcctgacgctctggaatatcttcctttgacattgatgtagaaatgaagctatcgctattttggggttcttccacgaatgctcccccttgagaatagtactcctaaatgtccaagagtttgctcatttaaaagatagaagatctttttagcgtttcgtgcataccatttaataaaaggagtgtccttactcgcgtaatggcatgtaattctttcaaaaaaaaaatattttaagtaatgtacgcaaaatctaggtaaaagtgcgattattcaaaatgttcttcatgttctaagtgaaacctacatacatgtgcgagcattcggggtgttctaagaagaaaaatacgatttgaagaattggttagtcaaattagatgtaaagaacttccaaaaaaattatctattttagttcagcaaacctaaaccccaaattacccaaaaaaatagcctatcattttcatacaatttcaaccaacagagcccaaaatgcatgcaattattcaaaaaatttacaaaaaactgagaaagtaaagaaatcccgcctttgaatctaaaagtctgatgttgcctctgtcaagatgaatctgaatcacactccgacggttcgagcaacgaaaaattcttgagagatcttctaaaaattgaagaatttttttttttggaagatttgggaggatttttgaaaagtttgagcaagtgaaatgagaggaaagtgaatgcctcatttttgaatttagggtttaaataggaatcacaatttactgttacgattgtgacatctggtcaacagaaacccaaggatgcttcatcgaacggttgtcacaagacatgcctacacagaccccaaagagttttgatgacatggcaccttggaaaggtaaattaataaatactaactgtattttcaaaaccctcaataagacattcaaatgtcacccacgatgtgacaactcatctcgtctgtccctcaggataatttcatcgtgtggtagacaactgtcactgtgaaagtaggggcatgtgttatagtgcatatttttacctacaaatattgagtacaatctcgtgtatgtttaacatgaggacccagttctcgagtggaaaaagatgatacgtcagcataagacttagggagagaaaatctcaaatgatagaaacttacaaggaggtgcgaccgagagaaggtctagttgcatactgtgcccaacagtgttgaaaaaagtatgattaagagaagttagcactggtcatgcatatatcgattatatgtgataactaattgcatctctcttgcaactatatataaagatcgtatctttgtataaatcttatctaaaagacaagtaaatgacaggtcatcaagaacctgtaggttctatgttgtcagtacatgaatgtccaattatgcgactagggtaatcacaggcattctaccttataagatagccctgagtttatctttggtccaaaaaccttatacataattatcaaggttttgattttaacctaaattaactatgattttaatcatcattccaatctcatgaagaatttgtaagtgaataatagcctatatctcgacaccaccattataccttaccttccctaagtctcactctagaaataattctaaatatttcacctctccattttacaatttagaactatttcgattacctaagtgaatgcttatctcttgatctcacaccacctaagttgatctacccgatgcccaattatttaaaagttcccctctcaagtaataaatctcataatctaaataataacaataactataatcatataaagtagaaaaatatataacacataatcacgtgaacaattaaaaagaagtagaatcacatgaaaaatattgaactaaactaaaattttcgttaaatcctaaaattaaagtcataattagagatccatctaaccctaacaactaagaaaactagccacgcatagttggtttatcatctcaaaatattgtttataatctgaataatagtgagaaataaagaagaaataagaagaataatagatgaaactcttgaatgtagtttcctctaacagatcattattcactttttacaaaagtcactttaacatcatgtttacatgttcttatctaagttgatgacaccttagttattggtagcaatgatgttgcagtgtcctctcttgttacaactttgtgtaacacttttgaactaaaagatcttggctctttggattattttttgagaaaccatgctaaacacaatgaaaatggcatccttctgtcccaaaaaaagtatctccaaggtttactttgcaaagttcaaatgcaaggaattaaaattcaaaattctcccatgaatggtggcttaaggctctccaactatggtagtgatccagtagaagagcctaccttgtataggtctatcatcgatgcactttaatatgcttgtatcacagagcgtgacattgcctttagtgtcaacaaggtctgtcaatttatgcacaaccccctctaatcacattgggttgatgttaaatgaattttgaggtatctggcagcacctttgatcatggtcttcaacttcaaaagcttacctcactccacattcaagcacactgtaatgcagattgggtagctgacccttatgatcgtcaattcgctacaagctattgcgtgtttttaggagaaaattaagtggcatggcaatccaagaagaagcctactatgatcacgctcttccacagaagctgaattccatagcctagcagtagttgtgcttgaaatcacttagattcaatctttacttactgagctgggtgcccgaactcctctagtttcaatgatctagtgtgataaccaaaggttttttatgcttgttgcgaacccctgttctacatacaagaacaaaacatattgaaatagatctatactttattcaggacaaagttctaaacaaagtaatcaatgcatttcttgttcatgttgctcatcaattgggtaattgtctcactaagcccatcttcaacaatcattttcctttcctaaactgaaacacttagtttgagggaatagattgtcagggataacactactacaatcttggcctttagaggctgttttttcactcccacttataaaaagggaagctaaagggtgtgaaaatacccgtttttttcgaaattgacatttagaggcggttttttgataaaaaccgtaggtataaaattgcattata

SEQ ID NO: 297083 - DNA, 3148 bp, Cannabis indica
aaagaggtatatttcaattaaatataaaattagaggtaaatttaattaattgattaataaaagagttatttttcaacttaattcgaggtgcaaattgcgagctatcccaacttattaactcatcaattggactgcacgcaaacgagggaagcctctgctgacctataaagggatttttataaaaatattaaattttgaataaaagtttacaattttattgttatatagaattttcttacaaaaatactattttttttataaaataatagtaaaacagcaaaacagaataattaaaataacaataaaacaactaaaaaataaccatataacaaccgtgaaaatttaaaacaatacacggtataaaacttatgcagtatttttagaagaaaaacatacaaaatttttgaaaaaaaattcatcccacaaaaactaaaaaaaattaaaaaattgagtatttgtataaaaactcctaactataaaaccaaacaagcccaaactctattagaaagaatagcgcacgttcttttttgttcttgccgaaacgaaaatggagatcactttgaggttcttacacgtgtcatcatttaacaccataactgagtctgaaagaaaggaggtgctgttggcaagtgaaatgtgttggaaatctatctgagcctttctggtcaaatcattcataaaaaggccattatttatttttttctactttattctagtcagtttgggtgttatgaaaatcatggaagttgttggaaaccgttgctttagttcagtgttcttagcaggtcctctggaagatgtgttattgaacaataagaagatttgtgcttacaatcatggaatggtgtccaggcattcttccagattgaacaaaatctcttgcaaattgcctgagaatgagcttggagaaaaccccagaagccagatccttaccaagtccaagaacaagatggaagaatacaatatagccatgaagaagatgatgaggaatccttatgagtatcatcatgatctgggtcagtttctttttcctcctatttgatttttaacaatctttattgaaagttcagtcctttatttatttttgctttctcttctcaagctaatttgttatgatttaccaaaagaatgtgaaaaatcgtctattcttttacctttttaatctatattgttggagtagatctggattctggacctaccatttgcaatttttgaaaattgttttcgactgtacacattttttaactttaaatgtttctttcttttattagcctttttggttggttttacggaatcgcatcagcagtgaaagtgtttcaagatgaaaccaatttatatttgatttggcaaaaccagctttattagttttttaaaaagagtttcttgagaagctaaaatcaaaagcagaagtcacccaaacaggaactttgtgattttggcaacaaaaaaggctttttccttctttaattttatattttgttatagattactaattaactctggtaattgatatgatttgtttctattctattctcaggcatgaactacacacttatagctgataatttgatagtgggttctcagcctcagaagcctgaagatatagatcatctgaaacaggaagagaatgtggcatacatcctaaacttacagcaagacaaggatgtagaatactggggaattgacctgcaggccatagttaaaagatgccaagagctcggaattcgccatatgagaaggccagtaagtaggtttcttttgctgataccaactttgtgcactgtgagttttatatcaagtaacattttgttgattgcataactcaattatgtttaccaacattactaggcgagagattttgatcctgaatcattgcgaaacggtttgcctaaagctgtttcatcattggaatgggccatttcagaaggaaagggaaaagtgtatgttcattgctccgcgggactaggaagagcccctgcggttgccattgcttacatgttctggttctgtggaatgaatgtgagtgtcccaacacacattgaacagtttggactatgaagcaattttatgctattctttccttagtgagattgtttctggacagcttaagaatattttgttaactttgtggtagcaatctagtaatgcactctatatttttttttaagagcagctgaacgcagcatatgagaaactcacttcgaaaagaccatgtggtccaaacaaaggagcaatccgtggagcaacttatgatcttgccaagaatgatcctcggaaagagccctttcagtctctcccagaacatgcctttgaggacatagcagattgggagagaaacttgattcaagatcgtgttcgttctctgcgtggcacttgagcttttaggtaagcattcttgtaaagtaactcgtttgaatttttggcagcctggtaatgaaaaaaaaagatctcatgatataatttagctgaatccaaatatggctctctttggtacttatgtgaattacaaattagtttgtgttgttaaccattaaagttgtcattgttttgggaatcaggtggtgaaggatcaattacagaaaccaagttggtgaaatgaaaacttgtcatgatgcaaaggttgaggaagaaactttgggcattaatggatgtagtaggacttgaagctagaacgctcctttatcttcccctgttctaagtagaggaattatacttaaactatgactgtaatgtgtatttcaatgattctcacaactaaattaactaggaaactaagaatcgaatgaaaagtcatagggggcatggaataaatttgatctggagattgtattcaggtttcttaaatttgtataaatgaaattttataagacttttttgatataaaaacttaaaaacagcaatttttattgaacttgtttctggttgtgaaaagagtaagcaagacagctctgtttggttaagattttatttttgcttatagcaggtataaaataagtaatatattttttattttgtctatttttagaattattatataaagaatattttaatgaaagttattcaaaatgtttcaatatcattaaaaaaaatgtgtaaagcaagaattaactaaaaaaaaagttctcaaatggtctcttgagaaagaaag

SEQ ID NO: 297084 - DNA, 1622 bp, Cannabis indica
cagtcaaggtactaactgaacaatcacttaggcaaattctgatgaagccagaaacatcaaagcacctactcagttgaactaaatcagtttgagatcacttaccagccttaaacattttattatattcgtatttttatttcagtccattattacacgatatttcaattcttaatttcttccacctattttcattattaccaacctttttaatttcctatataaacgtagtcacttctttattttattttcttgtagtgggagtgaatgcgtgagtggaaaactacataaatttacaagctatattattaaacaatatatttgtagatacattcattcatgtcgacctttacagccgaaaataagcaccatacaatggaatcccaatacaacaacaactccaacacaatatcatcacctaagaataacgaaacccagcttgacccaaccatgttgtccacatggtcacatcgcgcatggctcgcatccggctccaccgctgtgcttctatctctcgctaagctagcaattggtgtgaccaactctaaagaccataatttttggctggtggcccttagtagtatggttgcttgtgttgttggatttgtggtagttgaccttgcatctggagtgtaccactgggcagctgacaactatggctgtgcctctactccaatctttggctaccaagcagaggcttttcaactccaccatgagttcccaatgaggatcactaggcatgagtttgttaataggacacatccctttgcttgcgttgtcacttttcttgtgctccctatacacctattttgggaccatcccatcattcatggatttgttggtgtcttctttggctgcgttatttttacccaacaatttcacgtttgggcccatggcgcgaagaatcagcttccgccacttgtggttgcgctgcaagatcttggcatcttggtagggcgttcgcaacacgaagcccaccataggccgccttataactgcaattattgcgtaataagtggcttttggaatgctttcttggataagaataaaatttttaaagcattggaaaaactcttatttctcaaatttggtgtcaaacccaactcttggtcctaaaactgatctatactgctataattgttattagtcactatcacagagttataaggagtaagtaacagtttcttatagtattaaataaaaatatagttattatatatgcgatagcaatctctaaaataatactctatgattgtaggtacgatacaatatgggacttcaataaaaaattaaataaaatgtacaatataatttatagcactttttcttttaattttaatataatttttataaagtaataagttctaatagttgtatcatattcctattcgtgttatgcaggttaatattattttatttgattgatcctaactaactcatatatattttctgtcaagaaatatcaatccttgtgtgtcgacttatgtatgtcaacttttctaattatcttaccgtacatgtacgcttaacacgattaatatcgcttatatgcttatgatcatttactttaatttataatgggatttttttcaaaaatatacataaaatacaaaataattacaaaa

SEQ ID NO: 297085 - DNA, 2400 bp, Cannabis indica
aaaacaacaaaatgctctatatcaaagtctatcctatttgagttataggtagttaattaagggtgtacttgattgagatagttcttttaaagtaactacccccgcccttattttcttcctaagataaatgtacctaaccgtggcctatcatacttacacaaaatttgatagttgtggggtgtaaatgaagtatgattagtgagccctgacctcattttattagtttatgccaccttttgttttgtgttactctaatcagattccaaggatcggcttttattttgttttacttggcatcggaaaattttacctttcgagtagagtacaattttctgggtagccaacaatctttttccatatcatttagtgctaaggttggtttctaaaggtgaaattaaaacttccgtccaattttactatcaagaatataaaattttcgctaaaacacagtatatatgtaaataagtatattctatataatttgtcacccttctgatgcataaatttattttaatctcttcaatccacaagtccaatctaaccattttttgacatttgaatttcaaattaacagatgggggacgtgttgaaggatctaactgctggtactgttggaggggcagctcagttgatagtaggacaccctttcgatacaatcaaggttaaactgcaaagtcagcctgttccactccctggacagcctcccaagtatgctggtgcaatggatgccgtgaggcaaacaatagctgctgaaggcgcaaggggtgtgtacaaaggtatgggagctccacttgctaccgtcgcagtgttcaatgctgtccttttctctgtaagaggcaaactggagacaatgttaaggtccgaacctggtgtcccacttacagtcaaccagcaaatcatttgtggaggaggggctggagttgctgtatcgattttagcttgtcctactgaattgatcaaatgcaggtcagtctagttgttattcttcactaatattcttttgagagaggattaaacgaatagttagtaattacacacaacgcacacacacccaactacttgagctgaactcaattcatcacacgggtttgaattcctaaatgtcatttggattttataatatacaggttgcaagcccaaagtgcattggcaggtgcttcatcagctggtgtagcagtaaaatatggaggaccaatggatgtggccagacaagttctcagatcagaagggggagtacgaggcctcttcaaaggcttcattcccaccctggctagagaagttccgggaaatgctctaatgtttggtgtttatgaagcactgaagcaatactttgcagggggtagagacacttccgggctgggaagaggctctttgattgtggctggaggcttggctggagggtcattctggttctcggtctacccaaccgatgttgtcaagagcgctcttcaggtagatgattacaagaatcccaagttctctggttcaatggatgcctttaaaaagattgttgcttctgagggagtcaaaggtctctacaaagggtttggacccgccatggctcgaagtattccagcaaatgcagcatgcttcttggcttacgaaattacaagatccagtcttggctgagaagattctgatggcctaatttaggtggccaagatgtagttggttgttaacatttttacaaggaggcaattggcattttatttttttttaactctcaatttgtaatttggtttcataatctatattactatccattttggtgttagttgaagaaacattctttctctaaccactttggtacttaaataatataattgcaataactagtagaaaaggggttgtgaaactagactactatgaagaaatacttgcacaccaaactattaaacaagggacctaattgagtggaaaatgtttattgtggatatatatgccaaatgttaattgtgaaagtacataatttaatttaagatatgtatgtatgtagataaacttttacacgttcataaacacatccaaaataagtacccgatatttactaacagctacactacatataaatagtgttaaatactaatttaggtaaatactattttagattttgtgttttgcaaaagttactaattggactctttgttttgtaaactagcaaaatggaccttgtattttttaaaattatacaaatgggatcttgaattgattttttgtacaaataaaacttaataataatctaatctagaaattttatgacaaaattgattacattttttatatttgttcgtgttagaagttattttaaaattggttatattaaaaaataaaattattaaaattgagctcatggtcctatttttactattttggaaaatacagggttcattttatcattta

SEQ ID NO: 297086 - DNA, 2556 bp, Cannabis indica
tattggatctaaaatatttgatgtatcaaatccgatccaaaaaaatactaggtccaaaatattgaataaacctaaattaaactaatatatatatatatatatatgaaatatatctaacgaatagaactgatccaatccaacatccaataaatgttggatcgattggatgattgaaattaattggatcggatcggatggtaaaatctaacattcaatatataattggatcggatctgaataggcctaaaaacattagatgtgatccaataaacacccctaaaattgtaaaattgtggaagagtaatatatttactatttagtgccaaaaacaaagagggccaacctataaagagaattttaaattaggtccattgtcagggttcctatgtcattttcaatctttcgtaagccactatactaatgccaagggtggttatttgttctgaacctacataacctcaagccaaaatcacctaagacaaggacaacctcaaccaacatgcattaacttctcatatgttttagttataaactcttcagttcatagtaagtgggtccttcattaagttttcaagtcttgtgagatattgtgtttcatttattaatgtgctttcattaaaaataagaacatgaagagagatcattgcttctttagattactatgtgcattttaaataaaaagcacatatagaacatagccagtcccatgttttaggggttttttttcttcataataatcaatgcatagaccaaaattaagggattatgaacaatgctcatcaacggactaaagacaatccccaaaaacatgttttggtgtttttaataagctcttcttaaaaggagtacccaaaaacattgtcacataacataaatatattactttctggcctctagaacaaaaacccaaggaggcaatcacaaaatgagaggaagtagccaccaaaaccaaaagagctcttattagttcctttctatggaatggttcctctatgagccattaagctccataatggataacaacaaaagggtggggcttggcttgtgttgagaatcatgggtttcatctcaaaaccaattggtgatcagtgaagtagcctatattgttatatatagcttaatacttttacatttaatccatgtgggacaatactgtgcaatagcttgaatctctaaacccatcatcaaacttcataaaggccttgaaattgagtagtaaacaaaactaacgctatcaagtatcaaacatcttattagaaaacacaaacagtaaaacagttatggaaagtaaaatatggatttgagccatgcaagatattttcaacattctttattttttctttttatttttgatagccgattctttctgactgttgctccatagatattatcaaaaaaaaaaaaaatcaattttcagaccaagtagtaatacgaaaacagtttataaaaaaaaaaagtcgaatttatatatgggattttaaaaaaatctttcaaatatatgacaggttttttgttaggccacattttatggcattttatactttttgggcttttgtatatgaatggatttttagagaaaattatatggtatacccttatatggtatacccacttttattttatttgttttaatttttatctttatttttatatcttttaaaatatacccacttttatagataatatctccattagactccttagattaatgtaaattatatgatagacttaagtagagaataaaagtataatgggcaatctactcaaaaagtgagtatatttaataaaatataatatgaaggtatttttgattaatggatacaaaaaagtagtatttttcaacttatcccatatttgtaagggaaataatttaggatctagtgtacacgtggtaaatttttagtggctcacgtaatattaattttaaaaataattaaaaaaaaaatattttaaaatattttttttttgaaatattaacggctaaaccatcgtaaaaataaaaagcatcatatttaccgttattttcgttcttttgtagacttgtagttaatagatggttgggcccacgctcacaatgtaattcattgtcccataaatccatgacccatgagattgggcttccatttagaccaaatcatattgtccaatcaatggaatatgatccaagttcgttggaccatatttctcttttttctttgcgggagttttacaaaaatattgagttttggataaatgtttacaatgttactatcatatgggaaaaattacttttatactgttctgatctttttttttttcttgtatactgagacatcaaatatcaagaacaatgcctccatctttgacatccacgcatagaaccactacagcaacacgaacacacctagaaaacaaccattaatttcagtaagattgagtaaaaacagtgaaattgacgtcgaataaataatcatagtagaataactgtaaaacaacactaaaacaaataaaaaaacaaaaggaaaaggattaaaaaaaactaatcatcttctgcacaacctcaacaccatatgcaat

SEQ ID NO: 297087 - DNA, 2637 bp, Cannabis indica
atatatatatatatatgtgtgagtattcaggataaaatatttgatctagtggagaagctttcatccttgttggaaggaagatgaggtgaagcttgtaattagtggatttcgaaatgaggttgtttttcttgaaaaatgagttggaaggaatcatatatttaagattgtataagatcagctagtgggcattgaataacaacaataggaagaagccttcattgaagaacaagtgatgaattgtggtttcaatggtactcatgtatcttgaaattatgtttgcagacatgtaatagtataaatacttcacgtcacgttatcataatcataacatggagaatggagatgcattgtgctcttcaattcatgaattaaagtcccttaatttattcttagaattaacaactatacttatactatatagtactagagagctgagagttcttaatcagaagtgcacaagcacaagaatatcaaaccagactaagctgactataattccaatacaacatgaggcagttgcagctgaatatgtaatacatgaaaccattttctcaagtaaagactatagatttagccttgcaaatgtcccaaatgcagactttacctgttattgatttgctacaaattcaaggatcatagaatgcaattttcataataaatgttcacaatgaatctaactttaatagtcttcttagtcatggatgattcttagaatatgttcttaagaaggaaacataggaccaatcaagatgtatataataaaattaataacaatgactttgaaaaccaaaaacaaagacaaaaaacagaacagaaaaatcacaatgtcaaaatatgtgattggattaatttatagtggcaaaccattcacttttgatacaatctgtttcacttgttccatacaatgattaagactactcccaataactaactacttctgtgtaatcatactcaacagaaaatatggggtaagtcacaatagactccaaacacaaaacttcccttaacaataactccaaaatcagatcaaaatctccatcattatcattttcattataatcatcatcaactctttcagctctcccttgtaaaatctttacactcatgtactcattgttcaactgactctgttcctcatcaacataatccatcacagatactatcttccccaacaacatggtctcaccctgatgctgcagcaaaatcagtagccgaaatatgtgttttaagtaccttaacttactcaaaaatttccattcttttaaggcaaaaaaaaaacatcatgatctcaaccaattgagaacaaatcagcctaaaaatctcagtgacggttgcttgaatccaatttagtcttcttcttctattcacattagatacagccttccttgcacaactaatccattgaatatatgacactttattcccttcttttcgagctttttccacctcgtttcgcctttctttaatcaattcaagaatctcgctttccaattcaagcttattcctcactctcgaatccttagaaacatcctcttcgaaatgtgtgtcatctcttctatgtttccatccagaagaaacataatagtacttgatcaacttaagcttccttgacaacaatgtgatcgaaattcgatctttgttagattcttgtactttcttgatcaaagtagtcagcttctgattgagatcttcttcttggctcttcaaagtctccatatcattcttcaaaagaatgagcattgaggtgtttaatttgagtttctctaaagcctccaatcggataaactcgatatcttcgaaatacctcttgtaaagttcatgatctttcttgagttcagaaactattgacaggtgatgattaattttgtcgaatttgtgttgtaagttttgaatggacattttcaggtctaaagccaattgggttgacattacttctacctcttccattgttaaattgtcttcttcatcacgatttgaatcagccattgttgattctaggaagaagaaagagaagaactgatcagacttattgagttaggaatttctgttatgactaaactctgttaaatagaaacattagtaccttgcgaaaaaaatagatacattatatatttgttgtcgttttgcaaatgttgtcgtttttatctttctaatattgtcgtttttaattataaggtttaaggaagctttagttttatctataaaaaaacatataaataaattaaaattgtatgtaaaaaaaaaaaaaaagaaatactataaattaaatagcatttatagtttattttcaactctaaaagagcatgataggttgattaattatttttcaaataaaaaaaaaaactcagaataacaacagtttgaggtgaggtaggaccatttatgaatttaatttttgagtgagtatttttttcaagtttttcactttaaaaatagatatgtcattacaataatccgaagtagtactaaaactttacagatttaccagaatccttttttttttctctcatttactaaaattttgagatttattttcatgtgtagttgcaattctattattaaataaataaatatttactttacttatatagctacttaataaaagaaaatataaaaaaaatacatatttttacacta

SEQ ID NO: 297088 - DNA, 5201 bp, Cannabis indica
tgtaaggttttctaaacttttatatgtttaattttattgttttagagatattcatagttaggatgttaatttaacatacttgttagtaaatctagatcctggtaaaatattctcaacatcttccgtctcttcaatggagtagatcttctctacccatttttcctcttcaattgttgcatcttcaacttcgagctctttcaaacccagcacaacatccatagaaagtgtcttaatggtcctatccgatgagggaggaccaatttttttgtttctaattttgatttggtttttctgatagcctttaatcctttcgccatagctctggtgagatcaccgaaggagagagacgaaaaatctagagtgatatttttatgattttatttaaatgataaagaaaaaataatattaattgtagttattatattaattattaagtcaatttttttttaaaaaaagtcattttgccaattaaaatatttaaaaaattattttactaataaaagtttcaggatattttgccaactcactctttgttaaggccatagctttgttcttaaaaaaggaagcctaacctaatatggcgacttttgttagcgtacttgaggcctgtggtcgaaaagggtatttgagatttgggaagggggttcatggactgagttttaagcgtctcatagacactcctttgcttttaggcaatgctttgatggatatgtatgtcaagtgtgagcttttatgtgtagcgaaagcaaacctttgattagctcagaaagggaagtcgtttcctggacatgcatcataagtagattagtgcaatgtgaacgtcccaaggggtctttagaattgttctgcgagatgcggcaatcaggaattgaacctgataacattttacttacgagtgtgctctctgcttgcgccagtcttggggcccttgattatgggagatgggtccatgagtggattgatcgtagtggcataaaacgggatattcaaatagggactgctatgattgacatgtatgcaaagtgtggctgtataaagatggcattgcagattttcaatgaaatgcttagtaggaatatcgttacatggaattaatgccttgttgattggtttggcaatgaatgggcagggacaggaggcaataggacagttcaaacagatgacaaggttgaacatcagaccgagtgaggtgacctttctagcaattctaacagcttccgctcattctggcttggttgatgaaggacgtacgtactttcatcagatgatgagagaaccctataatgtttgcatggttgaatttctgtgtagggctggagtcttgaatgaggctcaacgattgataaagtctatgccaattgagcctgatatatgaatatggggagctcttcttagtgcctgcaagaccattggaaattttgaactttctcgtgaaatattagatggcctcctagagttcgagtctaaagatagtggggtgtatgtgctcctatcaaatatatatgctactaataaaaaatggagtgatgtaacaaagctgaggaggctaatgaaagagaaaggcataagaaaggcaccagggtccagtgtaatagaggggaatggtaaactttgttttcttaattttctgttttcggaggcttattttatttatttattatgatgcatactatttgtataataataaaatcagaaaagggaaactgatttaataaactagttagatttgtttttcgcagaatcttcacgccacaacttgaaggaattaatttttggtcaagaatctatacatttcttttttccagacaacgaaccattgctttttaatagtttgctctttgtggaagatgattgtatttgtttttccctctctaaagaaaatgacattgaataaaatatgtagatggggacaagatataatctaaacattcataaactaaaagagaaaagttcgtgtttaggttctgtggaagaataagtcttgagatgattggctagtgtaataaatatatgattgcgctcatgtagcaaatcagtgtatatatattatagatataaatatatttcttaataaaaacttgtacatgggaaagtcttttgaatatgcactgtagtggtggtaggtgccatataacctttcttcttaccaaacctgaccatagctgatggagacctcttaaaggtttttgccacactgatacagacaatatttgcaatttggaagaccaatcttttctgataattaattgagctttgctgtcttctgtttgttttctcttgtagatttgtgctactcatttgcaagtgcatgaatagaatatactaaagaaggtggacgaagtgaataataacataacggcatagtgatgatgttctgaaagatgttggaatccattctcttgaaagaattaatacttcaatatacatgtattatgtataaaattttgtgttgactcaaatagttcaagttttctaaactttggatgaaagaattaacaaatttcaaccttgaaaagaaaaataaaattaaacttcaattgtattctgattaagagctgtatacctccacctttccttttccacaaaatctgcatctaggaattgtgctacaaaagcccaaagcctgtatgtgtcttcgaaattggccaggaaaccaagtgcagctgtaaccacacttattccttgatcacattttcccttcaagttgttgggtgctatttgatttgatcctcctcctcttgtctttaggacactgttcttctcttctgcatacttatccgggaagtgaatgtggtgtaagaatccatagctgagagatatgttgcttctatctgcaagtttctgtacaagaacaggttcaaccggttctcttttccaatcaaatatattgaatgccaatgctgcccccctatcaaattttacctttggtccatatatttttaccaatcgaaatccctctgcatttggatgttcaagcttcaacaaagagctgaccagccagtttattaagtatcttgctcggttcgtaatcattatcaatccaagtgaatcaacttgatccaaactcctgcattcaaagtctaatgccccttttctgcttattttgtcatgctcaactggtatctctgatttcctcatttccagattttgtggttcctccaatcttgcagttatttctatattttggatgttggatgactctccttgctccaattttggtgaccgcggtgtttggttcgataaaggaccagagaaggagctcgaggaagataaacctgcttcttccaagccaaattgtgttgtctgctcaatttctaaatcagtaacagaggactcatctgctaactgaagtaactcttttgctggaacaatattaacaatccctgtacttgtagaatcctccaggtttgaaatggcagacttcttgacaaagaggcatccaaacccagatgggttttctccaaaaaccttgtagaaagaacagatgaggaaatcaggtcttaagagagagaggccaaagcaatccatgtcctttggtcctagtgcacaagcatctatcaatacatcccaaccgttctcctgtgcaacgttcatccacaaataagggtatctggctcctgtgactctggagtgtagtgggaagacgaaaagccccctcttcttcttttgtttcttcttgctgaccaacatgttcctcaatttcgatgagtggatcctcaaccttggccatgaaaattctgctgacatggcatgagctcctcgtttctctgagctattaatcattgactccactgcttcactctcataatcataaactgtcaaaagcttactactagttttgaaggggtaagaatcagcaacaagtttgaaagctgatgttctgttggctgtgaaaaccatgctgtaatcactttctgaaatattaagaaattccattatccttcttttcatggaagattcgagctctgattcctgtccaccatgaagtaattgcacctttaaattacctgtcttatacgatatgctaaagaaaggaaaactcaaactctgggaaggagatgaaaagagagaaggagaggaacaagacgaagatggaaattgtgggtctttctgcttttgtaattggtcaaaagagaacaaaccaataccgatgtaatcaaggcaggcatggttggacaatgaaaggtggtagtattcttgatctcttatatcatcaacttgatgagtttcatagtattgagggtaggctttaatgaactcaaggaatgactcttctaaagaaggaagagtctcatggttggtgaagcgggtatttgggaagatggaagctgctgtggtttgcacaaaatctcggcgccaatcggaggaagtgctgccggacttggagactgtcttttgtgactctgtcacgttgaacaagggtgttgggcagcagctgtagaggaatacttgtgaggcctctttcagccttggagagggcattttttcttcttctttatttcaccctttacctcaaaaaaacaaatgttttattatctttgttatgtattcactgtatagtttctcgaccaatcagctttgtagtcaatcatttcgtcggccactgtgctttacaggattgaagaggctcccttttcttttcttctctttttcttttgttgttgtttaattgggttttagaacataaaagtatgtatatttgtagaattcttactatactttagatgtgtgtggaaggtggattgggcaatgtgaatttcccttcatataaagttgactttgtctttcgtttcgcttggttgactctacccacttcgaatggctctttggatttagccggtttggaattgttttcaatcaacaaaggtccttgatccactactgataatccaatgccaagtgtgacattagaagcctcgtttgtcttgcaacactcttttggactgtgctaaaatattagataagattattttactgtttttgaactgtattattcttggagttggtgcaggtaatactaaatttatatataaaataattaaaaaaaataaaaaaaattaaattagtaaaataatacacttaactttagaaatttaaccgaacgaaaagtggtttaatcaccaatattcttttttactatatatatatatatttaatgaatacgtatatctaaaattaaaaaaaaaacagagtaaaataaa

SEQ ID NO: 297089 - DNA, 5175 bp, Cannabis indica
tttttagttaaataaaagtgttgttaatgatatttttcctagtagtgacgagtctcttgacctctcaagcaaccaactttctggctctattccaacaagtatgtcaaccatatcaacactagctcacctgatcaacttgtcacataacaggcgagacagattccaaaaggaagtcagttgcgaactttcaacaatccttctcattttaatatatagaaaccatctttgcgaggatccactgcctaataaatgtccaagcaaggtcaaccaattgaacaacctaaagaaagttctagctatgaagacaatgatcatgatgagaaggcaagtaggaaaagatatgatcttactttcttctattgtctagatatgctattggtttgtggggagttattgggactttaattgtaagaaggagttggtgacttgcttatttacgtttagttgacaacaccaatgagcgagtactagtgaaagttgaagtggaagtaaccaagctgaagaagaaaatatcagagagaaccatgctggtaagtcattgatagaggttactatataccaaaaaagagtcttgcatatcatctttttttgctcctattttgtggattatgattttttctattaagatataatgttttacgttgtgtggtatgtttttaatttttttgttgaactcgttgtgtgatgttagttgttatggtgtcatgagaatttgaaagatattgtgttttgcattatgtaatctgtggtgattgttcgcccacttaagagtgatttgatgtggcagctgagtttgcttagggctattatgttagctagtcctattgtctagctataaaaaggaattctctccttcacaacatttttatcagctttaaaattaaaaacttcgatgtaaagagagtttgagggttgtaatttgagattgttcttccttgagaagacttctctcaatgtgaggacatttgtaacaggattgtaaaggagtttaattctgttatttccgttattggttgttgtactttctgttttagtagttagtagttggtttgttattagtttgttattttccagttgttctctactgtaatagattgtatataatcctttacatctctcataatggataaggcttctctttcagtcttcctctttctctctctttcatcttcttcatcgttctcttcctctgctctaatttttcttccatggccagatataataccagatcaaacatggtatcagagccttttccaccattggcagcaaccgttgttgttaatggccctggcaatggctcctccaatacgtaggtccctcaatcgacttcaaatccctttgcaactctgtggaacagaactcgtgattcaaagaacaatcgcagtcccatttacttcagtcataccttatccgtgaagctcaatgaccataacttccttctttggaaacaacaagtccttgctgccattagaggacatcagctccagaaattcattcaagatgttgctcctccacctcaatttctttcagacacagatcaagctgctcagagattcaatccagaattcttgaattaggagattcaagatcaacttcttgtatcatggttgttgtcttccatgaacgagacccttctcttcagaatggttagctgcaactctacaagacagatctggtgtgccctggagaaacactatactcttcaagtgtcatcaaaaattctggagtttcgaactaaacttcagaacttaaagaaaggctcatcatctttggatgagtatttgctcaaagtcaagcaacatgtggatttgcttgcttcagttggtgaatctctgtctgctcgtgaccacattgctgcaatctttaaaggtctgccaagtgagtatactgtagcagaaattgataccttcgtcatctcatccaatactcggattgaagagtatactgtagcagaaattgaagccttttgctagcttcagaatcgaggatcgagaagattgataaggaaattgatctaagtgctaatacagcaactgtggacacgacctctcaatctgaaaacttgcagcaactagaagccaatcttgctcatttcaacaggaactttagaagttctggcacttcaagaggtcactactatccatctcaccaaaaattttcttctcctgattcaaatttctttcatcctaattgaaactttcatcctggcacattctctcgaggagcacccctgcctttcaatgttgggagaggttcatacatgcacaccagaggaggaaagatgcctcaaactcagaatagaccacaatgccagctttgccataagcttgggcacacagtcatcgactgtttctatcgttttgacaagagttttacaggtgtggctacacctactgatgctccctcgatgcaggaaaatgtagctcaaaacaccattgctgatgatggatcatggtaccctaattctggtgcaactagtcattgcacaccagacctccaaaatctcatgacagctgctgaatacattggctcagatcagctctttgttgttaatggtacaggtctgttaattaagcattctagacaaagtcatgttatttctaatgatcctactaagcctttgattttaaataatctcctccatgttcctaagatcacaaataacttgctaagtgtctctaaatttgctcttgacaataatgtcttttttgagtttcttgctaatgtttgctatgttaaggatcaggtttccagggatattctcttgactgggactctccacaatggcctatatatttttgatccatgccaattcaggatgctatcccaatctgccaacaaaaagagtccactgtcgagttccaaatctgcttttactgtcatttctgggtctcagaactttggctccagttccaagacctattctcaaccacttctcattgagtttgagctatggcataaccggttaggtcatcccttaagtaaggttgttaagtctgttctaaaatcatgtaatattccttgtaatgagatctctaaaacggtgtgtgaagcatgttgtttaggcaagatgcataaatttcctttccccaaattttcaccaactgtctactctgagcctttacaattagttgtttctgatttgtggggaccttcttacattgtatctcacaatggttatagatattacatgagctttgttgatgcatatagtcgatttacatggatttacttgctgaaaaacaagtttgaagctcttaagacttttcaaacctttaaggctgaaactgaacttcaattggggaagagaatcaaagtttttcaatctgattaaggggggaagtttaggaactttactgaacctttaaaacaggctggcataatccataagcatcctttccctactactcatgagcaaaatggattagttgagagaaaacatagataaattgtagaacatggcttaagtttacttgctcaagcttccatgccattgcaattttgggatgaagcttttagatgtgctgtatttttacataataaactcacacctgttctaaaccaacaatcaccaatagacattctgtttcaaattcagcctgaatactctagtcttaaagtctttggctgctgtgttatcccaatatccgaccctataataaacacaagcttgattttagatcctctccatgcaccttttgagggtatagtctcaatcacaaaggatacaagtatcttgacaccaatggcagactatacatctctcgagatgttatttttgatgaaaccaaatttccctttgccaatgaaacaaaaaatcgcgcaccatgtccaactgatgtgttttctcaaagtgtcattcctcttgcatcttccaattacagtgttgaaactttgtttcccactgatgtatccccaaagtgctcagtccacacctatgccagctaatgttgacaatacaatcatgcctacttctggagccacaccagtcaacatactagtgtctattcctatagcttctaatgatcttcccaatgttgtgtcaacaaaatatgatgttcctaacatagaacaacctgtctctactgatccattaccttgttgtgagtctcatagcctatctggtgttcctcagtcgcatcctacaaaccccacagttactcaagttggtttcatcatgaacaaaaatagtatgtaaacaagagccaaatcaaggattcactagcataaacttctcttagcatctcaagagccatctaatgttaaagctgctcttaaagaggaaaaatggtgcaatgctatgtatgatgaaatggttgcacttaaaaggaataagacatggacatatgttcctctgccacctagaagaacaccgattgggtgtaaatgggtttacaaagagaagcttaaccctgatggcactgtaaatagaaacaaagcacggctcgttgccaaagggttccatcaacaggctggtttcgactttacagacacattcagtcctgttataaaaccagttcctatacgtgttgtgttatctcttgccttaacacacaactggtcaattcagcagctggatatgaataacgcattcctaaatggagatctaaaggatgaggtctatatgacacaatcctcggattttgaacttcaagaagcccctcatttggtttgcaagcttcacaaagccttatatggccttaaacaagccccacgggcttggtttgagaaacttcatcattgtttggaactccttggtttcaaatcttccaaatctgatcatagcctcttcatcaaacacacttcttcctctgttactttgatattggtgtacgttgatgatataataatcacaagtagtgattctaccataattgatacattaatcagggacctacactcaaaattttctctcaaacatctcggccagctgcattattttttgggcatagaagtcaaatctacctcaactggtctgcatctctctcaagggcatttttcgtgatctcttatctaaagcttaaatggatggagccaaatctatgcctacaccaatgattagtgggctgaagttatctgctcatgaaggtgatcctgtccctgatccaacattataccgttctatagtaggtgctgttggaaaattatttttaccaggatcttagatctattcac

SEQ ID NO: 297090 - DNA, 2334 bp, Cannabis indica
gtctatctgcctaaatactctctctctcctcctttacctttctcttcctaatctccgtactctcctcctcctcttctgcaacttccaagcacgtatctgaagtcaactaatttgttagattgaagtcaaatctatctatctctctctctctctctctctcactaatttggtaagttttgaaggtaaatttttcagttttttctttttttctttttctctttgcattttggtaaccctcattctctcaccggcgcggaagctccgcccaagctgctatacccgtagtccagtcgaagctccaccaaactgctgccaaggtaacatattaatttaattagttatgatatagacataatggttaacattttttttttgtttaagtttacttttacttaattgccttacaaaaaaaaataacgcccgctctcaccttaaattataagtttaccactgcatatagtgtaatcttataataactttttttatatacaaaatgttcgtattcatcagatatgagagatgttgctcgttctcgtgagagtgatggaggagctgaacctccgccaggaccatcacgcattggggttgattgtgtgcaaggttacaaatattttaattatttgtatatttttacaactatataaattaatttggccattctgtttacatactaataatcaatgaatatttaaatataatagcggctccaacaaaaaaacgtggacgccataaaggattgagtacacgagaaaaaaggagagacttaggacgtccattacctctcgaatgggacgtgaaagggaagacatataaggaggtaggatcttacagctccgattttagtagggagttagggttactggttcgacgatgtacggatcccaacttcaaagattgggcacaagtccctcaatccgtcaagagaaggatattatcaaatatagaggttaattatttctatatatttatgttgattttctttcattattatatcatatttactaataataatagtttgtttcataatcataggacgaactatttgacattggtcgccaaagatacggagcagagtatattccaggaattttgagaggcatagacaaatcctgtgctaaaaagtactctgaattcaaaaatgaattgtataatcatatgaaaagacatgggacaacaaaacaatatgatggatgtactgcggatcagtgggaaaaggctattgagtacttcgagcaaccagaggtgaaggtatactattgtaattgtattgaattttttacttaagtttcttaatttacaataacacattttgtttttatagaaacgttctgagattaactcagcaaacaggagaaaattgaaagaactaagctatgggggttctcaatctatacctgatttgcgttacaaaagagtatgttaaattaatacataatttttattctcttatctttaatttttaaattttacaaaaaaaaaattgaacataacagcgcaatcctgagactgggcaactagcaccgatcccagaaacatggcaagcaactcaccataaacatggcattggatgggtgtctgaaaccgccaaagaaacttgggtatgtttgtttttttttttaaattttcagtttttttactctattcaattaaatttatcattgtatgtcaggaaaaaatgaaagccatacgtgaaacacattcgtcgtcagagtctaccgagtctgagagtacggaaccaccaagcactatagcagaggctggagacaaagacttgtgtctagtccaaacggtcttcggaaagcgtcgaggccaccaaaaaggatatggccgcattattagtacgagggagatgtttgatccaccttcatatgcccaaccttctgcacctcagcctcaacctttatctaaatcgaaagatcctgtgattgcagacttgcaggagcgtgttcaacaattggaggcatacattagggcgaattctatcatcccaggatctcagtatccacctccaccttctgacgattctgataatgtgggatccagcctatagatgatgttttattagtatatatttttagtaacgaatattgttatttgtgtttagaaaaagttagcactgaattgtaagtttaattgtttaatgatatggatctcgtttggtatgctatattatattattaaattatcgtattgtattgtatggtattatattttatgggatatgattttatcctgtgatgtactttcacggaatacggaatgtacattagatgagtctcagggtacattaaatgagtgtcagggtacgtttttactttttaaccctaattactc

SEQ ID NO: 297091 - DNA, 5549 bp, Cannabis indica
acctggagtgttcggcctcgggacacctggggttatattttgtaatcgctgtgcaacctggattatatgtattttggagtattaagtttaaaagtttgaaaataggatctcgacacttgtaaatattttgatattatataaagtttaatatttaatataaaaattttaatttgacacgtttttcaagaaaattctttgattggcaaagtttgcctacattatctgtgtgaatttccactcacaagaagtagtgaattggtcctaaatctttgagagaaaatgcattgtttagaccagatatgatgtgagagattagagcagagtttgggctagtgatgattatatcatcaacgtagacaagtagtatgacaagatttgagcctattccatgtataaagagagaagtatcagatctggagctatgaaatccctagttgatgagtgtgtgttacaacttgtcattctaagcacggggagcttctttgagatcgtaaagtgccttgtttagcttgtacacataagagggatatctagcatattcaaatccttgtggttggcacatgtacacagtttcttcaagttcaccatttagaaatgcattgctgacatctaactgtgtcacaggccagttattagaaataactatagaaaggacaacccgaactgttgcaggcttgaccacagggctaaatgtctcttcaaaattgatccctggtgtttgaagatagccctttgctaccaatattgatttgaatctatctagagagtcacctgcattaagtttaactctgtgcacctatttatttccaataacatgcatactatccatgtaggggaccagatgctgagtaccaggctttttgagggaactaattaatctcagactgcattgaagcaaaagaaattggattattcaaggcaactttgagagatttgggctctgcttggaataaggatttgggcaggggatgctttgtagcaaggtaggattttagtttggaaatgtcgttatgagatctagttttcatttggtgtttgcgttcaacagcagttactatggcttcattgggtgtttgatgtctgtttaggggagatacagatgtatgttaacttgagaaaataggtgtagtagctggttgtttcaaagcagcaaggggtggttcagcaaatgatgatgatgcattagttggtggtgcatcggtttgttatagatggtaaaacattagttggtgtagaagcaggttgtaatgcatcaaattatgctacaatagacggtatgtttccctctgaatttctcacaattgtggtgtcattagaatctggatcctgaattggtataactttagcatccgatgtatttgtagtgagaataggtgccaaaccagttgagcagcctagaacaggctgttcagtgggcaatgttgcagcatcaaaattgggagtattgcttgtgagatttggtgcattttgagttgcatgagcatgattctcacaagtaggagattgggattccatatgcagaacaggttgaggaattccattagaagatgacataaaaaatattgctgtaggattcgtagttgagttgacagttggtacctgattatttgaagaggatgaatgagcagggaagcatgattcattgaacaccacatgcctggcaattaaaagtctgccatctttattctcaaacagataccccttatgattgttggaataccccaagaaagtgcacagttgagatctatactccatcttgtggtgattgtaaggtcttaagtaagggaaacaagcacacctaaatgacttcaaaatagtataattaggtgtgttgccaaacaaacattcaatgggagaaatgtgacatataacaggtgtgggcaacctattaatagtgaacacaacacactaaaatgcaaaccaccagtaagagaagtccaaaccagattgtgttaggatggttaaacctgtttcagtaatattcctgtgctttctcttagcacgaccataatgttcatgtgtgtgtggacacgagtgagtgaaaagaataccttgatcactcagaaatctagtaaaagtcctgtactctccaccccagtcagcctgtaaattctttataggtaaattaaattgcttttcaaccatgcttttgaacctaacaaaggtatcaaaggcttgatttttctcaactaagggaaatatccaagtgtacctactatagtcatctacgaagtggacataatacctatagccatctttagcagtaatgtgagagggacctcaaagatctatgtgaattatttcaaggggtttagaggctctgttaagtgatatacggaagggctgcttatggttctttcctagttgacaagcagtgcaaaattgtaattgtttgagggagcctgtatgaggaaccagaggtgaaattttggataaaacatttggagagggatgtccaagttttaagtgccatgtattaacatggttaagttgaaatgtatgaaaaatagaggtattattgtcaaaagagaaattgtcaatgttatttatttcaaacttggtataattgtgagattgcataacattgcatttacaagaattggaaatataagattcagacttaacaattgtactagatgtattatgacaccgaggtgattcctggtaacttggacctagtgtggtgtctcctagctggtacaacttgctcttaagtttctctttgagaagaactctcttcgtttacttgtcattaacaaaatagcaagttttgtgaaattcaaggaaaacattattatcattagtcaattgagaaacactaacaaagttctttgtaatggtaggcacttgaagaacataattcaattttaatggaaaattagtagaaaagggtagagaagttgtaccaatgtgagaaataaccagcttcttaccatctccaacaacaagagagtgaggaccatggtaagaggctgagctttcaagattttatggattatttgccacatgatgagtagcatccgtgtccacaaaccaacaattatcatccctaaagtctagaacaaaggattttgagaatacttatcgatcatactcccaatcttgtacaataacaaaggcacgaggtgcgatagttcctggtttgggagtgacccaagatttcacaaatcggtagtgataagtgggtgttgtgttgccaaatcgaagacaaacttggcattcaggttgattagattgattgactagtttttggtagcttcgaccctgttctgggtgccttgaggtggtcaataagcgttggatcttgaattgccatatgtcagattagcttgtattttcatggctaattcattaacaacattgtgattgtccaatctactttcatgagagagaagaagggcctgaacttcttcgatagaaagaagatcacttcttactgtaatgcctgatacagcagagtcgtactctggttccaattcattcaggagttggagaatgatatcttgatcattgacaacagagcctgcgacagctaaagaatctacaagattctgaacttcgtcagtgtaatcagaaatcgagagattacctttacgaatggtagagaattgactctttagctaaagaagcttggcacgagacttactgttaaatctttgttccagggctttccaaatagtggaggatgactgaaatttgcaacagaagcaagagtgcctttagacatggaggatcaaagccatgacaagagcagctgatccttcttttttcactaagcaaacgtaggatttggattgccattcaccagagtagagggatgagggacaccatgaaacaagatatcatcgagatcatggccaatcacagtgggaacaacttgtgatttcaagttgaggcaatccaatttgatcgtaagagaagatgatacagaattagagaacagattccaagaaggaatcgctagagttggggatgcgggaggtgtagttggagcaaagtggctggtaggatcaatcgaggaggactccattgacgtgtgtcagtagcaattgataccatataatagaaaagaagaagaagaaaacagagagcatctaaaaatcaatttcttagctagaaacaatggcattaaagaacacactgaactaactagagtaagcttttatttatagaacccaatgttgagtacaatgcaagaaaagaacgaaagcataacaattaaacttaatttgttatacaatctttattttattttagagcattgttattgggtaccagtggtgcctagaacccttaagatgtgtcgctttgcgattggctagcgatacttcttaaaaactattatattaaactatatgagatccgatactaaattagaccaatagccatattgacacataggaaggtgtttgtcactactggtgccttttagcatttctctttattttataacctgcaactaaataatacttaatacttataactactagttgtcatgactgtctctaattaatctgaaattttacttactgacgtgaaattctttctttttattttagtatgctaaagaaaagaattgtacagatatgagaaaatgaagatacgtacacaaagcataagagagattcgtgaaagtgaagattgagatatttggttttattagagagtaatactaaacacaaagtcacacgttttatataatcattgtaaatattcattaacttgatgccaattcatctttcattttcatctcgtatttgatatttagtagatttttaaaatgtagagttggtttggagtgtacgtgaggaacactcatctatttatatattctaaaatatagataatgagacgattttttttaaaaaaaaaataataacttattaacttagtttaccattaaagtaatatggtattagcaagcacataatagaaaattaagtttaattagtaaactaatccaacaaagaaaaagaaaacagttacttacagtgttactgacacaataattgttgttggttttttatttgtttataatttttcaccacatcccaacattaaagtatataaggccaatttagaacagcctatgatatatggaagtgaggaccactttcttcgttatgttatatattaaattttcactttggccaataagaactgtatttcctatgaacaatattatcatttctatattacaaaaaatatgattcttactacttggaatagaacaagcacaagttcaaagtgggaatctctctttctgctattttgatatggtttgttgagataaccataatgcattatttctttcaaatgaacatgtgggttatttttatttgcttggtgtttgtttcgaagcaaaacaattattaatcaacacatcaattaatattatttgacgattaattaatccgaatgaaaatataaggatgaaataacaataagaatagacatttgatagaatcaaattttaaaatgtatacaaaaaattaataaaaaaattattaaaattttcttatcctgtttttttcttttattttaaaata

SEQ ID NO: 297092 - DNA, 4268 bp, Cannabis indica
ataatgacttaacatttaacggtcagataaaaaatataatttaaatattattaccactaaaaattaaatctaggtatttatttacaataaaaaattaaacttggatttatacggcaaattactttattttttatgagtaaatatcattttggaccttgtattttacaaaagttaataattggatcatctgttttgttaaatgataaaataaacctatatttttcaaaatgataaaaatatgactctgagcttaattttcaacaattttattttttaatataaccaactttaagacaatttataatacgaacagatacagaaaatataactagttttgtcataatatctctagattgaattattattaagttttattttgacaaaaaattaattcagagtcttatttatacaattttgaaaaatacaaaatttattttatcatttaataaaatataaagttcaatttgtaattttttcaaaacatagagtctaaaatgacatttagtcattttttaatagacatgtaaataatcaaattgagagaagaataacgaagagcagatctattgttggtgtatagaaatgtgaatattaaagaattgagagagtagaagaggagaaagaaagagtgttgttatttactaatcgtagtattaatatataatccttgaggattaatgttggaaacttcaatgtgaatagaacacgcagaggaatgatataataataaattaataattgtaaattgacttgtcgtttaacaagcaacatcttcgatgtttccgtctcagctaaatatgatttgagttgttcattattcaaatttttatactaaaaaatcataattattcaccaaagaagcaaagtcgccgacgcccttggagactttgactctttgaacgagtagaactacagaagaaggagaaaagaatattacactttattgttatacgacaatgtgagtgagtcatttacttccttttcaacttcttctcttctaaatcaataacctaaaacccttcttttctttgccccacaaaagaaagactcttcttttatcattaaagctttctgcttttattattttctctgggttttggaagggatagagttatttatggctggattactagagtttggtttagatcttcgaatggaaaccagacaagaactccacttgggttttctatttaagctgaatttcaggtaattcaagtcgttttaaacatttgggctctttctttctctctctatttttctcttctttacttgaaacgttttcagctttagatttttttggtgttggctatctgggtttttaagatctaggcgaaaaatccgaactttgtgacttttcttctttaatttactaaatcagaaggtttgacctgagttgggacaacctaggatatctcttctttaggaaatcaataatatttgactattttattgatcaaatttgggtttgttcaagctttacctgagagattcaattgaattacaaacactgaggaaaaaaaggggaattttttgaatttggtggttccataaacaaaattcagattctgggtcttttacatttctgagtttttaactatacaaatgatgggaggacattctagcaaaccgtctagtactgattcagtacaaccacaaccacaactacaaccacagacacagacacagccactgacaccacttgaatatagtaaaaattcacagtatgaaattgatctaagctcctacgagacagcttgtaaacaagaccctagtttacagtcatttgatgctgttcttcaggagagaactaacagagtcattggcacccttgccactggacttgaggttagatctttgtctttcaactcactcaaagagatgactgattgtttacttgagatgaatcaagaagtggtgaaagtgatattagagaacaagaaagatatatggaacaatcaagagatgttttctcttgttgagatgtactttgataacagtatccaaactttggatttctgttctgctcttgagaaatgtctaaagcgtacaatggggaaccagcttataattcgagctgcggttaggaagtttgaggaagaaactgaatgtggttctagtgggagtagtagtagctttgccaagacattacaagaactagctcgattcaaggaggctggagacccttttactgaagagttctttgtgttatttcaatctgtgtttaagcaacaggtgacaatgttggaaaagttgcagaaaagaaagagaaagcttgataagaaactgaaatctatcaagacttggaggaaggtatcgaatgttattttcgtggcaacatttgtttcggtgttgattttcacagttgtggctgctgctattgctgcaccgcctgttgttacagccctgctgggtgcattggctgtcccgataggctcggttgggaaatggtgtaatgtgctttggaatcggtatgggaatgctgttaaaggacagagagcattaaccagctcaatgcaggttggaacttttgttacactcaaggatttggagaacattaggctgcttgttaacaagttggaaattgtgattgagtcactgatggttcatgctgaatttgcttttactcaagaggactctttaaagatcgttatagacgagatcaagaagaagctggaagtgtttactgaaactactgagagcttaactcaacagaatgagaagtgtattcaagaaataacaatggcaaggagagtgatcatacagagaataataaggcaatcatcaagttgagtggccagacctttactggttcgggttttcgttgcaagtcgaaaacatttgtaaggtaaaaatttcacctcttgttcttgggtcaaagactttgtttgatccttcttataggtgaaaattggatcatcaccattgttgttgatcaggcttatactttgttgtaatgaatatctgaaagtttttatatagaataatacacaatttattttatttaagtacttttctatgttacaaggttaaagatttgtttggataatgtaaagtagtactcgtaactaactggatatggatttttcttactttcatcttttggtaaataatggctgcattaaagtcaatttgaactaaattaggtgcatttagaaaaaatcactttgtacttaaaattgattgtaatttaaattattattaagtttgatgtgtttgtttaaccgtgtaaatgtaattggaagtaattgtctctattacactctaattaattaggtgtggttatgaaatattactatgttttaaataataaattatcatacaatatatttgagggtaaatactattttagaccctgtgttttgcaaaagttaccaattagattttttgttttgttaaatgataaaatagatcctgtattttcaaaaatggtacaaataggaccctgaactgattttttgtcaaaataaaatttaataatagtccgatctaaaagtgttatgacaaaattatttacattttctgtatctgttcgtgttagaaattgtcttcaagttggttatactaaaagaaaaagttgtcgaaaattaagctcatagttctatttttaccattttgaaaaatacagagttcattttgtcatttaacaaaacagaagatccaattggtaacttttacaaaacacaagatccaattggtaacttttacaaaacgcaagatttaaaatgatattattatttaccttatattttattgaccaaattgataattgattttgtcttctaattaattctaattagttaggtgtggttatgaaatattactatgttttaaatagtcaattatcatacgatattattttattgtgcaaattgataatgattttgtcagatataaaaataagaattcatataatttttaattaacatttaaacacaaatataattttttttaacagttaaacacaaatataattacattatttaggtagtgtttggtaacatttttactttttaatttttaaaaaaaaataaaaaatgcgttatatgaatttcattctcatctccgggtctgggttaggatttgagtcggggttcaggttccaaggtctaggttagggtgagtctaaaataatgagaaaaaaaaaagaaatttgttttaaaaaaaaaaattgaaagtgactttttttattttttaaaattttgattctcaattaaaatatttaaaagtaaaaatagttttatagattatgattttagaaaatattttta

SEQ ID NO: 297093 - DNA, 5522 bp, Cannabis indica
aaatgctccctgaactattgagaatgttgactttaaggatttttgtctaatttcattcagttttactatttcagtgattgtttatatactaaatcatgctccccagactttaatatctaccaaatcatacccttcgaactttgacatgtactaaatcatgcctcctaaactttcatccatgttagatttttttactaaaattggacaaaagtccttaaatccaacaatcttaatagttcagggggcatttttaactaccttaaaagttcagggggcatgattttgtacatgtcaaagtttaggggacaaaaattctaattagtttttttttttatttttcttttaaattgttttttataaattttaaatcttaaaaataagaaacttaaattaaaatagaaaaaatgatataaatataatattgtaacaactataagagtatctatgtgttatttacctctcaaatgaaatggtggtgacactaatgttagtggttaatagtgcatttacattaaaatgataataaatttgattttgggttggagagatattttatattaaaataaggtaaaagtgtttttgatgtagtgaattggagatgccatcagtgatcaaaactgtctatggtttgcctatttactatttaggaaagaaactggtgacattttattaaatttaagctattatacatagtagagtttagatacaaaaaccatcctctcactgaacaaagggacactttcaaatcattattataagagtccttacaaatttgttattcagatgtttattcattaaagatggtagaaacaaataaacacactaccatgataaagctctcatagtgaaatttaaaaaaaaggcttcaaagggccagaacaaagcgagtctgattgctcagcggtagctgcgatagttaggagtatacatacaactctcagcatacttgaaaagatcagccggacgaggaagacgagtagccaggcctaaataaacatacacacgaattcaaattaaatacaaactaaataatatagatgtatttgtgtgtcatatcttggttggagaaatggaacacttaccaagttcatatgccttggcagcaacactggcagctatctgagctgaaatttttctgatgttagaaaatggtgggtatatcagtcccatatcataattctcctttgaaacttgtcctgccaaggcttcagctgttttacaaaaagaaaccaaaagatgaaagagaattaatcatttgccaatttactctcattcccacacctattactaaataagaaacagaaatttgggccttttctttctgatttaatgaaaagtttcacaaatatttatccacttacaggctgccagaagcatgtcatcatgtacacggattgctccagagattaccaaaccaagaccgaatccagggaagatgtaagcattgttggcctgaattgaaaataaaatgcaaagttgagagtaatctctaagtagaatctaacttttattgtaagagtgtaagtagggaatatttcaacctgtccagagacatagactttcccattgtactcgaaaggatcaaatggacttccacttgcgaaaattgcacgcccctataaacaaaacaatagccaaaagagaggttaatgttatgtcctctggcattgtatcttgtctagttatttggaaactaaattccttgactaaggaatgatagatagaagtaggggttgaatacctcactccaagtgtaagcttcttctgctgtgcattctgactgtgaggttggattagacaaagccagaatgagaggtttctgcaaatcattcatttacagcaacgtcagtgaagagagatggaaatagagagataacacaacagaggaaggaaaaatacaggggaaggaaatacaggagggagggatacctcattataggaggacacagcttcgatcacttcctttgtaaatgttcttccaaccccggaagatccaatgagaactgttggtttaattgcctgaagaagtacaaaagtacaatgaaagatcaactacttttaaatattgtgattgggattcaattgtatttaaatattaacttaccttgacagcacttaggagatccttgacaggttcatgttcatgagcccaaggctgcttaaagtgctgaagtgaatctttgcgagagctaacaatcaatccctgtataaatagtttaccggatttataaaactcgaagagaagaaacagaaaagaaaagtagcaatgattatcaattaagatcattattttgttgagctttatgcaacctttgaatccacaagccagatcttctttcgtgtctcttccaacggaacctttgtctacaagtgacaaataaactattatgctaaagtccaaggtaaccaaaactacatatgacacaattctgaagcagtaagataattacccgcttcgaaacctcaagagctataagctctgctataccagttccagcctacaatcatgaagccacaaataggtcagttaatatcaattataactataaagctaagaaaaaaaaaatccaacatcaaaatttatccatgtcttccaattgtaaaatcgattactgaataagaaaagtgggtgaagagaagaattggtcatacttccccagcaccaagaaacaagaatttgtgctcattcaaagagcctccaatcaaattcaaagcagccacaactccagcaagaacaacagaagccgtgccctgcaacaaaaatatccaacttctttcaaacatgttgaaaaggacaagaatagtaagtcttcatacgtacaagcttgacaataaatctacttcatgcctgtatatcatcgttgaagacaagatgcgtggttccatatttcgctagcagatcaaaagcattgtggtttgcaaaatcttcgaactgcaaacatcaacagaaatagaatgctgaaaacctcaagtaaatccatgcatatgctgaaaatgtagctttaaaatcaaatgtttacctgcacaagaactttttccccatagttttgcttaactgcagtcatgaactcgtgcaaaagctcagaatattcctgtacataatgcaaacagattctcaaggctgatttaactgcattttgaaagtggaaactataaccttacacatcaataaaatgtaacaagaagttactagaccttcccagttgctctcctttgcctaagtccaatgtagaattcgttattcaacaactcctcattgttagtccccacatcaattgttacaggcaaacactacaaaaggaaacacaaatttcttacaaagctggatcatttaatgcatcaaaactaaaatgtggaaactatatcctgaaaaatgcttaccgatgaaggacgaagccctcctagtgccgtgtacaaagccaattttcctacaggaatccccataccctgaacaaaattaaggtcatatgatatgaggcctactttattcttctgatgatcaaacaaactcttaattaaacatctttcatacctgacaaccaaggtccccaagtcctaaaatacgctcaccatcagtaacaacaataacttgaatactcctttctggccaattcttcagcacctctagaatttttcccctacaaaagttataaaaaaaagtttcaaatttagtctaatgaactcccccactctaaattgttcgaattcacagggtaatgaaacaactatacacacttctcattcaaacttatgtaaagaccctgaggacgcctgaaaatgctcccatatttttgacaagcttcaccaactgttggagtgtaaacaactgggagcaactcctcaacattgtcaacaagaagtttgtagaaaagcctttgattcctctcctgaaaaaaacaaaaaccacctcccatttccttaattctgaaaagatcacttcttagcaggagatattataagacacattatgcagatttcaagttgaaaaacctcaactaaattgatttaacaaaaaagaatgctacctgaaggtccatcatggccacatatttttgcagtggaacttgatattgtctgatgctgttcatcaactttctctcctggtgatgagaaaattaaaggttaaaggtcaacacttttactttttgttcataaatgttagtttccataattccaaaaccaaacctgaagctcttgattcacaacagccggaggaagaagccctcgcaagtaatgggagtctctttcattttgagtaaatgcaagtcctttgttgtgttggggatccctcagtaaagaatatccactacatcacaatcacaatatcccaacaatcgttaaatttttttttttctagatacttagaccaaattaagagggtcccaagaatttaaacacaaacccagatagaaaaaaacatggacaattattcaaccaagtaaatatataatctcaaaactccaaaattaacaataaatcagctctgatcaccatcactagtcaccacccttaatatggtaaagctaaaaaaaaaagactagttcacctggcgacggagaaggtccaaggggtgacgagttggtcctctgtggcacgatcctcgccgtacacgtcctcaactccgccaccaacggtggatttggggtccaagtcgaggactgaaacaccatccctcatttctttcatagtgctttccattctcagttctcaattcacttctctctttattacaaacacaacaacaggtttgcctgaatgagcttaacagaattaagttgcataccaattatatagtgaaagatgaagactttttctcttgaaaatgaaaacaaataatgcttagtcaaatcaaaggtaacgacaaaataatgaaaagaaaaatgtaaatataataataataatttagtgttatgacttctaccatattttgtttttgttttcacaccgttaaagagtatagtccatttattaaattattatgtcactacttgagtggactggtttcaattttcaaacatggggagggaattgggataattaaggctttttattacattaaaatgtttaggatgtttggataaactcgtttaatatatcataatataatatatttggacaatttttcatgtgcttcagttttgagatactttttacggtacttaaccaataatattagttgaatgagtttagattgatattctttatgcatcaacgttttactatttgtttgcatgctttaaaagattattaatatatatgtatataaatatttaggagaattcaaatttaggacatcatgtttgtcttaagaaataaatatgtatgcaattaaatctttgaaatcatttaattatttaaaaattttaaaaggtaaataaaatgtctactatacttaaagtgtagatcattgtatgtataaaaataaacaaattataacttcttgctaaaaatttagatgtgcctaccaccgataaggagaaaagtaatattattatgggtaaatagcggtataagtactcaaa

SEQ ID NO: 297094 - DNA, 2236 bp, Cannabis indica
ttacacaagaggcatgaccaagcctataatgccacaaggtttcatcactaatataatttcagaattaacaatagaagatacagaggaaacagtttgatcatgaaggtaatgaaggttgacaaccctttcacccatcccaatcacttgattcttagtaatgtacaggacaatgcatttggttggtaaaaagagaaaagaataattagatgaatcagatagggcacacatagagagaagattgaattgaaatttgggaacataaaagacattatgcaccacaatgccatgcaaataaattgttccaacaaaaataactttggcattaacaccattaggcatgccaacagaatcgattctagagtttttctggatagaagtaaataaagaaggatcagagcagacatggtgtgtggcacccgtgtatatgatccaacaagttttgggaatagaaggaacactattagaaatgttggaaacagtagggtgttgattgtgatcattttggcattgatcattttgagttgggaatccaaatggttgagatggagatgtttgagattgggactggattctttgtgccatcattgtcataagtttttggcattgagaaatcagatcttgatcttcaggaacaccttcaggccaattattagcagctgaaaaatttgccaaagatcgattctgatggttttcaggtttgttcggaatttccttaggaaatctcccatgcaatagatggcttggtggataaccatgaaccatgtaacacttagcagcagtgtggccaggaactccatagtgagtacaaacaggtctattaccattgttgctcatatttctagggccattccttgaaaattgacctgcattctcactagaggtattaggagttttagattgagattttataattcctctttgttaatctttttgggtcacagctgcataagctttgttaacatttgggagaggatcttgtaataagatctgagaacgaacattaatatgtgattcattcaaatcaattagaaactcaaacactttgtccttatcaagatattcttgtatagttttcatagcaccacattcttatatagttttcatagcaccacaagtacaaacaggttgtggtcttcccaaagacttttaagtcttgtatagtatgaagtaacatcattcataccttgagtcattgtctgcatcgatctcttaacttgaaagatccttggtgcatttttttgatgaaatcgctcctgtaatttacaccaaatacacactgcatcttccatgtacataatgctatcagcaatagtagaagagatagaatgcaagatccatgaaatcatcaatccattataactactccacgcatcgtagtcttcatcatggggaaggtgaatcaattttgtgtttgtttagtggactgtgattttgtgcaattattagagggtagcaggtttggctatgattccagttgatgcagggtcatttgtggactagtttcttcacttgttctcacgactggtgaggaacaaagtgtttaggtagtgatgttggtttgagaaatttgatttgcgcggaattaactcttgtgaaagggtaagaaaagtcaggtggagtctgttattaatttggctcgtatcactctcaatcactggagaaaagctcaataaataaatttgtttcattcgtttgatacttggtatcttttggatggggttgagctatggtctaaactaggttatgaaaaactcaaagtgaatattgatagggttgtttgacaaggaggaaggcatggttttggtggggttgttcaggatcaccaggattgggttgtgactgggatttttggattgcaaattgggctagttcttctagagattactaaagtcgtggctcttaggaagtgctttcgtggttgaagtgtgattttttaggtgttagtattatcgaatctgattgcctggtattggtacaagctattataaaattgaatgttttgtcatccacttttggcgatgtcgttgaatattgtaaacagcttttatcttcttttagtgatgtttctttacgtttttttaaacgatctgctaatcggttgctcaccttatggctagagcatctcgtttacatgctcatcaaattttttcagtctaatctcccttttgatgttattgatattgttgaagccgaattaatctacactactacaatatgggcctttagcttccctttt

SEQ ID NO: 297095 - DNA, 1789 bp, Cannabis indica
gatgatttacattgcatagggattaatttaccgttacacccttcaatgtattttatccttaaaacacttagccacctataaatgatatttcagtgaactaacataatcactgaaatgagtactcaaccatttatctgtttagccaagctcgaaggaaatcatcatttcacttctatgtccagatagaagctatagattccatatctatgattagcgctcccactcaattgctataagaatttaaattctcaaatttttgattaaaacaaacacagatgctgactggcagggtcgatttgatccacattaaagcagtacacgtgtaattccttcatcacattctcttaggttatttctcataatttttagggtttcctatctattttaagtctccaaaacactagaatccttttttcccaagatgggtttctctaaattagatctctttcctttccctagtcagagtattggaatgtttttctcgaagaggcattccgaaaatgtttggtgactcacctctttgtccttcttcttttgtaggcgaactcagctaaattctagggaggtgataactgagtagacaacgacttgctccaataactttttgaagatcacccaaaaacttcgtacgatagattcgtcctcatcttcaagtgaataatcacttttctcaaattctttcaagtggaaagtctcaagcgactcctcagaacctcaattccaacatcaccactatcctgaccagatcggtggagaaggatacagtcaccatatctaggagttgcatagaggttagaggaaatttcttccgtcttggtggacttatagagtccgaccagacacccttaacacttttcttgttggtcatctaactttattgaggagagattccgcctaggcagacttaatagttatagtagcaaggcatacctcaaaaccactgccctcgcccaagttaaacctggcgaacacaaaacaaacaacaaagaccgtaccggccagagactcgcacattgaccaactcatggctgagcaaaatgagtcggaggtgcaggagtccttcaaagaagaggtataaattaacgtcacggctagccctcctgtaattgacggagggtttgatgctgacgacaatcccttgtcgccctctggatgacaagtcatgcctggggtgattatgttaaggaagggtttaagaaagcattaccgatctcctatgtggattaggttttggtggatttaggttttttttcttggtgttggctcccagtgttcatttcaagcgtccggctcaggtacactagagctcctttttgagctcccaaaggtttgtagatgtagagggagggactcaggttttacctaagggaagtgtgtccctatcttggcttcttgaccgttttgaacccttttgggaggccgataatgggcgtttcttgttgagagtttagtactgcctcctttacccattttttcagcatgatatgagctgatcctggagctcctttcctcttggtatttgactttggagcgacttggtggcgtggtcctttaattttttctatattgttttgtgtgttttattttctttgtaataatggtgtttggcaccctatgtcattaatagtgttagcgttaggttgttttgtgagctttgtaactttattctccttagtgagctttgaggttttgctctactttgtaattaacgtggtttgtcgtttgtagtcttctctacgtgagatagtgcaaattttttctacctgatcatgtaaccataatgaatctt

SEQ ID NO: 297096 - DNA, 3362 bp, Cannabis indica
ttttttttttgtaaattatttttcaattttatgaataatttattagaattatacttttgccagctggatggagaaattggatacgtctctatgcactattcaatgttttatgtcatattcataaatttgttatcatacacaatcacttatatccaaaaccaaaatctatatttttgggtatgagcttagcatccatgttctttctacggaataatgatgtgggaaatttcataaaagaaggcatataatgaatgtggaaattaagaaagtgtacccaacaaccaacataaccccaaaccctatagttataaggaaaatataagaaaatgacatgcagtaaacaaaaacttgtagaagcagcttttggggctgcgggctggtcctaatatccaacaacgagtttcaacacccacacatatgtataggtatatatagcccccactatataccaattaccaccacccaaccccaaaaaataaattaagagttttttttttttcggtaagaaaaataaattaagagtttgttttatatattaatgtaaaattatgtgacaattaattcgtgcatatttgtataattgagcaaatatatataccatttattttgtatacatatacacatatagttgtagataagtaaataaatatgtattgtgctaatttggtctatattttgaaaagtccgtaataataaaagtcatatcgtgctggttcataaaaaaatataaatcgtgtcatactgtgttaatatattaaagaataagcttgatacaacttatattttagtgttgtgtttatattcgggtcgacctattctttataaatggattagccctttatcttatacgggtcagactcggattttattttcttatatatttttttacaattaatgagttagtcacttgtttatatacaattttatattttcaattatttttatataatttttcacaataatttacacataattatataaaaaattaattataatgattaaaattttaatatttattagtaaacacatatgtattattctttattgttgttgttgtttatcgagaattttaagaaattgattatagtaagagttgaaaaattaaattaaattgtagaaagtaaagattgagattattacgtggttcttgtgttaataaattctagtttacaagcttaagaatcctagtttcttgctatagtactgtttatgcaatgaatttccaactctttatatgagggtataatataatatttataagctaggatttaggtttagatatattcgcgatcctctaagatttgcatgtaatatgacccacactaattgggtaaatacataaaatatgtttgactttggacccataaattaaggcccaacccacggggtgaaggtgatccgtacgtttggagagaccacgcgatatttgacaaatggcatgcctgcgcgccgtctttgtgtactagtgtctgtcggactaatgggggatttccttttggtagtgggcgtactcttagggtttggcacagggaacaatctcctgactcaatggaattcgatgtcagagggctttgtcatgccatcctggactaggttcacggaacgcctcttggaatgcccttttggatgtatcccagatgctcatccggagagtaactactcatttttatttggacaggtcacccttccgaatctagagagatctggtcttgggtgtaattatcttgtgcctcaagtaggtcagtgtgagacccatccttctgtacatatcttgggtacgctatcttaataaggcttttgatcagaccttagatgattaattatgagttgggaatgccacgtgtatactttttggaagcacatattataacaactattattattataagaatttttaacgtgttatgctttcgggttagtctattgtgcttttgtgccgtgttatgcttaagtttattttttttgtgtcgtatcatgccaatttatagtattgtgtcgtgtttaaacttatttttttttatgtcggatcatgctcgtaccctccgaaattgtatcaatttcgtgtcgtgtcaaaaactcggaccgtatttacaactctaataggcacaccgtttatacatataccgccatgtatcatatgtatcgagatacattgcatttgctgattcttattaagaataaaatgttgtcaaaaaaaaaaactgattaattaatatcatcacatcctaatcccactaatattttaaattatttttcactaattttaatttaattctaacattatacaagttgcgttactcatcctagtgggcttccgagtgtatatttcaattgtaagttttagaagttcaataaaaaatagtgaaatgaagcactctaattaattcttacatattataaaagtaaagcgtagcacgtatgattttaactttttatggatgtttattttccacaaaatatgatattttaattgggtggttgctctaatttttgttgaagcctattctctattcaccaaagaaagagtttacatacatacattgtgtttatcattgaatttaatttagttgttatattatacactatagggacatgcattgtcatttccaatatacttatatgtatggtatatatgcatattggtcatataactatagaagtattttatatattgtttgatttaaactaaaagtgataaagtttatagtaacaatagtacatgtatggactatagtatagttataacttatatgaaaacccttttggtagatacaagaatagcgtcacctttattatttagctgtttagtattttccgaagtgacaaatccaaaagtcgtctacccaacaagaccataaattccactcaaataaaaattttgaaaaaaaacataatataatttatgccacccaacacgtgatgtatccacaaaaccagataaaatctgtgtcccacaaaaaccactgatcccataaaccacctataaccataaccaatggacttttttttttgtttgaaagtaccaatggattttcttttgagccaacttgtatgtatgtactcttaaaaaaaaacttaattaatctctttataattttgggatttgaataatcaatgaatatccaaaaaagcagagtttagcaactattatttcttatatggtatatgctttgctcctttacccaaatcccaaagattaggtcccctcaacaaaaaaaagaaaaatccgaaaggttaggagcatgtttggtattgttttctattttttgttttaaaaaattatttttagaaatgagaacaaaaaatagtttttgaagtttttaaaacacaagtcatgtttggttagtgatttttaaaaacaa

SEQ ID NO: 297097 - DNA, 4256 bp, Cannabis indica
tatatatatatatatacattcaaggaaattattggctaattgaacaattgaaactaactttagttaatgaattatttgtactcatactatataatagtctatagactaagctaataaacaaactataatactggttttgaacatacataaattcgaaaccttattctctaatattaacgttgtggagctagaaatccctttccaaacctagatcaattactagaaaattaagaaaatcctaactggggttttcttgtgctgtgaacaaacttgaaccattgccttgaagggtcgcacgaactatcttcactcacgcaataacaagggttcaatacaatctcattctcagagttaacgtctaggcaaacgatgtcgtttttggcagttttagtggatagttgcaagttggattctgacatgggcttccatttggaatcaaagtcagtgcaatctttgctaagttgggctggttggcctgtttctgctgctcttaagcaaaagtgtgttcctctaatcatcaatgtcttcttgttacgtgaaaaatgccatgcatctgagcttgagcaagggcctaatgccaatggaccagattgggatttccttacaatacattgaccagttgcagggtggaaaataactttgtgtggaagacctgttgatattcctggccctgcaaatttcatatatgtgttgtattttgttaacatagccattcaaatttcaatatatatatatgcataccaatttttattagaaaagagaaaaggttttagcataaatatactcagccttagtttttcattgttgttagtttagtctcttgagagaataaaaaaaggggggaatttttcatttttatggttttttttagcaaagtttacgaaaataaagtttgttaattttttcttaaaagtaaattatgggaaaaattcaaataaaaatataggaaaaacagtttagattagagtaacaaattacatctttagtgtaaccaattatcttatactacttttttatattatttattaataaaataatttttttgaaaataaaattgaaaaaaaaatcacatgcttacacaaattgtataaaaactcataaaatatataattttcacataaaaaaaaattggaaatttaataaaattcatgagttttaaaaaagtgacttttaagactttttagttattttaaatttgatcagttaacatttttctaaatattataagttacttaatatacttctgtacatcatattgaactatccaaaacattccttcaaaaaggaaaaaaaaatgttttaaaaaaagtaaagatctagctaataactaattaaattagaaatagacaaaaaaaaaaaaaaaaaaaaagacaagcatgtatatactagatagagatttcacaacattatcacatgagatggtactgtatataaatagccaaatagggttattagaatgaaatttgtaacataccttgaaaagggtatcgaattgaagtcatcttgtttagcatagtttgatttcgaactccatcaaaatcatagttcaaaactgagtaaacctcatccaacccaacaatacctgatttgtagtagtaactaccagccaaagtccacaaagcccaatccaagtcaagttcagctgctacagctaaaatgcaatttaagcacctgttgtcattctctttgagtcccctttggtccactccaaactcactcaaaaacagaggaaatcctctctcaaccaaaaaaacctgattgtctcttcatgttagcagccaacacaccacacactttgtttgcattctgatttgcccatgcatctttgtccgaaaaggaataccagtgagcttcgaatactagtttcccagaaaatgttagtgcaaatggtcggtcgtgtaagaatgagaggtgagtatcgaaatttaaaccagagataataacaagaactcttgggtttgctttatgaactgcctcggctcctctttgcatgtacctataataattaataatttcattagtagttagtactattaattttttatttaatttgttggttttatttttatttttaaattatgtttacataaatgtatcaacaaatcaaatactttctctctttttttaatatattaattatttgtttcaaaattggagaatttttttttaagaaataaaataaaattaaatttgatttctacaaggaaagagaaaaaatagataaataattttaaattaattattctactaacattttgaattataaactgttattagtataaaataataaaataataaataactaaatattggattatatgatccagtgtttaaaaataatatttaaaggaccctaaaataaaaatatatagttaataaaagataagattaaatttgtagaattatatatacaaattataaagtaagattttcataagaaaatcactttttctttccacatcactattttttcacttccaaacaacaaataatatttgtatttttctcaagatttttcagtaaaaaagtttaataatatttttcataattaaactataataattaatatagctaggttgaattaatgaattatacttacttgtaccaatcgtcttcattctgcttgaggccacggagctcgttccttaagctcatgccgatgacattgtgatcatgcttgaagagcttggccattcgagtaagccctttgatccacatctctgcgtcgaagtacttctccccaaagaacccattcccatctgtttgattgttgcaacaccaactcggtttgcttacatgattgtccagtatcaccatcactttcccttttctaagcgcaccaaccactacctataacatatataaacatgactttaattattatgcataacaatattctataatgaatatttaatcataagtttaattagtacgtacctggtaggctttgatgagaggaagatcgatgattgaaggattattggcctcaataccagcaatatcatcataaagaccatatctttgaaaggactgacgaacagtgagagaagcaagtgagttattggtggccaagtagactggccaagtgagacgaacacagttaaaacccaatgacgagatttggcctacaatggaatctaaaggctgcttgttgagtccttcggccagtacaggctctagatgagaaacccaattcacacaggtgagtttcactctctttccgctcatctcgtccacaatccatctagaatttgtggtcagtgtccgaccagtcaccggcacgggttgggatacgaggaagaagaatgcgatgagtgttaaaactgagagaagagaatatgttgctatcttcatgtttttctttgcttttactttgcgttaattattaactattgagaaagagagctgagtatggattgaaagtcttgtacacattgttatatatagtgaaaaaaagatagggagagatatttaaatcatgagtattattcggcttttttatctaacagctatttttaatattatctgttcaacgtatttgaaaatataatagctatttacatgtttagtttaataataattactatcccattatatctttttttatttaaagcaattaccattccattataaattaaaaataattattaatttaattttttatatatcttttctaaataatatatttagtgtaaattggaaaccaaaaaaaagataaagtttttttttttcttagacgaaacgtaatttaaaactattatatatttaaatttgttgtatggtgtaattttgatattttgttttgataattaattttaataaattaaataaaaagataacataatagatttactattaatttttttaaaatcaatttagtattaaatttaaaatctttctttatctttatcattatttaaaatttttatttatctttatcaatttaatatttatctaacagatttttttgctttaacattttttgttattatttgaacttttttaaataacactgttaacttgctgaaattacccttcattataagatgagttcagggccgtcttaaggtgttgaatggcttagagcgaaatttgaaatgaggccttttttataaaaaattaaaataaatatatttttttaatttttgctctaagatattattatttattgaaattttgacacaatataattcactattttatctccatataataaataatttttctaacacataacctaacttaaggtaatattt

SEQ ID NO: 297098 - DNA, 5461 bp, Cannabis indica
acccaacaaactcatacaacgtcttttttcttttttttttaacattagtgattaaatactaaagaatttacaatgctgacatccaccaccgactaagatagcttgtatctaaccgaaaggcatgctttgccaaactatgagctgcagaagtatgaaagccacatggaacaaaactggcttcgagaatttagacaataaaactataacgtcctcaaaaaacataccagaagaactaaagcttttttatttactgtatgataccacatcctactattcccggtgcctaatatactaagagccagagaaataatcaccaatcacgcccatttaaaaaactaatctaaaaaagttaacagggaaaaagaaaacaaagtcaataaaatttaataaacagattagaaactcacctgtactgtattgacaaaggaattgtcaaaccaaagagcagttgacactgcattgggaggggtacatcataatgccagacaaattctaaagatcagtgagaaattaggtatgagaaccataatgaccagcgctgtctcttttggaaacaatttgcaatgcagtccctttagtaatccaagcagttgcttctggttgacgctcaaagtacttaagagaatgcaaacttccatcctccaacttcacaccgtaaacaaatggtagtcttagggtaaggaaactctcgggtggtaaaagcacttcacatccaagaccgaattgtaatttttgctcacgctctgatactgatggaggtagagaagacgcctacagattcaaaaactaaactttaaagagtccaacgacagtctaaccgatatcattagaatggacaccaacaagctatatttataaataacttttgactgatagaaatggaaatgtgcatgtaaaagtactatagagtttggattggacttgactaaacaaactggaggtttgacatgctgaggcaaaaataaaaatgggaaaaactaggaaaccgataattcaaggttagtttattattctagactttcaagtaggaagaatgatctcggaagaagaaacaaaagataatgcatccttattatacatttgtaaggaagtgtaagacatacctcaaattgtattagtggacgagttgctaatacgaccggaaaggaaggtgtgacctacaagaaaaaccaaaattcagatatttgataattaagagcaatagaatgcaaacttgcaagacagctaatttcaaaatctgcaatacccttcaatatttatatataagcttaagctcacacaatgtcataccacaaaaatcctttgaagctgtgatattgtgccagcaaatttaactttggattgttcctcactatttttggaaagtctgcagtatgggcagttcatgaagattggtaagtttctattcaacattgagaaagcatggccatccttatcgatattaatagaatcaaggctccctcgaaggtctttaacaacaccattaactgtcgatacaccaaacaacatatgattctgcttctgctccttttctgatactgttgattgagcatgcttgtctggatttggataaccattattagttgctagctcctttgatctatccatatttcttccctttcttgtagaagtagcattattcctatttgaagcaggatgaactttaccgcgaagaccattattactcagttttgaaagatttctaggattctgatatgaagtttcagcagaaggaacttgagattcttccggttgatacaacgttccaaggtcattgagatgctctggattcagtaagaaacgatggccatgagggcattcatgttcaaaacccacatatgctgctacatgtttaaccgaaatgttcttttttattttttcaacagaattcctgttaactgggaccacgtaactgcctatgcgtaaatagggatctcccactgtagaaccattattattaatctcgtttgagacatccagagtagaagaagaagcaactttagatatttgaggtccttgattatcagcaatgtgttcgacactcaagcctccagtcctactctgcttgacagtcctatctaaacgtgaagattgttgctttctctgttctagaggaggaaatccagaatctccagctgctgatccagcaacaacttcagaaaaagctttcttcattgtaaaattgggtagacctttaccaaaactgattttcttttcgtcaagtattatactctctgagggttttctttgattttcaactacagactgtatctcccccgagtacaatttcacagcagcagcactatttgtttctgtactcacaataggttcaaacttggggcctgtatttgactttgttacagaacctcggtgtacagcagtggccgttgaaccataatcacctttcttattctctaaaattatttcccatttcaacaggaacctctgagtggcagaaaacccactctgaagtaagcctttcgaaggttcatagtaccttgcgcccccaacacgaatcaaactccatgaagacggatgaactggtccttcattaaatattttcggtaattgaagcgcaggaagaagtttgtcacagtcaggaaagcaattagaagtaatgtttgctgtttcaaaatcgaatggatcaagtcgtagtctccttgaacgtccacaggcacaagcatgaaggaaaacaaatccactgcaatgcggcttcaatccagctcccgaaactaattcaccattctcgagatcatgcctttggtgcatacacggtcttcctgtcaaactaaccgcatcacacagctgcctgccagatttccagatggatgtgcattcatcacccaactttttcgcaaagtgatgcgtagcagatcccctgaccattgaataaaaagcctgcaatgccttcttcagatgttcttcgtgttgtgaagttggataacaagcgggcaagtctttcagataaacctcctttgcagctggtagagacctttcacaccacaaagtagaaaatttcgcattcaatcctttaccacattctaaccaagaaactgctaaatctaagggatcgatgctttttgaagcgattccttcgagtgactgtggagtagcgttcctcaaccgaggttttcttttgctaatttctatttcttctaagcacccaccctttgcagaaagaactccatgaagaattagttgactagacgataaccaaacctcaatatttgggagttcgggtgtagtaaatgtctttccagatgcagcagaggtcgaggcagcagcggcagcagcagcagcagcaaccatgccaacaccagctgctgaaccactattcgaattaacaaccactgctccctttcccctcagaatatcagtttgcctgtaaataaactctttaagagatgttatatcatctttattagcattctgaccatggctttcaagcaaaagagaatctgaggttgcctttccattcaaaacatcttccacaagatcagttgcatactcaagagattcgcctcttcgatttcctgacctatctaacaacacaacagaccgcgtagcatcaagcgagaacaaagaagcagaactagaaattattcctccactttttgatccagcatgactggtttcagtacctgaaagagttctacatttctttataagaaaacgaatctgtgcttcaagggacgactgaagtttctttctggaaccaccttcagatttgctcgcagggcgagcaagtacgactactggactagagaccttagcaggcatatttgaccttgttaaactactcgaactagaagattgattatgtgaggatgcatctgttgactcttcagcattggaactgggattcggcaagtcatagaaatcatcgatgaaaacaaacagcaaaacaggagtgcactgtcccggaaacaaagaggtgtatgaaccaaaacctgacatcactgaaacagcagaaccattgcgatgattcaagatattacgactcctaccaggagaagaattattagagataggtgcagaagtggttggtcggaatgatgatgagtgcggcctagatgaaaatccctgagtagtttgtgatctaacaaatggtgccaaagcatgcttggcagcttgcaatactctaaactttttcagaagttgaatgtcaaatcttgaaccctcctgaacatatatgattacatggcaaacctgcatttactatcagagttaatttcatggtctattagcaacaactcatcacaacaccaaaactaaataattctcatatgaaaaccaagcatacaaataatccccattagcacatccaatagctcaaatgatcggactaagttatctggaaacctacatagtaattactcttaagttgcatttggtagagagaaatgaaaacaaaagaataaaaatgcaaatgggaatatgaatcgaaatgacattccaatactttaaaatgcaaccaaataaatgaacggaatactaattttaaaattgaatagcataatggtgggaaaatcattccactagaatgacattccaatactttaaaatcccactaaattatggaacggatttcaattccattcaatatcattacctcaaaccaaatgcaaccttagttctatgatcccaaaaactctctagttaaaaattcttccattaccaaggaaatgttagcatataatataagctactccactccagaactagcttattatgatatatataacactatccagctaattttttccagtaataattgagtatatatgtataaattctaaccctccattagtttatatgatgtttagtattaagaaactatgaacaaataagaacaagatgcatttgagaaagaaagagaaaatgaactaaacaaaaacgcttactgaaaacaagaacaacatcccctgaagatctccaaactcgtgttcttccatggccaaatcgaaaccggagccagactccaaaaccccatcatcaaacgcagggcaaagattggaagagaaatgcaaaaacaaaacccctcttctgcgttcatggtagtaactgattctcctccatttaaaccattctctaagctcttccttatcaatgcgaagattctcatccaggcttccagagccgaaaacattggagtcgacgatccggttgatgaggtgggtcgtgatttcaggtctacggccaatgaagccaacgaccactacgccatcagaagacggagggtgtggggtttgaattgaagaggaaagaggagcggtttgagaggttgaagacgaagcgagtgtgggtgtggatgagagagttgttgaagatggggggcgtattaggacgcgaactagaagaagaagaatttgaaatggggtttggagactccattgatttagaattcacaagctctggttttgtaacttccattgacgaagcttagagagagagagagaga

SEQ ID NO: 297099 - DNA, 1700 bp, Cannabis indica
aaatgtgtaatggtggacagtccaccgtggcacttaattgtgatttttggacgaaagggtacaaagcaaaacagaaccaaggttctcttccaaaattttagtttttgtggttaattgttacaaacttaaaattagggtgctttagcagctaattgattaaataatgtatactaggccaccaaacatattaacctcctacaaaaaagaaaactgagcaagagcttgcgccacactatttacaagtctaaaaacatgaatagaagaaataattaacaacaaatttattacaacaataataatatctctaataatacaacatgaatgatcaataatatgcttattgatggcaacaataacagtaagtaaggcaatctgattccacaatcaccttctcataccccaactgaatgcagaaaaacaagtttcggtgaaccgcaagagcttcagccacaattagttagaaaggccatcaacaccatactgcataagccttaaccaacccaaagcaatctctctaaacagttagtagcctcacaggacaaaccaacatcacaataaaaataatattattactaaaagtaatcaattttaatcacaactaatctaactaattttcgtgactaatagttattatgatatcactattagttacagccacctttttagtgacaacaaacttcttttgccacaactctcttatcttttatatagtcacaatttatattgtgatcactaatactttttttttcacaaacaaaaaaattctcactaatatttcttagatcacaacaaaaaatttatcattgatacttcttaattcacaattttttgttgtcactaatattttatttccactcattatgaatacaaaaaagagttgtatgaagttcacatcaactattttttttttaactatgataagagcccaattcagtaccaaggcatactcaaccaaagaagaaaagaaagagcaatagtgtaaatattccttggcatattactccctagaagaaccacacactaataagcaaaacaatattatatataatttgggaggaaatttggtcaaatattctgaccaaaaaaaatgaatcttaattaagaaaatatattgcagtagtactcttgacaatgtaatttacatctttctcagcattaaaccacatacaatattatacagtcacaagagccataacaagaaagagaacatcataaaatcgtattataaaaattgtatcataaaattcagcattgctataaataatgcttaacgcaaaagtcttgcattgatctcactcaaacactcatgatcagctcacatggacataggccgatttgaacaccaagttcaatatattaattacagtaaaagaatttagtattatatatatatatatgagagtgtgtgttcttattacaacaacattatgcagtagttgattaggtacttatatagatcttaggactagttaggagttagttaacataactaacttactgaacaatcctaactctaactgagacatgaaggaactaacagtgtcacaataggtagcgtcttacaatttttttttttttgaaggaaaatggtaaactttattagaatgaactttcaaccattacaatagataaaagatcagcaggagcagtactctcactgaaaatacgatctgaatacaaacaagagctacgagcaagac

SEQ ID NO: 297100 - DNA, 2406 bp, Cannabis indica
aaaagaagtttcggattctgactaatgctaaacaatttacaagctttgttatacatgtaaggagtatgcctataatctgattgaagaccagcccatataaaaaaccggagacccgtatgagactggctaggatagcatctgtgtaggaccccgctcacaaatttggaatccagtggtcccttaaacgtagatagggttttctccacattgccactattttcttgcaagtgattgagtatatctcccgagactacactaaactgtactatcgagactttggggttttggaagcgaactgatgatgagagggaccgagagatcgaaaaaagcaccattaattggtaaacaatatgcaaatctcaaacagaaattggttaaaacctgagatggggagattttgtcagctctgagatgggaagatgatcttaaactcagtagaagacttactgaattacctagcgctgcaatattaaatagaaatacttgtaagagataaaatcattaaaaataataataattctgcatcaaataatagatcaacttgcaacaattttccatgtatgttaataagcactacctaactgaaaaaaaagtctgttaaataattgtcaagctatctcttgtagtactcttcttgtccgtatatatttatatatatatatatattttcttatgttaattaaatcaaattgatgcaggacatagcttcacccttgcacggattcatatattaatacgacaacagttcaagtgcaaatttagttcaaaatctgaaaataaacaaagagtctctaaacatcaaaaaactaactgttttcctacattataaataagacaaagtaaatacaaatctaatccaaaatgtaacatgtttatagcaaacataagagttttgagctacctaaagctttaatgggtaaggtctacaaagactcatcttctttttatgtaatgctcctcaactaagtagaatttccatcctgagctgaggcttttgcatattgctctagcaattaatccgcaacagcaatatacaatcaagaacaaacacatggagggagagcagcaatgctccttgaaaaataatgttagtgatcgcaaaacactagtttccctcctttccgacacaacccttgttcacccacagaattcacaactttaccatagctatatctcaatggcattctcccgagcactctatgaaactcatttatacactcccctctcctcttcctatgctctcttctccgactactcaacccaacctctgccaccacacccttcaatctcctttgcctatcaccaccttcgtccacctcatttcttttgtcaccccaatctcgagcccattttgcccccaccaaaatgggcccggccctagactcatcagccaccacaaagttcatcaatatgtcctcacaattctgggcccggtccactacacttctcagttggtccattaacggcccaccaccgcaactgtacgaaaacaagtaatcttttctcatgatcatgaatttagttagaacaatcgagtacctgtctggatgaacagtgtagatccacgccttcctcgacaaatccaagctgtgcgatcgggcgaagaacccgatcagacggctagggttcgattcccacactctgaaggcgaatgagaatgagttttcgtcaatctctacgtcgtcgtcgcaaatcaagacagcaacggtctgaattgcggttcgtgggaggaatcggttgttgaggctgctcgatttctgtcggatgagggaaatggtggcactgccgaatgaagaggagtgtgtgagattctgggagaattgggctagggtttgggttggggttgatgggtttccccagaggacgagaaccgcagagacaaacggggtagacgagtacttagtggcgattgattggaggagagggatccgagattcggagtagccattgatgaggattgtgattttgtctgatcgaagagttcgcgggcctttttggaccattggatcacatggatcgacggaaagcgatgagttggagaaaaagagtaacatgaaagttgttagaagaagattcatatctatggcagctttgccaagaggaagatgagttgaatgttttgactattgaattgcgttgcactgcaatatttaatagaaataaaagaaaactagtaagagatgaaatcattaaaaagaaacagaataaaatggtttgtatcaaataatagaaacttgcaacaaatttctttgtgctgatcaagcattttaaaagaactccaccacaactccaaaatggtaacaaaaatcctaaatatgtgtatatacacacacacatatacatacaactaagcactacctaattgaaaatatattactacgccgtcaagctatctcttgtagtact

SEQ ID NO: 297101 - DNA, 1761 bp, Cannabis indica
ggaagatttgatttaatgaaatttattacaaaaaaaaattatatacactatttacacataatataattcattttaatcacacaattaaaagttctcatatataattatctgcatataaattaattacacataaaagatttataaaatttttgtgtatttttaacattactcttgtaaataatagagaattatttcctcttgatttgctttggattagttacatgtctatcacttttgatcttcaaggaagagaagatacattttggattttcaataaatataatgataagtgatggaagaataaatggtaaaataagcaaccaatagaataatttatcctatagacaaactcacatcagtgactattttgcaattctttttaaggttaattaagatatggatgattgtttgagtaaagaaaagtcaaggatttaatttaacagtaaaaaagaaaaattttaaagtgttataacctctactctttatcataattttataacacaacgtagatttttttatttttatatactgcactcgtttactcagatatagtaatttaattttacattttttttgaaacaaataacatttaatttttgatattaaaaatattaaattttgaaataaaataaataaatgtaatgcatctgggttctccacgtgtttatatttatgagttaacagaagtggtagtaactaagagaatagtaacattgagtatttttacctccaaaataaaaataaggtatttaagtgtataaaatctaaaacattaagtatttataccgcaatttatcatttccattatatatatttattggtttatattttcaataaacattgatgaatttttctgttagtttacactttgtgcatttagcacaaaatttaccccggagatggtgtaaggagactaaaagaggaagtaattcttagataggggaactgttgtggcttcagcacaggtgagaacctcaccatctgctgtgactgtgtatgtctcagggtcaactgtgatgtttgggagggcatcattcagcttcatttccagtttggtcagattcctcacattgctcactgcttttacacttttgttcagtccatacgaggttttgacaccattttctaaagcagcctgttttgtaagaaaatgaaagaaaaaacaaacatgattttcagacctctacatagatatatatatttatgagagtgaaagagagtgagagagagagagagtgatgccttgctgacaaatgcaatggagttggtgctgccagccttgccaaatgctccaaacatgggcctcatcaacacctgcaaccactcatgattgtcaacaaaattattaattactgacatggaatatctcagctagtgccaaaaattagagagattagactctcagcccaactataataagggtttcaaagttgcaggggcactatccattttctaatcagtctgataatatgtgaactatgaagtttattgtgcatttaaggtgtcagtctcatcatgcacctttgaaacaaaatgaggtgaaaaaggatgaactttaccggctcaggtgtggggatgctagcatttggatcacccatattagcccatgcaattacaccacctttgatgatcatttctggtttagctccaaaaaatggtgccttccatagcacaagatcagcccacttgcccacctgattgcgatcacacatgacaaaacctcagcttgatatcatactgagaaatcccattagctattgc

SEQ ID NO: 297102 - DNA, 1762 bp, Cannabis indica
ttcacttgcccgcctaatcactaccattttcaattttttttgtctctactgtatttttgtaaataagaaattttaaagatagtattttagtaaacattaaatcttataaatgtttattttttattgtagtagtataaaagtttatttttagtaattttaggttaaaatagaaaaaatccccaataaaaattcagcggaaatattgaaaaacaagtaaactttattaattgcattaagtataaaatgcatgttgtgaattacacatcataattcaccataattcaagagctattaactaaatcaaaaactcgaaccaaaccagaaactagtgcttcaacaataaaaagaattcaatacaacttaaatgaaagaaaaacttatctttattaaaatgaatctttggtttcaaaaaaaaacattctttattaaaatgaatcaatctatacaaaagagtgggagaaagagagcttgccgacaatgaacacaaggcaatgaagttgacactcctcacaaatcctcaccaatgggtatagcttgattagatatacaagctttccttaagaaccctcctctcctctatttttgttttctctcagcccagtaattacaaaggtaagggagctgaatttgtctatttatatccttagtgactcgagtagatgagtctctagacataacagatttaagtaacctttgagtttaggtaacaaacttaacagattcagttaatgtacctaggagagtgtggaccaactaattggttttctaaccacttattacaacaaatccaccttgattatcaaacctgttagttggtaatgttgagtagctctagacagtgtttgaacttctctatggtgacactcttggtgaacatatttgctacattttcatgagtgtgcaccttctttacaaacactcatttctttgctatgatgtcccttatgaaatgcaatttaatgtttatatgtttagacctctcatgaaatatagagttcttcatgagatgtaaggcactctggttgtggttgtcacagtacattgtgatttcatctatattaagaccaaattattttgccaaaccttttagccacagagcttcttttatggcttatgttgcaaccatgtactctgcttcagtagatgacagggctaccaccttctgtaggttggattttcagcttatgcagccaccaaaaaatatgaatacatagcctataagtgaccttctggtatttatgattgcatagtttgaatctactgtcacttcgtctcttgaacttgtctttgagttgaactcaattccagtgtttaatgtgccttttacatgcctcataatccatttcaaagatgattagtgctcatgtcctgaatcagctaggaatctgctaacaatgctcattgagtagcaaggttaggccttgtgcagaccattgtatacatgaggcttccaacacaacttgcatatgggaccttctcaatgattcttcttttctcatttgtttgatgtgcttgattttgtgtaaatttgaagtgttgtaccgagggaattatgactagtttcaccatcttccattccaaatttctcaagtattttcttgggataactcttctgggataatttgatgtatttattgaaatttatgccttaaaagcaagtaattagtggataataaattagagaatatatgaaatacaattataagataaatgatatattaattataagagtataattattaaatatttgaattttttttat

SEQ ID NO: 297103 - DNA, 1368 bp, Cannabis indica
tgttagaattgtaagatgcatgggtgttccatctcaatacttattggaattgaaaggagtaacttgtggatcttatacattctattatctttccacacatggtggaactttctaacatgcacctcaattgagcaaactaatagtagtagtatggtactctctaacatggatctcatagccaaatgattatgttgtttgaatgatttgctattactcagagtggatgaaaactaacacctaaaactaaatattatcatatctatcaaaagcatgagcaaagtctgtaaaaaattctaataactgaaaatgcaccacttatcaaaattggctacataagaaattaagaatctaagttgagtgagacattttgtgaaactaaaaccataaatttaaccaaatcaacaatcaaatcccagagcttgaaatgggaaaaaaatgcataacataaacacaaaacctgtgaggaacatgatcagaagaaggttgaacgcgctcaagagaaacaacttgacctccaaagtcagccttaaatttgttcacggctctaactaactcagtcgaaggtctctacaatcgcaacaaaatcaaaaataataaattcaatctctaaccaaaattaacctaatttccaccatcgctttcgcagccattaccggaataacaagaaagtaaagagtaacagattggtaccttataaacgcactcagagaggaccatacaacaaaggatgtcctgcaaatcggcaacggaatcggccttaacggcgatgcaaagatcgtgaagttgcttccgacgacgctcgtactcttgctggagcttcttcctctggtggccgttggcgacaccgttccaaggccacttcatcctccactggagtggtccccaagaaaccttgaggatcttggctttctgctctttgatccacgattccactcggctctgtaacgtctccattgtttttttctgttacgattatcgacaaacacctctctcgcagttctcttctcttattttattattaatttttaatttttaattacaaaaaaatctaagatagtttatttatttatttatttttaatttaatttaatttgtgtaatcttactcctgaaagagaaacgcagcgtttcgtgttcgaggacggagaagcatatgccacggaataaaaggcggttatttattatgctgtgacaataacggataatatttatattatttcggattttcttaatgaaaataacatgtttggttaattttgagaataatgcttttttggttttggtttagtggttgaagattgtaaatatttattgggatttttaactaatgtttggtttacattgtgttaaatggtttactaatttaaca

SEQ ID NO: 297104 - DNA, 3458 bp, Cannabis indica
aaataatcatatggaactgctgtcttcaaaccaggccgaacctcacgccggctttccactatcctcatatccacctctatttcttgatccaattcctcccatgtgaacaacaatgggagagtaaatgcagcccatggattgaaatccataagcttaactctgtcatccccagttacataaacatcaaatgtgtaattttctgaatcgaatcgtgatctaatcttgttcgtaaaaaagtcatgaatcaaagttcgaacatcatctttcttctccatcaaaacaggatagaatgttgttacctcgcgctgtgagataccaatcaagtgttggcctttgacaaagcaacgaaactccatgtctggcctaaatgaagggtaccatttccgaagagcaaggaagaagctacgaggcctcgatgaggtcttgtctgagcaagaatcataggcatgacacaaatcatgaacgagtgaatcagatgatttgaataagagagcaatctcactgaatgaagtgcatcttagagttccggtggtgctgatccaggatgcatcctttggtgcactccaattgagtttagggaaaatggcgccgcctagggttttaatagattccttaatttccagttcaagtttcgggaatgaaggtggtgatgatgatggttgctctgattcatcatcggaaccttccgagacttgatagtcttcttcctcgtgtggattgtggactctattgggtaaagcatcttcattggtgattgaaattgggagaaggaatggtccagaatcatcaagaaggtattcaacgaagggttcggggagctcgtgaattagggttttgatggaaacggatttgaattttgggtaccattcttgtatctgacatctattcacttcttcttccttcattctgtaaagcccaaaaaagtaaaataccccatttgaagaaacaaaaaatcaaaaacaaaattgatttagttttggaaaaatctaaacaaacctgatttttgagatatccctgtcaatacaagggctccaaacttgatgcactttaaaattccacactgatatcaactcccaaacctgtttagtttatcaaattagccttttattttgctaagtcatttcatcagaatcacagaatactcaaaaagaaaatacacacaaactcacaatttcccaaatcctctcacaataattaacttgaatctatcaatattagagacatatcattatggaaggccccatgtaattaggttgagaaaataattagctaagtttctaatttttcagtataacatttattctgtagaagcatttataatcagctaaatttaattggaaaacaaaaacttatatgatgattaaatcaaattcattgaccattaaaagatcccaagcacagaatgaaaacttgttcaaatctcccaaattctcagtagcaacataaagttgaagagcacaggacacacttacaaatataaacaaaaactcagactactccccaaaaataaagccagaaccagttccaaattctaatagaaaaaacaccagtttctgaaattagcctaaataaatgatggaagctaaaagacccattttaacacttacatcaccataagtaagctccagggaaaagcagaagaagaaaaattgaaaaataaaccatggtttagtgttaagaggatccaaacccaatgaagaaactcatacatataaagaaaaaatcacaccctagtttagttttcatgcctaaactcacaatcacacatatgaggtggtggtggttgtggtgtggtaccagttgctgcaccctgataactgaacgatctaaagcacgttgcccacttctcactgtggccccgagccaaagctgctctttgcaaagacataatacccctcatgggtgcctatgcaataatcatatgttgcataaaataagttgaatcacaccaacatatatatttgggataatagtgctatcctaattgtaaaatgaatataaaggatcaattttgatgccaaaaaagaaaaatgaactgaatacaataagagaattctctattatacacagagattgactcttcaaagccttgaaacctataaattatcatcactacttttttattcatcgcgatatatacagcctgatgatgatacaaaacaggacatgtagcatttcagataggaaagaaatagtagagatttcaaagaaattacctgagtcggcgtatgaggtagtcgccgtgaaccgatctgagaggagaaggagaacgagaagtgtcgagtggtgaaagggagacgatttggaagcgagacggagatggaggagaagtggagaacactcagattaaggtttgactattgggttgggcctttatttgggctgggccttcatttgggttgggcctatatttttacaactcaacactatttcctacaacttaattgcaaaaataccttctgagacttttaatgtgaacttatactaaaaaaaaacgtttaatgtgaattgttgatagtgcttgaaaaaaaacttaaggaaaaaatatggggaaaataaatctagtttacataaatatggttaggaaacgtaatagaacaaaatatgacatttaaaataaaaaacttaacgtatatatgtcatttgtattaccataaaaacttaacgtatatatgtcatttaaacaatattaatagcataaaacaacatttggttaaagggtgctccaccaagaaaccatgcttggattttggaggtttgagtttagtatttattgatgtaaagaaatacaaagatattaacaaaattcatccaactttatataaagaaacatttagaaaaaatcctcaattgaataataataatgatagttccctcgaggcagcaatgaaatatcttaagttatttgatacaaaagcttaaaaacaaatgacattgctaacaccacccaccacagccgccgccatgctccgaccactctactccggagcacattgcttcctccttaccataaggtatttttcctgaacagtccacagattattctttaaattcaagaatgtcactaaacatgtggaaaatctcacctatatatacatatatatctttttgaattacataagtggaaaatgtcatagcttattttagataaattgccagtatatattactccataagcatataaattgcctcaagattgttattctacttctagtgatagatgacctacaatatactaaggttgagaaaagaaaaatagaaaaatgaatgagttgatcatttgtcaacgatatcttattattagacaaactaagtagtaataacatatgaaattattatttttatgttaggcaaacaagtcagtttatatagaagatagcattgtagaataactaattgtgtaaaaagtcctaatatttcgtaattacacaatgtaattacacttgattctcatggag

SEQ ID NO: 297105 - DNA, 5535 bp, Cannabis indica
taaaaataatttttttttggtattgacatatttttgtaatgttttaaattttttttgtctattaggtaaaattttcttaattcattatttcattactaactaatagaataatggacaggcattagaagattgtacatttcgttcttggattagaagtctttgaatttgacactgcttactaccaagcattaagacgtcaagtatatcaatgcatatcgtaacacttcaatgagcattgtctggtggtcaatgcaatggccgatttacacagcacttcgtccttatttttaacaatccaaaatcagacctcctatttcatcctaaacccagctttcacttcattcatttgacaaaaattgatattggttatctcttgccaatcaatccaatcctgatataagtaagatatatgacaacttgaaacaaaatctaacatgctcatacctctactatgatatgatattatgatgtgtattcatttcttagtgatgagaaacttgctccagaatcctccttgtggtggatactggatgtgccaggtttattacaacattaagtcaaaatgttcagttaaaatggttaagataaccaaggaggaaccattagtaacgtttacagggttagttcacatattggaatgtttttgctataattaactcaaaaaaggtaatggatgatgcttctagcaattccatgcattcaaaagcctaaacaaaaaagagtaaggactgtgaaagaagcaagtgacaatctccaactttcacctcacttgaaatatttgccaaaaacatattgtacagtctacagattctgtgttgcctaaatatactttaatccagagagatactgttgtctagagatcagatactgggccagagaataaatgattcctaacaaacccaatatcctaattttcagaatatccgtgattatcacagatggaagatttagaggcagagttatcaacggtgttgagtctgtttgcttagtgtaactccacacaaacctgttgaaaaggatatggctggggaaagtgaggatgaggagagccaaattcttcactgcaaagaaccaatctggcccaccgatttccaagccccagcctgcatttccatgccagacttcttcccatatgctgtacagagcagtcatggccaagtagactgatataactacagccacaggaaaatatctctgcttgtccccaaatcccgccacaaaatcagagtcctggttgaggagtagcaaaataggtgccaggaaaaatattgcacggtttgagccacccgtcagattgacattcaagatgaggcatattgcaaagcacattacagtagcaacgttaccaactgcaggcatccaggctccctcactggccatcctcttgattgtgaagttggacacagtagatgctcgccgatgttgcatgaatctcattcttggaggataactagtggatgatgtgctttggccagattgaacatgtctcattccccccctttcaacagctttttcacgcaatagtgaagcaagttcacactttacctcaagagctataagcataaagattgcagcatacagaccaagaagagatgtccttgctccctcaacagctagtagagtcgtcaacttcttgtcttcctcacccatttctccaactccactatctccaaagatacttttgattcttacctgaccctccaaaaggtatgttactggaaagagtgctacaagtaaagcaaatacccatggtagaagctttgtgcttgaggcagaagggaaatgagtgaagaccacaaacacagaagcacagaccatagtcacaacaatgagagcgtggaggacggctgcctgaaggaagtactcagcagaaatgtacacacccaaagcaatacccatagcaatggagtaaaacacccttaactcaacaatatacttaattggtataactgatgtaacagctgccagtgtaagcagaattgcaccaataagcagccaagctggccatgtgggctttggtgccacaaagccatatatggagatgtcatcagcagactgtcgggcagctttgatcaagtcagatcggtaagtccatgttaaaggaataggaataggtggttgcatcaggataaacaataaacctgttgcaactatcagtgctaggcatcttttagcagactgcaaaatgacaaggtaaagagaaaagaaaaatgtggttagcattaaataatactaatgattcgtgtctaaacgataaagattttagaagtatccaagaaccgtattcagtttcttatgataagacatcatattgagaaattgaatggtattgttaaaaaaagtgatcaaccataaattagtcaaatagttttaagtggctactcatcggccaacacattctataaatccttccctccccccacctctgtaaaaataaaataaatcagaagacaagcaaaattaaagacataactgccaatcccatagtttaagatattaattaggaattgtagaagcaacagattttggtgataaaagaattgctttcttcctcaatttctttgtaagtggttctatagaagaacctaagttgaacttaacaaagaagcaaaagaaagaaatggaagtaccagggcatgagagaagtgcagcgcaactatgggtacacatgccaagcccgacaaaacaatacagaaacccaatagtaaaccatcagatggggatctcccattccaccattggagagcttcaaagattgtttcacgacaaaaccagacagataaagtaaccacaccagcatgtgcatagccttgccaaactttcatcttagaagttgttcttgacttgtccctgaaaattcatatccacattaaataaatttgaacaaaggtgaaaactaaagattctttgatgtaatgaactgataaactacctgtatagaagtactggtggagaaacagctaataagaggatggcagacacccatacaacagactttgacgtaataaacaacatagcaagcttggaagagtacaggcaggtcaatatccaaactgcctttgaaccaatccgatgatcaacagataatcttctagttagacccacacccactagtgttgttacaacaaccaaatagcttgggtacatcacatcatcctcaaagccatagtaataaataccagaataattgaaaaatcggttctcaatgtggcaaagcagcacagcatgagcaattaaacaagcctctgtcaaaaagtgaagttttgcgggaagaagagcgataccaggaacagccatggccaaaataacatttgcagttacaagtttacaaaaagatttcagtgacatgcctgctatccagatattcaaatcccagaaattatgcattacaaaccacatcaccatcaagctccccaacacaacaaaggcaaagtacgatgggaggctctttttagtgaaaaaacgagccaggtagaagccagctatagacggcaatggaacaaactacaataaaagcaataaatactaacagtcaatggctataagcatgtttatcaaattagagatattatgcatgttgtcatctctctttacagttgctgatttttggattagtcattgagcatacaatccatgtatatgagttcacttggttagaagatgtagctatcaatggattatatggtttgctaaactactccaagcaagcgcaaagacagtcaattgttcagcaagaaactatagataaaattcaaaaggaacaacaatgtactagcaaaatgagagatacataccactagaggaaaacccacaacgattgccccagcagcactaactacaacagccaaaaaagtgaacgccagggagctgaacgcatcagaaaccatgcccaaagcataggcaccagctgcggaagctcctccaagcatagtcgtggtgacaagaaggtaattgagcggtgggggcacctgaatgtagcggccaaaggagtggaagacaactctaatctccaagcagataacgacgacaatcaaagcaatagcaccgttcatgacccgaatgctgtgaagatgttgagcattcttagacacccaccaaagcgcaccccgggtagaggcatagagttggaacaagaagggaatgaagaagaggaggaacagatcagaaacagcggcagcggaagagaagaggatggtgtagtgagaggcaatgtggaagagaagaggaaagaagagcaaattgagtgtgtgaaagcaggaatcgagaggccccagaatgaaattatcttcaggaacctgtcccccatggtacttgacttcctgctttgttttgaaggaagaaacacgggggatggagtaaagccagtagaaaaggcagttgaaagacatgagatagtaagaggcgttgtggatgccgacggcggatatggtggcccaagtgaagagggctgaagccgggaaggggatgcaggcaaagagaaggcgctcgagggcgagaacaatggaagggttctcgatttgaatccacttgaactgaagggaagcccagacgccgatgaggaaattggtgtgggcgcagagtaaagcggcgaggatagcgagcgggagtgaattgaaggaagaggtgagggaagaggtgaagaagaaggcgatctgagcgaagatgagggagaaccagacaccgaagaaggcaccggtcttgaagttgagggagtcgacgatgtaggagatcataaggccgagggtgagaatggcgaggacgagggtgccaccgaggtcaaggaggaaggcggcgcagggaaggagggcgacggagattctgagattgtgagcaaaggaagctggggagaaacgggaattgttaagagatctagaagtggaagaagggtccaattcaggactccgatcggaggaagagtaaggtggggagccattgctgaaggaggaaaaagaaggagcgctcagagaggacgatatgtatggtcggaaggagcgtggttggagctccggcggcatcatcttggccggccaacggaaaacaacgacgacgactcttggcttctttttctcttgctcagagagagagactactctgttctgttctttgctctctcactttcgtctcctgtgagttttgggtatttttttttttttttttaaaaaaaaagttattgagaaattgtgagtggttgattggaattttatgacgtgtttggccaccaatatgaccgtccgatcatccaactaaacaaattacgcctattgtaatcggctaaatacctctattaattttttccaaatgtctatcatcacaaaattaaaacttaaaacattgatagaagacgaagaacaaaagaaaaagcctgacaaaaaatacatccgaccattgatcgaaaaacttatccactcattctttggttctttcaaacttttaatagtaaattgtgaacatcattattcaacaaagttttagggttattttcataactattttttccttttttttttttttgagaaatacaagatttgtatcaaa

SEQ ID NO: 297106 - DNA, 2051 bp, Cannabis indica
taaggaatatacatatacatttatataattagagcaatctcatttttattgatttgtagatatagatagtgttttacgattactctacttaaataatttgctgtgtggaaagtgagaatagttcatacaatgttcagaatcagaagtgctgctacacttgtttgatttcattgaattggttaatttttcggtgactttcttatatttgttgatatttacttattatggaacattttcataccaggtaattgcagattttgatgccacactaaccaagtattgggtcaatggtcttcgtgggacaagtaaggcaccctagtgcttaaatggtttatataattttctatatgtttgatttgtctcagttttattgataacaaccataggtagtcatggccttttgcgacaggtgaatccggaatatgatatgaaaaggagggaattgtattatcactatcatcccttagagttttcgccaacaattccaattgaggagaaaacaaagctcatggaagagtggttcgcatctttacccattcactactctaaaatgcttccatccatgatgaaactatattagcattatgtccactagggtagcttctaatcacactttgtcatgaagtgttctgcatctaagataaaattaagtttggacaataattttcaaaagattgaaactgtcaatagtattgatgcaggtggggaaaaacacatgctcttttaatcgaaggaggtgttacttgtgatggcataaagcaatctgttgctgattctacaattgcttttagggaaggtgttggcgaactacttgaacttttggaggtaaagttcattttatgtataccatgttttctggatggatatatatgcatcacagtgaggcattgcaacagcaattcccttccaatgatttgattgggactatattttgaagagtataggatggctatcctaggcttgattattaatttcataaagaataagtctcattttttaattttcttccttatatttttgttggtttttgctatcccaggaaagagacattcctgtacttatattttcagctggactagcggatataattgaagaagtgagtgataaaattttacttctggaactaatgaatattatgttttaattgtggatctgacttacagtttggtttaatgtcacttatttcttaatatcaggtcatgaggcagaagcttcacaaatctttcaaaaatgtgaagattgtctcaaaccgaatggtattcaatgaaaagggctgtctggtttcttttaaaggtaaccaattctttgaagacattaaccaattgtaagaggcaaacgagaataatattgttagggggtaggggtattttagcctgatgagtagtgcttaacttcatgatctttagaatcatagctcgggctcagcctttctttcttatgccagtatttgtttttatttattcattattaagtgatagaagatttagagggagttcatgttttttgtttccactaatttttcgtacagggaagacaattcacactttaaataagaatgaacacgcacttgaaatggctgctcctctccacaaagaactgggtgatgtagatgaaccaacttctgacaattcatcagtaaagacaagaaccaatgtgttgcttcttggtgatcaccttggagacctgggaatgtctgatggtttgaactatgtgaccagaatttctgtgggatttctgtgagtaaattctgtcaattctttttacttagctattaaatttgtttctttaacagtagcttgcattatgttttactcttttacagagttaaagtttgtattgtgagattatcaatcagttaaagtttatattcattactcaacatatttccagtgttccataaaaaaaaacatatttccagtttttatttagtttttgaagctgtatttgtactgtgtagtttcaatgactaatttctatcattttggtggaatgactatttcattttaaaatggaaagaaaaactattccaatggaagataagaaaaaattta

SEQ ID NO: 297107 - DNA, 2517 bp, Cannabis indica
tttttgtatttttcggttcttttccctcaagttttatgttgtaagtattattaccattaaaaattaaacttagatatttatttgcaactgtgagttaaatttaaatatttatgtcgcaaaaaactctttttaaaatgtaaaagttatttatttttaggtatttccatttcactgtttctttatttatatattttatttttttgagaaaaggaaattcattgaacaacttaacgattacaaaaaaaatggcaaatctcgttcaattgcgtgacgagcacaaaaaaacaaaagactatttatttgttgaaaatgaaatacaaacttttatttacatactaataaataagaaaaatgctagaagggatcagtggtacttagcactcttctatgtgttaatatcgttattactctaattaaatatcgggtctcataaagtttaataaaataacttttagagagtatcgttagccaatcgcaaagtgacatgtcaagaggtgctaggcactttgcctaatagtaatgatcaataaataactctctcaatacaattttggaagggacaattttggaaattttctttagaaaattgaaattttttactttcatatatatagtgcgaaatagaaataatcaataccttacaattcagtatactaggctaacaaacacgcaatacaattaagaacaatatatcgagagatcacaaaaatcaagtaatgaataaaagttgtaaaacaaagaagaataataccaactttaacgagttcaagccttatgcaatgctctacgtctcagtcggaacaacaacaatcatatctttattgatatcagtgtttatcaatgttacaagaatccttacgaattctcaaagattacaagaaaaggtttctctttctaatttagactctctctctctctcaaccttacactatcgtaattttactcaagcaattatggtaaaaaacggatacatattacaaagttaatggatatttatagatttgcattgtttcctagaaaagctttgaaacaatcatggcacatttattatgccttaaatgttccagctcatcactagcaacaataatacatgtcatctttggtaatccgttttcagtacagacaatctggaagctttaacacggacaagctatctggatacgtacaagcgctcctcccgaatgaacatccttaactgatagtaagctatctagtaatgcatctctggattaatgacaagttattcggaagacactgctttacatgagacaaacttcacgaaagaaccatctgatcggccacaactttaattacaaagcttctaaataagtaccaagctttttgtaactctattttggagtaacataacttcccaaaagacaaaacttgtcactataatcaacaatattgatgaaaggagaataatttttattaaatcaataagccaaaaaacaaccaaagctcagcaaaaagctctaacaaactaaggtacaaactattcataactgctatgatatatcagcagaggggtcacttttgttcttactaaaactcccaaaattaaccataatatcatgtatgatcaagtcattaacataatttatagtgaagaacgacaaacaaacacataaagattcttgtttagccaaatataatagacaacaacaaccataataacatcaaagatttgattctacaaaccattccttaacttttctatccaatttttccaatccatgaaagaaataggagagttagtgaaatcaaaccaattcacaagcgtcaaataggtgtgaaatttgtggaagtcctcatactcttgataaatgcatgtcaactaataacaagctcaagccatagctaattttagaggcagttcaacaatctcttctctaattcattcaatcatgggtggaggaatcacccaaaattttcttggataaataatcagggcatcagcctaatcataatcaattccaatcgaatatgcctcatcaacatcaagctaatccaccaaaaaattaagcttctacttttcagcagttgaatcaacaagctctacatgctcaatctaatgatttataagctactttgtaaattatcaccaatgcacagacttagtttatgactaagataagaacatccattcaaaatcttgagatacaagtgggacagttggccaatatgccttataacagacctcaaggaaatcttccaaataatacagaggtgaatcttaaagaaaattgtaaggagtggtaaagaggtagaagagctagtgaagaagcctattcctgctccaaaagttaatattgaaaataaaggtttaatggaagaaaaggttattgaaaaccttgagaagaagtagcaaccaatcaactatgagcacaacgtcaaaagtcccatatcctcactagctctaaaagaaaatacttgaaaattgttgacggtgagaactcatcaactaagttagtggtcggaaaatgcaaagctaattaaaaatgtgataaagataaa

SEQ ID NO: 297108 - DNA, 2432 bp, Cannabis indica
aaaaaaataacaaggtaaaaataaccattatgtcctctctatcatccaattaatcccattttcacacttccatcaataaacactctactcccatctagtctactaaaccctaaaccctcctccttccaaaagaggagtctactaaaccctaaccctctccttccaagaatgcagtctactaagctctctcattccaaggaacaacccaaaattcaagataacatggctaaggatatcattataatagattggcgtaaaaagatggctctaccaagcattaaaaatcagggtacagcaggtaattccattttttaaaatctccaagtacttttaaaagattaatgccattcttactaaatttgcatcatcctatttattatttttcttttttatcaatctattaatttgtatgcctaaaatgattttgcacatggaaatggatcacattttgaagcctcacatcacaatgcaattaattctaaaaacattaaaaaattaaaaaaggagggttagggtggtcgttttcccagagcatttatattttcatgcacagctcaaatacagtctctatactataaacattgataatataaagatgccataataaagaaaatgttgttattttatatataaatatatatatatatggtcatcgtacgtagaacatactgtagagaaagaaaatataattttaatgtgataaaggaaaaaaaaaaaagtaagctcatacacatactgctttaattttacccagtgaacttttgtaggtactagctggcttcgttaattattacttcaacaaataaaagatcaatgctattataattaaaaatagtcttcttattgattgtatttgtaagcacaaattttctacacgctatatatgaggaagcaatttaaaccacacactttcaaattctatacattataatttctttctggttaaaaaccattagtttttcactttcaatagaatttagataggtacctgcattgctcggataggcaccccaagcaaggaaagtggataatatccaatactttggacttagtatgggcatctttccccctccttgaagcaaaataaatgacataatcatttacatgatcacccaacaaaaaagaaaaaactcattaatttggcctcaaaacttatttgtgtgtatatatataccagtttaggaacatgaagagcaactttacacaagtcaatgcttttgctcaccataatgattcttgcatagaatcagcttgatgagagtcactcctggccacaatcacaatgtcagatccactctccttccttgcatccacagctgcttttatcctcatcactgcctcctctcttgacaccactttcctaccttgtgtgtgtccacaagctttgggagatacctacatatatatacatttttatgcaaatatgtcaagttaaaattcactcttagacagctcaacaaataatatgtttcgttttaatttcatgcagagtgttgctgggccatttcatctgcagatgcagttgcatcatgtaaagcactgcgcgggacaagtgtgacgctctccccgcaacatctaattgatgttgcttacatcaaccataaggttaacggaagttttcaagtttcctgggcaatggatttcataagagacagcgggattacacttgaagaatgttacccttttaagggtcatcctcatttcgacaaaactaagatacctgaggtgatactgttcaatcttttttttaattattattattaataatttttaaaactaaaacttacctataaattcagtttcaaaatttgtacacagtggaaaattggggactcataagatatgacaatgacaaaataagcgaaatgcttaaacaagggccgatggtcattaccgctcactacgacaaaggtttacgtaaattagatgctaatagcatctaccgaccaaattatgaactggaaggagatgaagattacgggcatgcaatgctattagttggagaaggtgttaggctaattggaaaagacaagattcatttctggatagtgcagaactcctggggtgagaattgggcagagaatggttttggcaaaattgtaaggaattacgaattgaaagtgagaggatactacccaattctacaatgaaggtgtgtatttagttattagatatgcatatatatttaaagattatacactaatttgttttaaatttataaaaacagagatgcactggatggcattggagtggagagatattctgacaagtacaaaaccaaacctttcaatattgaacctaacaaaatgagcctaaggagtaaacatatgttattctcactccctagtttcattccttttttttttcctttttttattttcttttctttctttttttttttttttttggtcttttactaggctatcttagat

SEQ ID NO: 297109 - DNA, 11214 bp, Cannabis indica
ctctctcttgtacacgcccaatagggccttctcacttcctatctcacaagcctctaaagatacacctctctctcattagtggtgttcctacttaatccacgcgttgtaaccttatagagagctatatcagatctcactaataatgatctaaacagtattatctttaggtatcaatacaacaaaaaggggagtaggttattacacgctaactaagggggccaaacctttataaaaatccttgtcttatttactttactgttcatgttgtgtaacacgtggcgaacatcagatttatacgatcctgttgtcggttgatcactttttgaggtcaataggtacctaggatacattcagaagggctatccaagattcacgttgaaaattaggttgaagctatatggcgatcattagacactgaatctcaacgtatcacagggttgtcccctatgtcagaatctaagagtgcacgtaccaccaaaaggagcaccccttttccctacgacaattattctaaaactacagtatgcaaagttggtgcactcaagaaacctatcaacatcaagtgttcccctgttgtacagatcataatagcaacacgggctgggccttagtctgtggcctaaagtcagtgtattttatgtatttacccaattagtgggccaagattacatgcaaaccctaataggtcacgaccagtatgcccatactcggatcttagcctataaatactatgttataccctcatgcaaagggtcagaaaattcacgttgtaaacaaaatagcaaagagctaggattcttaagcttgttaataacttttgtgaaatacttcaagacttctcaacctaatacaactcagtcctggactaggatacattaatacccaaatcacgtaaaaatctccatctttcttttcatctatttgatttattttcttagttgttactttaatatgcgcagttttcaaaaatctcggtaaacattttggtgctttcatggagagctaaggaaagactttaagacaaatagtatctgaaagaatggtggctactagaaacatgtcgctaacccactacccatggtcaggacgttatcatggacgacgttaacccacctccgtcagtgcatgcctaaatgagcactttgaagacggagaaacattaaaagcttgtggtcgtccagatggatggatgaccgagaagaagaccctgagggaaaaccaacaataaggatgatagaggagatgaaaacgagattaaagatggctatttcaaggaaaactattattatgagaaagatctcaaggtatattagatggctaaagaacttgcagtaacttggcaaaaactggtagcatacgaagatatctctcatcagatgcagtaaacactagcgcaacaacaggatagattcaacgcccatgaggaaattttagaggagaatagtctaggagagccttcccctaaggaaaataaccccacaaaaaaggtgaacccaatttatgtcagaccttctgtcctgcaaaggacaaaggaaaaagtgttaagggtgaacgccaaagatatactactcccaccgttcccaagacaaaccataatctagttaataagcctctatagaaatattaaggactgtcaaaccccaaggctaggatgcccttctaatctgtgagccaaggttttccagtatggtaggctagatgctttggtaccaaagcctaccgttcaaggatggaaagactttcctagaaattctataaaccaagaagagggaatagatgtagtttgtcttgaagatagttggtccactatagatctttgcaacaacctaaaagtaaaatgagagaaagctggaggtttaagggtgaggtcttgcaaaaatgtactccaaaactatattaacaataggatccacatgcgtgagttcctggatagtgactccaagcacctggaagagcaaatagactccataacgaagcttgtatggaaacaaagcagagcaatctttgacttagaggaggaagatccagaaccttgtgtcagatagatcatagaggctcaactactaaaaaatttcaaaatgctacaaatggagttatacaaaggcaggatagacccacgggctgatttgtgcaaatataattgtctaatgcaagtggcaaaagctagcgatgatgcctaccatatttgttttttgtttgtagtactcaagtttgctgaagattggtaacccagattattactctagttacatggaaatcaatttttaacacgtggtaagaaagaaaaaatctcagagttgagtagtcaagtatcatagcagtcgacctaggaggggtccctagccctgtacccatgttgaatttgggaactccagaatgggtgtttggatcccaccaagtttttttcaatgcactatctttcaatattttgtatcatcaagacatgatgcatcaaaatccaaggctcgggagctgaaaatacactaaataacactacaaaaatcaactcgggtgcctagcgtttcacctagcacccaggttgacaacccaactagtgtttaagttttcaagactctcttgatgtagatgggtcaaactttgtactagaacatgaactagacatgccacgaagataattgaggcattataatcagattcaaagaactttcttttttgagcactagaagcaccaagtgccccaagcacgcagcgcccaagttgacatattttcaacctgggccactttcaaacatcaaaatgaaaatccatcttgggaattttcttcgatttcatcaaaaacagggaagcaagtgcttttgggaagaattagaccaacctggaggaaaaaacaagggaccagcgcccaagttaatatttttgtcgacctcagccatttttgaggagtttgtcacaaaatttcttttagacatattctacaatttttgtcaaagtttaagattcaagtatttctggggatcaaatggaactttctaagggcctgaaaataggacccagcaccacattaacacctgccactgggcccaacagataggttgtcatattttcaacctgggtcgtttccaatcagttttctagaaaagtattctgggccttttttctgtcattataaataatgaagatacaagtaaactggggttgaaaatgacaattccaggggcatcaagactgagcttaatgcccaggttgacaatcaacctggtgcgctagttttcatcattcaaatgcaaattcttctttgagaattctctttgaaatggtcaaaaattgggtagcggaccttgtcctcaatttaaagaactttggaattataaaaacagcatcctagaagatttgaaaagagcacccaatgcccaggttgactagtttttatagtaattgagagctatgaagttataagagccaaattcaaaacattatattttcacttttttttagtaaagttacttgctcggaaattgggtagttttgagtctcccatttttgcaaaacatcatctctgagaattggtgaccaactttactagaacacaaactgccaacacgatgtcaaaagatcacatttgcttcaaaaattgcatcctatacactgttttcccttggcctagcatccaagttgacatcacatgtcaaccggaatgctagacatcaacctagtcgatgagagcgaaataacattcagtaaacaaccataactcactcaatattgagctaattgatgtgattcaaattgcatcttgaagcaatttcaaagttatataaattcaagtctcacactccaattgtaattctgaagttatcaactccaaatttcaccctccagagagttacaaatttaagctacaacttacctggaaagggtctcacgggcgcaactcaagctttagaaatttgtgactgaactccagagttaatttcatcgctagatgatcatttatggtcaaaaatattctaaattaattttttccatatttttttggaatattttataggacctccttccctgcaaaagtacatctccactagttcactttttaagttcagataagtactcataatatcatagcatctctctctagtttatctctatagaaataagagcttccaaactaagctattattttgtaatccatctcctgaaaaataaaatgctccattactgtcgcgatacagagagtaaacgactataaattattgtgcctcattgatttatacttagccaaataatacactctttctaatctagcgacagttgtggccagatatatgtgtccaaatttctactcaatatttcggtactttcattgaaaaccacaattcatggaatcaattacaaggtggttgcaacacattcctcaagtgttggaaaaagatccctaacaactggcaagcagacttggggcacactagtcactggaatcggtgatgggactacacctttatcttagatgccaagtggaggcctccaacaaactccacaacccatccctcaaggcaaccacctgctcctgatactgaaactagtgcactaattccacctggggaaccacgtgtggaactagaaaaccccgaggagatcgatccttacgttcaacagcttagaagaactgtggttgacctctaacaacagctacaaggttctctcaaacaagaaaacaaatagtttcaaagtttattcgtggagatctggctaaatattgatagtcaatgagttgagtaggaacaacaaaaggataacctatctcaacgaatcaaagaagcttatcgcttcgatcgtgggactacctcccgtagtcatcttcctatgtttgtaggagatatttttcgtcggccaactgatcatgtgggaacaagtactcaaggagaaacccttaacacaaaacaccactacaatgcccagtgattgtgaaagtactaagcaaacaataggcgctaagacttctcggagggaggaaaactttgagcaagagtttgaaagggctcatgctcgagcacacaaactaatgggccctccacctaatatgtagcgaccactcactactgagagaactaagggaactctaccaccaagttctccttgtttctctaattacaccgggccttaggaccctcgaaatggaaagggacctactactcacactaaagggggaagttagaggccctactttgaaacttgaggttatgatatccgacgagtaagaactaatgaacaactttgcactcaatagtatttcccacatgagagaggtgagttgtgccgttactttacccgtggcccaaatggccaacaatatgagtacttccctcaagtacatgaaggagagtggaagttgagcaatcaattaaattctttgcacacttgtgatcctactgaagacaattttgagggaaatagtccctacaatgttttggatgactgctcttgcagcgcatcatccgaagacgacaaaaatttcattccaaaaaagtcactattgttgccttcgtcacctcgtgctcagaagacaaaaacctgacataattcggctaagttcatgatcgacttggaagattgaaagatcttcatgacaccctaaatagaagacagttggtggacgcgggagcttcaagaggtgaccctgatgtggcaatacaagtttcgactgcgatgcaaaccactactcataatgttaacaggataatgttcaacaatctagcgaccttggtgaaaggaattatgacccctaagtattaagagtttaaactagatagagagcgatactcaccgctctcagactaaattaaagctctgtgaattcctcctaagatcaaaaatccttcctagcaccagtacactaggaaagaagactcgttgtctcatattcattacttggaattgcagaccaatctgtaaggagtaagggacaacatacattttagaattttccttaccatgttaatagtcattgctcagcaatggtatctcaagcttccccctagatctattgattgatggaaaaattagtggatgcttttggcaaccaattccctccttctcgacggtgccatgtcaaacccaataatttggtatatgtgaaacaataaggagattaatccctcaaggactatattaaatagctcatagaggtagttggtcagacaaaaacacttagtgtggacgaaagagtaatggcacttgcaactgggctcaaggagatgagtcctttttgatctgacctttgtctcaattgagtttacactatgaatcactttcttaatagtgcaaacagctttatcaagcttgaagaaactgtcactcgagtgaagggctcgaaaatcgaaaagaagaaatttccaaactctctaacccctaacattggaatgccgagtagtgggggaaaagaatgtttgaatgtaggcaaaagagataacaacagagtgagaaaaggtaactcccttggtggaaagaaagccaaaactgggggcaagcccatgtaggagtcttaaccttgtttcaccacttattttattctctttgccccaaaagaggagatcaatacggccacccagtcaatggtgtcataacctcttgccttcaaatagtcagggaacagggacatgaataaattctatcactatcataacaattagggtcataatacaaatgagtgtaattagttgcgagacgagatagagttttttatgatccaatacattcagataccgtgactcgtatagtgtcagctaccctcacaatgatcccttagttgtttaggtgcaaatgtgtttgtcactcaaacacttagagtgatgatcgattatggggcatccacaaacatcttatttaagaaacccttttacaaatgtgtttgtcactcaaacacttagaaccgtgcaaacaactaatgcaaggctttagcggagcaggcataactccatgtggtaagatcaaactgccactcatagtcggaattaccttaagctagaccaccatcatggccacattaaaagtgatgaacgtaaaacataatgcttagaaggcaagatttatttgacattagagctatcttgtcaatataccacttcaccgtcaaattctaacaatggttggtatctattttctccttggtgatcaaggaaccagccgtgagtgttataatgctttgctaactctcaccacgaagacctcttgtgttgcttaaacaccagggggacgagcaaggcctccctcacaaaatttggagagacgaaagacacctgcagaggtgaagccaaggaaaagatggagacaacacctaaagccacttaaagttgcacccaagatgggataacatcaacccctattttgtagaaattttctcaggagatggtctgactgaggaactggaggaaactaccctcaacacgaaaaacctaaacaaggttgtcaagaggggaacaaacctgatggaggctttgagccagatgcccattgcttacctcaagagaaatgaagacatttttgtgtggtcgtatgaggacatgattgggattgacccccaagtcatatgtcatgcccttagcataggcaaagaaaacttcagacgtgtgtaacagaaacgtaggctccttaacaaagaaacctctaaagctttcaaggaagatgctgaaaggctactagagaacaacttaattatggaagctttctacctagtttgggtatacaatcctattctggtgccttaaccgaattgtaagtttagtacttgcattgacttcattgacctaaacacagcatgcctgcacaagacctaagaacgaccatttctgcaacttcagccttccttctcggaagtcgaggcttgcttcataaaaattcaacatgactctcgcatgcatgttgtttttcgtgcaagaaagatcactgggggtacgatacatcttcaaccctccttcccggaacggaaggactacttgaagtttgtcttactccacgtgatgctttccccttgatattttcaagcgaattctaagcttgaattttttttaattcatcctccttcccagaagtcgaggcttgcttcataaaaatttaacacgactctcgcatgcacgttgttttttgtgcaagaaagttcacatggtgtacggggtgtacgatacatctttaaccctccttccttgaattgaaggactacttgaagtctgtcttactccccgtgatgctttccccttgatcttttcaagcgaagtctaagcttaaatttttatgtaagttcaaccttccttcacgaatgctgaggcttgcttcatacaaattcaacacggctctcacctgcacattatttttaatacaagaaagatccagtgtacaatacatcttcaaccctccttcccggaatggaaggacttattgaagtttgtcttactccctatgatactttccccttgatcttttcaagcaaagtctaagcttgaatttatatgcaactttagcctatcttcccgaagccgaggcttgcttcataaaaattcaacatgtctctcgtatgtatgctattttttgtgcaagaaagatcacaaggggtacgatacgtcttcaaccctcgttcccagaattgaatgactgcttgaagtatattatgctcctcgtaatgctttcccatatgctctttttcttctgcaagaatggtcagtgtctaaattccttgtgcacttttagcctttcctagcgaaagccaaaagttcaccatcaaagggcctgacatgacttctagacctcaccataaaaggaatttcctccataaggacataggcccagctttccctctgggaaaccaaaagcctcttgcactgcaagaagtttatgacctcccttatgaagttcatgccacggagggatcatgtgggacctatcataaaactgggtttgcacaaaaaccccatggcttttctgcatagaaacttccttcgaagaaccacacgcttcttgaagaagggaagaactacactcaactctactcctcggaaattggaagaggacacaagttaggctccaagaaaatgactgagaatttaattccaaaatttccagctcatttagggggtatggtgtgtccgagtgatgacagctgcaattttttacgttcgtttgccaaagttgactatcctcaatgcgcgcatgcaaccgaaaataggaaacattttcaactaagtctcctcgagagaaatacacttgaattctttcctcaaaggctaaaccaaagcacaaatctggagataagatgcctacggggccaaaattgttgaaaaagaagaaatacgcatgaattccttcttacacatcttcgcagacttcacataagtttagcccatcaggttgcatgatgggctaaaatagtaggctagcaaggaccaaagagagaaaaatgcctaaggttaaggaagtcgcggacatcactctcggaacttaaccttgtgggaaaactaaaccttgaagaggatgtgtgaaattgcaaaagatcttttcgtagaaagaagccacctctgggtaacttcgaacgagtgacttctcgagtgatgaaacgaagcgcatcacaaccccaggaatcaaaagggtcaaatcaagaagcagttcctaaatcaaccaagagataattaagactaacgggaaaaggttgaaacactggccgttggaaccaagtgcttcagtaacacaaccagcccctaaaagtctaccacaccaaatctctaagtaaggaacaacaaaaaaggaccctatttacaattacagtccttagcggcggggatgaattttaattgtctccgcagttaaaaaagtatgataaaaggggggatcttctaaaaaaagagaagaaaccaatgaatttaaagaggcctgctggaggttctaggttggatgccccctgactgggaggaagaacctgcaccaaacatctgcccaacagtctccatgtaaagatcgtgaacggccttcatgctccgtaagaagcgggccttgtgggcattctcctcctccagctgctggttcgcctgctacagacccccaatttgaaacctagcatcaataagctcagcctggaggctctcgttggcggcacgcaggtcacagttggcaactttgacttgctctagctacgtcaccagcacgccagctttcgcagcagtcctctcagttagcagtgccacctgttaaaataggccaagtcaaagaggcagaaatatcggaacatgggcaaaacaaacgaacaaaaaagaaagaaaaatggaggtaaacttaccccaactacctattgtttggaaatatgggtcagtgcgaaagtgtccacattgctgcaggaggcccaggtatccatttgcagttcagaagcactctaagccaccaggtccagaactttagtagcaaaaggggtagcctctctgaccatctaataagccagcctcttctctaaggcctgacctccacggttgaccccgcagggggtagatcgtgcatgtgatctgtaatctcggccttgcagactgctaaaagtacaactaccctgctgtagacttccagcctttctgcctccaagcgccccttcaatgcctgattcgcctccctctccttctccatgatgatatggtcgaatggaacgacctttatggggaagggaaaccccactaagaatattcttgacaaggccaagggacaagatcaaggctgacccagcctcagtgggggatcgtggcactgggggtggacccccatccaagagactgacacctcgagtctactttttcctagcataattgccacctgctgagttagaagagccaatttttttccattgcaattttactatacttgctagaagttgatacaacaccagaacaagtcagctcattgtgtgaccccaaaatcgttgaaggcaactgacatgggcctagtattcataaggtggacacacccacacaattccatcaaaactctacaacatgtaaaccgagaagaaagcttaccagttgtcaagagaaatttgaggctggtacagtgtcctcgccgacagaactaatatcaaaccaagaaagtattagaagagtttcgcaaggcatgagaaaaactctagtttgacaagaagaaaaaaattgagtagactggaactattgctaaaggtatttaatggacactcaatgtgacagtcagtagtcccgtgatccgtaaggggaaacaccgggt

SEQ ID NO: 297110 - DNA, 3890 bp, Cannabis indica
agaagaacccttttgcccaatgtgaagtaaatgctttttacctatatttgctaaaaaaaagtctgctttcaaaatttggccttttgaaagtgttgtcaacttggttaatctgtttatatttgggctgacttagtttcctctggttgttttttcatattaacactagaagaacacactttcccatgtgggtttaatctgcagaggattttgagctatggttatttttcatagtagctaaacaagttttgctactttactcataccagaagaacccatttgcccaatttgaagtaaatgcacagcattggttgttctttcatagtagctaataaaagtttgctactttacttaagtttttaaaaagtggccttaaaagagtttgtggtgtagctcatcaaagtcacaacagaaagattcgagccaattaacttaactaacattctgtaatgttagtttccacaagtcaacaaggagttagaataaggtcttcattcaagacaaggagaaagagagtttagagagagtgagagagagagagaaagaacaagatttcctttggggaggattttgtattgagttaactaactgtttgaaagagttgaactcgaggattgagggagtgttgtttctcttagatttgcttgactgtgataatgtagttgtagattgtttgaatgattaaagagaacgattcggtggttctaaaattggagtaggagcaaggctgacacagctttgtttcggtttcttgcgtttaatttctgttctttaattgttcaatttatgttcttgaacacggctggcttaattgtgtttgtttatgtcttagctttgttaacttgtttaaatttgtttgtgcttggtaggttataaatcatgggattagtacttcattactagataagttcaggacagaggttgagaatttcttcaaacttccttatgaggaaaagaagaggttatggcagcatccagacaatcatgaaggtttcgggcaattgtttgttgtatcagaagagcagaagttagattggtcagacatgttttacataaccacattgccacttaacttgaggaagactcagcttttcgaaaagcttccaatcgaactcaggcttgtctcttctttctttctactgctgtgatttttgacaaattgtgtttggaattctcagctaattatttcagtttttcgatttggtttcagagacactatggaagcttattcaatggaagtgaaaaagctagctatggtgattttagatcacatggcgaaagctttgaagatggatggtgaggaaatgagagatttgtttggtgaaggagttcaatcaattaggatgaattattatcctccttgccccgaaccagatttggctatcgggtttactcctcattctgatgctgatgctcttacaatcctcttccaactcaatgataccgaagggcttcaaatccgaaaggatggaaattgggtttcagtgacaccacttccaaatgctctggttgttaacattggagatgtcatggaggtacaattagagtttttttgttcatacatacatgaagctactgaaattttatcaaattttcaaaagacataaaagtaccattatatttggttgattaagaaaacttcactccataagtgttacttgattatatatcttaagtaactatctaataggtgtgaatcgaaagcctattagggatatgattttgataccatgttgagaatcatgggattacatctcaaaattaattagtaatgagtggagtaacccatgactcaatatttgtacatttgatctacaatgttatccaatagaagattattcctttcattttaaaatagaatagttattccatcataacggtagagacgttattcaattggaatgacattcaaatactttataatgaacccaaataaaagaatagaatgaaaattgattcatttccgttttgttccatttcattacctctaaccaaacagaacctaaatgttcgaatccctttcgggtacatgttagacaatttgcattaggaagtattgtttgtaaaaatctcatctgttttcatttgccttataaagctaaaccagatgagaaatttatgcagtttattatgagctaagctacttaagtttgttctgttatttctttgacagattgtgagcaatggtacatacaagagcattgagcatagagcgacggtaaattcatcaaaagagaggctatcagttgctacattctatagttccaagcttgactcggaattgggacctgctcttagcattattggccccgaaaacccagccatctttcgacgagtccccattgaaaattacttcaaggaattctttgctcgaaagctcagtggtaagtcctaccttgatttcatgaaagtgaagaacaaacaatagaatgtaactgatgaaacatgtcttgatttggcattgttttgtacgataaaacaaaggagtttacaagctcattaataaactgctgaagcagaaccactacagcaatgttgtagtgttgtagtgagtgatttaacaaaaattcatacaacgtatacatactcctatatacatatatatatatatatgtataaatgtaggaatattcatcattgtattattgtaaatttcacaattttctaaggttttctcctttacttggttaatttttatttttttgctttataagtttgtttaaggctttatagtgatgttctccaaatgatagtcgttttctcgaaatgatgtctttttcttgacatgatgtcgttttattgtgagatgtttttttttttcaaaaggcgtgaggttaaggttattggatttatgtcgttttctaacgaagatgtcgtttttagaaaatgttttctgcaatcatatcgttttctgcatatcatgtcgtgtttgctaattatatcgttttgtgcaaaatatgtcgtttcgttggcgtaggtgacctttttcactaagatgtcgttttttactaataatgtcgtcttttattaattatgtcgtttttcataaaagatgtcgtttttttggtggagatgacttttcctgactaggatgtcgttttatataaaatatgttgttttctgtaaataatgtcgtttttacgaagatcactttttcttactaatgatgtcgtttttaccaatgatgtcgttttcaaccaataatgtcgtttttaccaatgatgtcgttttaaccaataatgtcgtttttaaccaataatgtcgttttttctgaaaaagatcagttttctcattaaatgtcgtttttaccaatgatgtcgtttttctgaaaaagatcatttttctcattaaaagtcgtttttaccaatgatgtcgttttcaccaatgatttcgttttcaaccaataatgtcgttttctgaaaaagatcagttttctcattaaatgttgtttttaccaatgatgtcgttttctgagaaggatcagttttctcattaaatgtcgtttttaaccaaaaatgtcgtttttctgaaaaagatcagttttccattgattgtcgtttttttttcttaaaaaattgagctttgtgaaggatagagacatatataataaactcaatggaaataaatgtggaataaacaaaatgatgtgaattccattgcattaaagaaaaaagttgtattctttgattagaaactctgaaaattcacgtgtgatcatctttgtacttcccaatattactttcctcattcatcaagtcattaatcttttatttatttatttatttctaagctaaactcaaaagcaaatccaaactttggccaaatgcttcgaaagccaaagatattgctaagttaatcataaaccaaaaaaaaaatatatatataataacaca

SEQ ID NO: 297111 - DNA, 3073 bp, Cannabis indica
acttaaaaaaggcttctgtggtgaacctccaaactgaccatacatcattgattgctgcgatatacccccaaactgaccaaacatctgttgttgtgattagggtccttaaaaaaaaaaaatagagtagaaaagttgaggagattggaagagcatccaaacatgtttagaatttgaggggattgagaggaacttacacgcacattgggagagaattgttgagcctgctaaaaaggttgttgttgtggccttggacaagaagtgctactactgtgatggtaaatattgctacagaaaactttcaaacggttggtcatacaattttagaaaataataatgttaaataaaagtatgatatatatatatatatatatattgcaagtgttaattaattatgtgaataattaagagttgtggcaagaagtgtgtaagaatgggagtggtgcctgactcaccgggattattggttaaaggattatttgacaaagaatagaccataatcaatcatttagatcgcagggcgagcccattgaaaatagttttaaccaaactctcccaccaatattgtcaaggcctttgcaaaatcttggaaataaagcggaggtgattaatgttaatccttctgttgtttggcagcaaatgtttattaagatgccatgtattatttttcatcacgaagaagagttgtgtcgagttcggtaaccagtttaggcagctttagtagagcaagtaatccctatggctctagttccagtggtagttaatcctggatcagttctgcaacagtatagagattttttttcttagaaaaggttagtaattacaatcttcgatgttcctagtggtactaatatcataagggcagagaagtggttgagcactgtcaccgaaatcttggaaaatgtgggagtagttaaaattgaccgggtgaactatattgcctttatgtttcaagaacttgcttgtatttggtgggatctagtaggtcagactcaagattttaaatattgcaactcagaaagaattctaaattttgttggagaaaagttttacaatatatgttgtctgtacactatgtatagaagattttgataaactagttcgagaaaatataaatatagctgagttcatattaatgtttgattggttatcaaaatttgcgggtaatatggtgccaatagacttcacacaaaatcagaagtatatttcaagggtggatgccacaatcagcagggacttgacaattaccaccgattatgacactttgtataagaaagtggtagagagaatacttatcactgcggaggcagaataacggattataataaaatgtactgccagggatgtcaatacgacatcaatccccagtgtcggtggcaacttcactaaggggaccgatggtggcacttcagatcataagagaaaggttgagacttccaaatcatcacgaatgaacaagagattatgtgggaatagaggcaaccgtcaaggttgtggtagtatattcaaatcataccctaaatgtcctaagtgtaaggaacaccattagggagaatgttaggtcaggacatatttttaatgtggtgtggttaaccactttattagaaatttccctcaagctaagaaggaggaatcaaagaagagtaacaaccagaattcaggatgcctgtttattgtaactcaagaagatgctaatgctagctcatctattgtgacatgtcagttatcgattaatagtttcccttatacagtgatatttgattccggagctgcaccctcttatatgtcaagtagggtgacataaagttttcgtaaacctctcaatgtttatgttttggggtttagaacactgttaccatctagagagttggtgatctacactagatggattaggtccttatcgtgttgactttacggttgagggataactgccaacctgattgggttacagttgtgtgacttcaatataattttgggaatgtacttcttgtccaagtattgagcaacgactgattataagctattgaccttgaatttgagtcgtatttatgactgatattaccacgtgtacacaataagaactagaaaataaagagaatatttttatagagcggttaggtatttttagcctaagtttcgggtcaaattaataagcattttctcagttattgttgtcttttggaacagttttacgcttgattttccttgtttcaggttcttgatgcattgtagttcaatttctgtcgattggcgaaaagacgggacaatttggtgaaaaatctgctgaagctgctagattttctccagtagttgcgaccaacataagccatagtcgcgacccttttctttggtcccgactatggtcgcaactaggctgaattggcaaaaagtgtgtttttccattttgcctatggtcacgactagcattttatgtagtcgcgaccaggtacgaaatacaggatttttgacctaatttcgatatttttctaatcagaggcacaaccctaattcctatataaggggctcgactcatatgacaaaaggcatcagaaatcagccccgaaaagtgaatgaaggaggagaggaagctatcgtgacgatccggagcgaaatcaccaactagttttctttcttaactcttgaatttctttgtgtttatttttgttttaatttaatcatggatgttaattttgttttcatgaactaaattctcaattaggagagacgatgaatgttgattaaagtttttgcctagttaatgtcaattgtcattccttttatcttgatttacgaaattatctatatttgtgtttaattctatgtttaagtttgatcaccttttacatgttctatgatctcaattcaaaatctagaaagtgagatttttagtggttgtgattgactccagcaaacccgaaacatttgggcctgaggtagtcagagttgttaaggattttcttgatgcatttcctgaggagttgctgggattacccccacaacgagaaattgactttttgattgatttagcacctggaactgaacctgtttctaaagctccatatagaatggctccagc

SEQ ID NO: 297112 - DNA, 3069 bp, Cannabis indica
tagtaatgtatgtaaatttcccatgattaaataaatcctatattttctaaaattgtataaatagaaccttgaactgattttttgtcataataaaacttaataataatctgatttagagatgttatgacaaaaatagttacattttctgtatatgttcgtgttagaaattgtcttaaagtttgttatattaaaaaataaaattgttgaaaattgaactcaatgtcctatttttaccattttagaaaatataggatctattttgtcatttaacaaaataaaaagtctaattaaaaatttttgcaaaacacaaaatttaaaatggtatagggagactaaattcatttatttatctattatttccaaatttttttcatgccaaataagtgaaattgactctcctactcctcgccctactattctttctttccctccacattttcattatatcaaacatagtgtaggaatggcaattttttttggatgacagtggtgatgcgtctaatctcacaaatgaagaggtaaatgtttttgaatttgttacaattttagtgtaaatttttttgttattttcaattttatttagaaaaagatgtcaaatatgtttgaaaataatatttattaattctggttgcactttgtaaaccatgaaaggtaccattagaaacggaacctcaatatcttaaagttatggagacagaattgaatggatagttatctgaagaggtatatggctgatttttttgggtgactttgtctgtatataagggttaatttttttggtggttttgtctgtattttttaatatttttggtggttggattccaggaacctcagtcccttcaggttgagattgaggaggatgagaaaggttcaatcacaaccccaaacactacctatggcagatgcaccaggtaccccatgtggcagatgcaattcatcacacatagccttaaacacaaccataacttgaaatagatttttacatggaacccctaccccatacacaaactaaaccagaacatgaaatagattttgacatggaacccctacttcatacacaatctgaacaagaacctgaaacacaacctgacatggaaccccaaccccacacacaaactaaaatagatttgtaacctcaatcctaactccaaccccaaacaaatttagaatcctaagccagaggtgatggtgactttgaatttgtggaagaggagtttaatccaacagtataacagtataggggaaaggaaccatgttggaccatcagatccaagtaaatggtgaaaccaagcaaatgacattcatattgatcctcaggatgatgacaatgatgggatagagtcaggtgatgacctatgcagttttcacagtgatgatgaagatggtactcatacctcaaatttggagttcaatccctaacaaagaataatgattttaagtttgagttgaacacggagtttggtagcatcaaaatcttaaggattacactgaaggagaatttcatagacacaggcaaggagtacattatgattcacaatgataactagaagttcaaagttaattgtagggcagtgggttgacatttaagatcacttcaataagtgataaatttagagaataggcacttttgattttctatatataaattcaaaaactgtattaattttatgtgtttttatttgtactgaatgttcattaatttttattgtcaggcatattgatatgaattggttagttaaatacttcatggataattttaggctacaccctaacataaattataaaacttttgttgaaatgacaaaaggtaccaagtattctaaagttacttcatggtaattctatagagccagagaaaatgcaaggggagaccttgaagggtttatggcagaataatatgtcatattagaggattgctacaaacaaattttgaagacaaatcaagtaagtacaaccaagatttaaacaaagttaattaatgggaaaatgatttttgaaagatgttacatttttctgcaagcatgcaaagaaggcttttacaaagtatgcatgtcactaacaggctagatggttgcttcctaaaaggatactttaaaggtgtattatttgcaataattgttgtagatgaagggagtttcatatatcccattacttatgcagttgtagagaaggaaatatcaagggatacaagcacactctccatgatgagtgataggaaaaaaagatctttaaaatgttgttgagtctatattcaacagcactggtactagattcaatgctaggcacatgtatcgtaactttaagaaagacttctctggcctattactgaaacaactagtttgggcagctactagagccacaatacttgcccattttaactagaggatgcaagaaattaaggctatcaatgaaggaacttacaattggttggcagccaaataaaaatcagagtggacaaagacatacttcaaggagggtgtcaattgtgacatcttgttgaacatgtgtgaaagtttcaacatgaccattatggatggtaggaaaaagctcattgtgacactgttagagaccatcagatattagttaatgtctatatttaataggagaaaggaaagaatacaaaagtagaagcaagcagtgcacaacaacatagtaaatattgtaaataaaaatggtgatgttgctcggaagtaatctaccataaaagtaaatgttgtcttatttgaagtgaaaatgtcaaaagtttgtgcttttatggttgatctgaacaaaaataagtgcacttttaggaggtttcggctcacgtagattctttgtggtcatgcatcaactgccatatgattttgtggccatgcaaaatgggaatacattcatagtcactacaaaaaataaacttatgcaactgtatatggaggaaaaaatttcccatgtctaccctttataagaggccaaacaaaggccttatctaatcttccatcattgtgagaataatcttcctggcagacaaaagaataaaaggagaagggggctgatgaaaaagatccacttgtagctgctggagttaaaaaa

SEQ ID NO: 297113 - DNA, 5271 bp, Cannabis indica
ttttgtgtaacactgatattttcattttttttttaaatagtagtttaattttcatttttgatttggtttgagcttatagaactaataggtttttggaaactgtttctaatttagtttataaatttgtagataaaggagattgtgatttttgaaaaggaaaaatgttaggaggaacggggccaatcttaccccttccggctcctccctcagatggaaatcttggaccacttccaccatctcagttgactgaagagcagcagaaggagagagagagggaggagcaagagcaggaggagctgaacaaatccaactcggttcctgcttcagttgcaacccatacaagaactattggaatcatacaccctcctccggatattcgaaacattgttgataaaacatcgcaattcgttgctaagaatggacctgaatttgagaaaaggattatagcaaacaatactgggaatgccaagttcaattttttgattccttcagatccttatcatgcttattaccagcataggttgtctgaattccgagcgcagaatcagtcatcgtcactgcaaccttcttcgcagcctgcagactctacaggaccagagtctgccacgccaactacggctgctgatggcgatgaaacagcagcgcagaagcctgatccgtcggctcagtttagacctgttcgtaaggttcttgagccacctgaagcggagcagtatactgttcgacttcctgaaggaattactggggaggaattggatattattaagctcacagcccagtttgttgctcgtaatgggaaatcgtttttgacaggattgactagtagggagattaataaccctcaattccattttttaaagcctactcatagtatgttcatgttttttacttcactagcagatgcatattcaaaagttttgatgcctcaaaagggcttgacagagaagcttaagaagagtgttgttgatatgaccactgtgctggaacgatgtgtgcacagactagagtgggaacggtcgcaagagcaggctagacaaaaagctgaggatgaaattgagcaggaaagaatacaaatggctatgatagattggcatgactttgttgttgttgagtcaattgactttgctgatgatgaggatgaggatttacctcctcctatgaccttggaggaggtcataaggagaagtaaggttacatctatggaagaggatattgttgagcccaacaaagaggtggaaatggaaatggatgaggaggagatgcaacttgttgaggagggcatgaaactgactagacttgatgagaatgatgaagagaagaggaatgagatgaaggtgtctgaggaaccagaaccaccaatgagaattgttaagaattggaagaggcctgaggataggattcctgctgaaagagacccaacaaagtttgttgtttctccaatcactggtgaattaattcctattaatgagatgtctgaacacatgaggatttctctcattgatcccaagttcaaagagcaaaaggagaggatgtttgctaagattagggagactactttggctcaggatgatgagatatccaaaaacattgttgggcttgcacgtactcgtcctgatatattcggtaccacagaggaagaagtctccaatgccgtgaaggctgagattgaaaagaaaaagatgaacaccaaagcaggtcatatgggatggtcacactggaagcattggacgaactgcaaaccaagctatgtcacaaaatcttaatggagaggatcaaaatgatgctgctaacaatgactacaggaccctacctggtcctgctgctcctcctcctaaatttggtcaacctttacttcgtcctcttccaccaccacctggattagctttgaatatgcctcggatgccttcaaacacaattcaatatccacctcaaaatagtggactacccgtacctcaacaaagacccccaggtatgcaaatgatgcaacggccaccaatgccacaaatgccacaaatgaccatgaattctggacaacagacctatatgatgaaccgaccacactcaatgcctccaccaatgtctttaggtggaccaaatatgtctataccacctcctcctggttctcagtacaaccccctatcagttccccgaggttatgctccagttcctggaccgccaccttcaatgcctcatggaatgcctccgccacctttgcctcacggaatgcctccaccaccacctgaggaagctcctccaccacttccagaagaaccagagccgaagaggcaaaagcatgacgactctttgcttgttccagaagatcagtttttggctcaacatccggtattgtttcttgtgttaataccttcgacagctaaatttttctggcatctgatgtctaatcaaatacatgatttctattttttatttgttttctgactgagatttgtatgtgtggcagggacctgttcgcatttctatttctgttcctaatgtcgatgaaggaaatcttaagggtcaacttgtggagatcacagtacagtctctatctgaaactgtggggagtctgaaggagaaaatcgcgggggagatccagcttcctgcaaacaaacagaaactgagtggaaagcctggttttctcaaggacaatctgtcacttgcccattacaatgttggagcaggcgaaacacttgctctttctcttagagagcgtggtggtagaaagagatgatcagattctttgaacatgccatttgaggtttttgctggaattttcttgataccttgaaaaatatgctatacattgattgttgaatcccttattgactttctttgatggaagattagtatatgttagagatgtaccatgaggaagttttttgaattttattctcatctttaactgatgatagagtgctatctaatacagatcaagcagggtgtctcttacagggcaatgggaagtacacacaagtatcttcggttcttgacagagctaattcgtctacctttagtactttcccttgtgcagttttcttggccaatttttatgttccctatatttgtataacggctgtgataattttgaaagcattcttcagttcttggtgttatgaaaacctttaaagtttctattcatttactgtttatgtttcttgttgacactttgttcctgtttacttatttaaaggaacgttttgccagatttttaattttatttttgtaggaaagcttgctcattctggactgggtggactggtgggtcacagtttggttcattttgagcgtcgaaacagtcggtgtgtgtgtttcggccagtgcttaaatcttatatctgaaaagcctaagttaaccttcagctagttttcttttgtttctggtctctactagagtttggtgttgcctgattatatgttgttttgcaactacagaaagctactactactcttggaatggtctcacagagagacctgtgttgaaactttgggtttgtgtctttctctaattttctcacacaggtaggatagtcctcctctacacacaaaaaaaaaaaaaaactagaaaataaaaatgtgttgatccttaatacttatttgtaactccaatggtagtcatttaaatctttgtcccttttctttttttttcttttcttttgaacagtgatgtggttggagtctcatgtggggagccagcaggaacttttagctctttgtatttttttttgtcaggactaacagaagtaaattttgttaatttttgaaaaatggatattttaaagacgatttctatatgactacttaagaattaattgcgtcttctgttctaaaattcataataagaagttattgaaagttcttttaactgcaaaatcacctcttcacttttcatacacatcatgagcaatggtagtatttgttttggttccaagggtccagttttttcaaccaaaaaggtaattttaatccgatttaatagtcaaggtttggaattggatctgagtgacaataaaaacacttgaaataacaccattgagcagaacccacctaaaaaccagccaacttatagcgaaaggtgcaaggtaccttagagcccgaaataacagaactgaagcaatggttatgctaaaagttgtattatattagacaccaaatattactttattaaatttggtataataaacacaaattttaattacaatttgatacatggtgcccaacaccatttaaatttgaattaatattctatagagattcgattgagagattataatataattcataactataatggaaaaaaaaatatatgttatcttacacaataaaatttttagaccatctaagatgttgtatatatttataaactatacacagatgtctatatattaatatataattacattttcaaaaaaaatatataattacattttaatattttctagaaatgcaatttagattatatgttatgaataatttgatgaattctttagctccaagagtctagaccacctttgatcaatagtacccgatttcgagtcactattatctgcaacacaagattaaatttcatttacattattagcaatgcacttattcggaagaaagaaaatattgatttttacaaactattgtaaatgaagatttcttataaaaattactatgcaataataaaaattaaaatagaggcaaaggaaacagaagaacttactatgcaatgtaaatgaagatttctcacacaattctgaacaagtatcctgcaaatgtaaatttatgcaatattatactcaagagggtgtttgacaaaaatatatataaaatgacatttccgtgctttcatttcatttgcagtcaaacaaaatgaaataaaaactaattcatttcatttcaattctattttatgattaaccaaacaaatcctaattactttgaacacgtgttcacatataaagaaatgttaaaagacaccttaagacgctgaggcccgatcttaagtataggtgggttagacttgtacttaaggctcgcctagcctagaggtctaaaaaattccttttaaaatatacacattttttatgactcactaaagtttaaagctaacattaaaaaaaaaataaaaataacgctgctattggtaatattcattattgaatctcacatattttgattagataaataattaaaaatcgctaaattctttataacaggacacatcatagcaatgatatttcacacaagactatctaggaaaataacattaagggtgcgtttggaaagc

SEQ ID NO: 297114 - DNA, 4960 bp, Cannabis indica
ttttatttttattttttgatatagttgatggacaggtgaaatgcgagaagtggattcgtgatgatgataatcactcagaagaatcaaaagctttgtggtggttgaacaggctgattggccgtacaaagaaggtgaccatagattggccgtatcctttcgcagagggcaggctatttgtgcttactgtgagtgctggcttggaagggtaccatatcaatgttgatggtcgtcatgtaacttctttcccatatcgtacggtaagcaatattgttttggcacttcttgaaaccatcctaaaatccaggacatactaattctgttttttctttagggttttgttcttgatgatgccactggactttttgtgaatggggatgtggatgtgcattctgtatttgcggcttccttacccacatcacatcctagtttttcaccccaaaggcatcttgagatgtctactagatggaaagctccgaatcttcccaatggtcaggtgggacttttcattggcatcctttcggccggtaaccattttgctgaacggatggctgtaaggaagtcgtggatgcagcacgacttaattaaatcttcagatgttgtagctcgttttttcgtagcacttgtaagttcagatgtgcattcataaatggatcgcatttcttcagttttgaaacatcatttgtgtattagttttccttttcaggtcagtattgaaggtctaagaatttcatttttgcagaatggaagaaaggaggtaaactttgagttaaaaaaggaagcagattattttggtgacattgttatagtcccttatattgataactatgaccttgttgtgttgaagactatagcaatatgtgaatatggggtgagtggtgtttgaataagattttcctacatttgtgtctttcatttctacacataaatttgaaatgtctttggttatcggtcttgtcaggttcgtactgttgctgcaaagtatgtgatgaagtgtgatgacgacacttttgttagggtggatgccgtgcttaaggaggcacacaaagttcatggagatagaagtctctatattggaaacgtcaactaccatcacaaaccctttcgtcatggcaaatgggcagtgacatatgaggtatgaattctgcttggttctccattctcttaaccgatagctgctttctttgcttgttctaaatgtgcttgaaaattgattacatttcaattctttgttctacttatcctcttgaaagttagtggcttatatgaaaccctctgctcaggaaagaactttgatgggctcgttatttctgctggaagtagtccgctaattttgtagagattgaatgaccgcatgcttttattgcctgcctattgtctagctctattcatgtctgatgatatatttacattgtgatgcagcgggttggaaataatgagaaaaggggaaaacctgaaacaagagaaactcttttacaagattctatttcaatatatgttaacctgctaatacatttgcttccttaggcttatatagtcctagtaaaactaacaaagataataaataacgaactgtaagataataaactactatgctagactattttttgatataattttagataggtctcctacatctgatgacattgtttgcggactagtcaatttttgtgtttaaaacaagtgaggcatgattagttcatatggtacttttttgtgtgttcaaagacatcattcctgaagaaatcgaaaaccattttctacttcttaatttaatattttcaattatttattttgcaaacttcatctgctgtaaatacgttgaacttgtatgtacatgatctcatcacatatacattattttccctgaaatccaggaatggccagaagaagattatccaccttatgcaaatggtccaggctatatcatatcccttgacattgcagagtttatcatatccgagttcgaaaagcagaagttgagagtaagtccgatcaatcttacctgtaatcttcttctttgttgatttttttttttggtaaggtcaatggtttgacaatttacatgagtgtttttttacgttcagttgttcaagatggaagacgtgagcatgggcatgtgggttgagcaattcaacagttcaaggccagtaaattatctgcatagcttgaaattctgccagtttggttgcattgatgattattacactgcacactaccaatctcctagacagatgatttgcatgtggaccaaattgcagcaaagtggaaaaccccaatgctgtaacatgagatgacaaaagataaaacaataatctaagatagtattacctaacaaacttagacgaaaccacacggtaagattattacatgtatgtagatattcgaaaggattagattctaagtcacagtaggggcagcctgtgccccattccaaattcatttatttatacacctaatatagttttcctgatcccggtggcaggcaattcaacttatatattctttcctataagcatattatacgcatagacatattaaacttgtactgcgattagtggaacagttcacattcacttatggtcaatgaacgatatcaaatgcatctctagtgtcaactttgccgaagaattgtttctcgcactgattgaaaaagtgaagatgtttcccaactctgctttatgataaaagtttggcccccactttctttcttccttttaatgataaatgttatcggaagaaaagtagaagaaaaaaacattaaaaccaaataggaatacgctcatcaccatttctgcgcggccaataattttatattttcaaagtgagcaaattattccacattcttcttgaagtggctctttaacctcattattaggctgatggggtatcattattattattaataaaataacttactaggcttctttttcttccactaaagctaattcttattttatatgttctctgtccatgtacattgtatatcactttgtagtgcaggcgaataaagtgacgacgataaagaaggaacaatcgtaataaaagtgattctcatttgatctagtgcttacaggaagcgaaaaagtaggacccaattccagattcttattttgtcaccattaacatatttttcacttacatgtcatgctttataaattagtttaacagttggcacgcaaatcacctctataaataatatatatagaaatggttttattcataatttgattgtacatgtagtaaatcttaaatttttcttaataataataataataataataataataaattacatttgaaatttcaacataatataaaaatgagctgacaatatgacgatggcgattgagcttaccccaagaatgcaaaatgataattaccctttcttccttattaataattaaccaaacacattcctttcacaacacaatgatagctataagaatcagcccaaaagaaggacgatgaacgtagtttcatgtccacaagacccaaactaataaccacaccaacagtactgcccctgcaagaaaattaatgggccattgcatagtaagaaaaattgaacaacatagcaataataataacaatactattgatcaaaagaaataataataacaataaattaaaatgtaccaataacaaagccacatttcgtacctgtcttccatgggtgtagtagtcttgaaccaaagttatagttctgtccaaaataacaatcagaagtagaattaataccagaagcacagttacatatgaatgagttgtaaggtccagtgtatccacacactccataactcttttcacactcggcacaagttctaggatactcattataaacactaaacttatatttcaaagccatcccatacttccaactatcagggtcagattgtcttccattaaagctgtaaaaggcagagtaagaagagcacttcaacttctccaagtccatgtcgtatgccggcccgagatcgacaggtgtataaacacagcacgtagagataggaaggtttatagtactaatagctctacaagagtataagaagctgcatatgggaactgttccttgattatcacacagtgggactttgtactgatcagagccgttgcctccatcggaatggtaaattggtgatgaagaaagagaacagtcaagtaaagcgaagactgtttcgtcatggaatgagaaaggagcatcggagtcaaggccaaagcctttggagggttgagtgttgatgcatgagcatgtagacatggaagggtctgagatgtaaaggacttggttgacgtagtctatagctgtgacttggtaacaaccggtgtgagttgtgagggtgagttgctcttggccatgatcgtctatggtgttgcagctcacgtattgttggaagcgggggtcaccacagccagggccaccgccaaaggggaacttcagagggagttttccgcaagttcggcggcaggtttgggatgagaccatgaaaggaagaaggagaaggaggaggaggagagaactggttggtgtcgtcgtcattgtttatttttttcttttgggaagagacttaggacatatagtgatattatctgattaaaagaggactctctgaagctgaagctgtgtttgtgtgctatttatgtatcagctgatattcgtgcatgtttctaattttaatacttattgtttttgagtatgtaattgattcattcacttattatttaatattgtttttaaatcatttacaactaatagcatattgcttaaaatatataaattgtaattgatgcttttacagctttacaattgtttatattcatacatatataatataatatatagtatgatcatcgtttcattagtattggacgtgaatttggacattgaagttgtatgcaagtgatgtttttaaatatagagactatactatgatggttcttaggttataaaatataccgcatg

SEQ ID NO: 297115 - DNA, 4513 bp, Cannabis indica
ctttaactagtgtctagtgctatcgaaggtgttccaagtttcataagtccctaaagattacacactactgttttattcatttctcttgtataagttccactttaccagtttagacttaaactcccccatctttggaactcaatggaagattctgtgggccaagctgtgggacagaaaaaggcattaatgaaacaatgattggagtgacagaaattgaagaaaaccaaccaccccaagcgagggaggtagatgcagcattaaatgataaacaggaagacagggggaaggagcctatggagacagataacaaggaggacgatgatatggagaagctccgcaataacttcctggataccatgactctggatttagaaccagactttgaaatcaatgctgagattataagaacaggaattttggcacgtttctttgaaggaaaaggagtttcgagaacaaaactgaaagaaattttagagcagaagtggaaactcaaggggcattggaggttcaaaactctaaagccaggagtatggggaattttttttgataaagaggaggattgcgtttcgattcttgacaacaaaccttggttgatcaacgggaagttgctgattatccaggaatggccagaacttggagactggacaaatgtggacatgagtaaggcaattttttgggttaaagcaacaagacttcctactccatatctcaatgcgatgaataccccaagaattgcagctaagacaggtgaatacaaaggttgtgacatagtaaaccagaaagcattagcgagaaggggtttcctgaaatttcaagtggaactatcaacaaagcatcaagtcactcccgactttttcctggatatttcaaggggtcgaaaggaatggattcaatttcagtactttagactccctaaattctgctacaactgtgggtttattggtcatgataaaaactcttgcctaagagaaactttgtttgcgtatccaccggaaggaaagcagtcccagcttatggcccctggatacgagcaaaatcagccatgattagctgcttcaacaccataaatcaattaaatctgctcagggagaactccagctttcagtcgccgtcgatttgtgctccggggacctcggggaatggttcaaacggtcaagataaaggaaagggaagtgtcaggggcgacgattcaatgttatcaggaagagccaatgaaataagcaagctcaaacggaaagtaatcagagtaaaagaaagtgttccaggagccattattggaaaaaatttaaagttgttgacaacatacaaaaggaaccagcaggcaaggagatagcaggtacatcaggaggtatcaactctatcaagaagatatatcgagaaaggagaacaagatcagtttctcctcgagccctgagtaaatatcacaatggaaatgtaccttccaaggagtctgaaaatgagatcctcaagaaatactcctctcatccaattccaactgaagcggatggaagagtaattactactataatggcccatattgggcccacttatgaggaaatgattgataaaccacataaagagttatgcaagtacagaaacctacataaccatccagagcccactcactttccttggcccatttatgctgaggaaattaagcttgttgaagagttaatgggtccagctccaattgataagtatgagccaacccctactctattccatgacccagtggatgtgtcaaagttggtgcatgactgcccacaacaaaggaagaggaaggctagttggactttaatcccttatgttcaaaggaccgaggagaatacgcgagaattctcgcaggaaattccaatactcccagaattttctcctagaccgattgaaaatcctttcaaaatggcttcaggagcttcgacatcatctctatctagatgagatacaaaaagaagagaaggagccaagtcaagggtcactccaaagagtacgaagcagacaactaaagatggaaaattgaaggggaagataataaggaatttggaggaaacactgaatttagtggaggttcgtgttgaatgtgaaaaacaattatcaatgggcaaggaggcggcccttatcaagcccccccggtccaaatgaggattctttcgtggaattgtcggggcctcgcaagagacctgacaaaccaagccttattggcttgggtaagaaaacacaagccggagtgtgtttttcttatggaaacaaaggtggataaaggagagatgttggatgttgcaagaagtttggggttcaatggtgttgaagtgatatcggctaaaggtttagcaggtgggttttgcttactatggaacaaagacataaatatatcaatcatggaggccagcaacaactgctttgaagctttggtaaatgaccctcaaatgaattttacccggagattattcgcagtatatgggcctccttatgatcatggaaaagtgttttttttggaagagtttagctctgaaaactagctgttgctatgaaccgtggttagttattggggatctcaattgtattctaaacgacgaggagaagatgggtggaaagaaggttacttttaacgataccaagtggttagaggaattcatgcaagcatcaggaggcatagacttgagattcaatgggtgccaatttacttggcaaaacaagaggtttaatagaggattataagggaaagattggaccgtactctaggttcttttgactggatcacagagcttccatatgttgggattctgaacttcccaattacgatttcagatcatgcgcccgtattacttgatactcatatgttcaaaaggagaggattcattccctttaggttctttgaggcttgggcaaaagaaagcacttgtcgtgaggaaatttttaaggtttggaagaagagtgagcaagaggatgcaagaattttactcagaaactttgataacactagaagagcgttacaagtgtggaagaaggaaaaagtgggagatatggatgagatcgtatgctctttggaaaagcatcttcaatggattcaaaagtaggaaatcacggaagaattctgtctggaggaacaaagtattcaattccaacttcaagaagcttggaagaaaaaggaatcgatgtggctgcagaaatcgagggagtattggctgaaacttggggaccggagtacgagattcttccatgcctcggcaacaattagaaggaggactaaccaagtttggcatttacaagataagcagaggagggtgaaggatagagttcgagagttagcaaaaattatgaatggctatttcattgatctcttttcttcctctaaccctgacattccatgtgacttggaagacttgtatgatagtaagttggatgaggaagctaactttcagctttcaaaaattccttcggtggaagaaatacgggatactgttttgagtattcatcctctcaagtctccagggccagatgggcttccaggctattttttcaggaagtactggatatggtgggagacaatgtttgtgcaacagtgcaagaagcctttagatcgggggaaattcatcctagactgaactatacctttatatgtttaattcctaaggtgaataacccaagaagaatggagcagttccagccaatacgtttccgtaatttcccttacaaggttattacaaagattttgtccaatagactaagaagttatatggaggcactgatttcacctttacaatcggcatttataccgggtcgatggataggagagtcttctatcttaactcaagaattagtgcataagataagaaagaagaaaggtgtgggaggtcttatggcaataaaacttgatatgctcaaggcatatgacaagacggagtggccttttattctccgagttttaaaagctaatgggtttgaagacaaaatctgcaatatcgtcatgtcatgcataacaggggtgtcttattcggtactcttgaatggatcccccttaaagaaattcaagcctcaaagagggttaagacaaggggatccattatcccccttcatattccttctttgtcaagaagtgttgtcaagattaattcagagccaagaaagaaagggacggattcatggcatacagatcgcaagaaaaatgattcctatctctcatctaatgtttgcggacgacattattcttttctctcgtgcaaacaaggaggaggctaaatggatgatggattgcatacataggtatgagctatggtcaggtcaagagtgcagcaaatcaaaatctagtattttattctcaaataacatgacaacagagaggagaaaagttctcttggacttgcttaccatcaaacaaacccaaggagatgaaaaacatttaggtaaccctttcctcttcaagagaaggaaaagggaaacctatttaagactaagggagaatatgataaaaaacttgatgggtggaagatgcaacttctatcatatgccggaagat

SEQ ID NO: 297116 - DNA, 3457 bp, Cannabis indica
aggatggagagtaaataaatattaaaattaccattttatcaattttaatacaattatatattattttttaaagggtagaaaagatattttgtataatttttttgtctttttcttgaatttcctatattaagagggattaaaaatagtgtgtttgtagggagaccctctccttccatctctcctctcctttcttctttccctcttgccaaacaaaaagattctccaatccctctatccctctccctccctccttctctcccctctaccaaacataatgttaatgttggaggaaggattcaaaaatttaagacctcctattagtagaaactcctattagtaggaagtagtataaaattaccacctcatattaacaagcttataaaaggtgaaaaaaccatgtaaatttagtacgctaattttttttagtatatatataatatatattctttattcataaacaaaattggtaggttttcttaactcgtatgcttctctctcattcgaattattgtaattcagccttcatacaagtaggatatgtattatagttatattgttctatttacatatacacatctctctcgagttgaattaaattttaattttagagcatatatagacgaaaaaagaaattcaggagagaatagttttacttgagaatggtggagatggtgagcttctatgaccaaaggattttgatcactttgactttagaattcttaacacaataatatttgtatacatgcatgtgtacacatttgttttcttttcactagtgatcaaaaaagtttataaccattaagtttttcataacaaagtttttgtgtagttgagatttactttgatatttttatctagcattattctgttttgcatattttgatttgcaaccctaatgatgagcactattattttagagtaaacatatatttggtattgatataacatatatttgttatacaatatcaatacattattatgactaaattacttcaacagtgttataataatttcataacagaacgacaccattaaaaaattggaatacttccaagaatggggtgatgatgatggatctaggtttccaaatcccacccacaccaatggatgattcggtggctttgcccggacaagacaccacagcagtgagttgtgttcaaattttaaccagtggatagaaagtgtttctctattagacaactacttgataacataaacaattattctttcatattttaatagccacttcaacaatgatcccttgtttagcatattttgaatatgaaccactcaattattgactgtcacccaccaaagatatcattttcgtaatcattatttcttctataggaagagcacttggggacaaaatctttcaacaagtaatctttaacacaattaacaagaactagcaaaccaatccctctttgaaatcacagccgaaattcactccctctaatcccctttatagtacaccaatgaattatttgtccaaaagaaaaagttaatagagagagaagcaagctcacaaaacttatactaccctttaaaataatttttgaaaaacccccaattggagctgcaatgcgataataatgtcatgactaaaatgggtaacataatactgagagcacgataggcttccatctcaaaatgaggggaacaatggactaacttgttttctcataactaaaacaatattttcgtactcttcttatgtggtacactctaacaaaccccgggttctttggcactccttgctaacttagagaaacacaaatttccacagtaacttatgatcatatcatctatactaagaactaagaagtaagctgacctcatgagtacgattgtaaattaattaccaataattccaagatgtacaaactccttcctagacgtggtgaaagcaatttactaattgttcgacaatcaccacaaagtttaaggttctttgttattcggataggtgttccagcagtgctgcagttaggccaaatgcaatacctaactattcattattatgtgaatgcagcatatcccgccttaactaattcttcggcaacatcttgcaaaatgaaatttgtaccaagaacacagcctgccaatttcagcatctcattcaagtttttgagcatttcataactctccttggaaaaggatgagtctcatctccacagttgagttttgtgaatattgttatccacctcaatctatggccaaccaagaactttctttagcctaatctgactcttgagattcgtaaattatatctttcgaatgtcctgcattgtggggctatagactaagaagtgaatttgttgccttttctgccaggtcttatgtccatggattctaaatgcccaaggaaagcaacccatatgtgtcttcatgtttctcaacttccatgctctcagcaacagtaatggcctcatcaagtctccccgcacagcctgaaagaggactcgtaagcttttccacataaatcgtaacaacacataatagggtctcaaacgagcaccacaaatcaattcaactccaacacatgtttgaaaacaatgttatgaataaatctatcattcgaagcattcatcatagccttggaaacccttatcgaaaacttgtgaaagaatctgtctggcctgggaaactcttctactgcaaatcagcaaatagattgcaaatttggggtggggtccatataacaaggaaaatgatgttttagtctttctcaaaactaggtgttttgtaagttgagttgaggagttgtagtttccgccatgttaggagctgtagaaaccaagcagtagcaaagaagcttctcatgacagcagtaaccttaagctgagacctttcaaaacaagattgattctgtttagttccaccatcccagcccacggaaagaaaccaaccaaaaagtaatggtgtatgtcaaaccgctcctacgctacaaaccccaccgaaatatcctccacggggtgccattttaaatttcataaatgtggttcaaacttgcaccacagcaccacctgattgttcattatttatcacaaaattttagcaacccctaaaaaaaagtagaagccactgaggctctacagtttaaaaactgttttttgttttttaaaattgaaaacagttttcaaaaactaataagagacgtttagcaaaactttttaaaaataaaaaactagaaaacagaaaacatcaaaatgctgtttttaattttcaaaaataattttttttgtctaacatattatactttatattttgctcacatactcggatcttagacccgaaccgaaaccatacccaaacttggacccatataggctaatgtcatggtaaccagttaaaatattgatttttttccttgtgccaaacactattaaatttttaaaatgacaaaaaataattttctattctcacttttaaaaacacaattttaaaaactgaa

SEQ ID NO: 297117 - DNA, 1125 bp, Cannabis indica
aaaaaaaaaaaaaaacaagattgttacattcctaaagagcatggaaagtagtctccaattcttaagagaaaatcggacacaaataatcattgagaagaccatacttttgaagattgatcatagtagggatccaatttgaggacaactttcaagaaaaacttttgaccttaggaggtagattaagactacataaatttttttcacaaagtagaattattagaagagaatgatgcaatatttttagtgacatattgaatagctagccattaatcacttctaatcgaataaaagtcaaatttctcatgccccaaacaaatttgtcagacacgttgcttgaaggccaagatataaaaagtatagcaaaaacttcctcagaagagaacaaacgtcaaacaagagcatggtcccaaccatcatgcacgttccctaaggagtaaatcatgacatcaatgccaaggatactcgacggagaggcaatgagcttcagattcaaaggaagctagcaatctttgtaaacataaatagatttaccattacctaccctccaaatagcaccatgatcataaaactcttttctgcacaagatatttttcgaaacataagaatctctcttctaggaagaaatcttttcaaaatccttattgttacagtaaaaacctataatgtacgtcatggccaatcaaggaaatgggaaagtggtagagacgacccatttatttgacaagtaaagcttgattgaagtaaacttaagtttatgaaagaaaatatttatgtttggattgtgactgccattcgaaaatatatttagactattgttgccaaaaataataatttatgggtaagatgggttcacaatgtatagataaaagaagatgattggtggacctatgttgcacctactcaaagtagttagtattggaggaagatagtagagattaagaaagcctttaaggacttgatctctttttaggctttccttaatgaggaatatcatattaaaaaaattacttgttgttatgtgaggaaaccaagaaggccaattggagtaagatcggtgtggactagactaaacatgcctaagcatagttttagggctcgttttggaacgtcgtattaggtcgtatt

SEQ ID NO: 297118 - DNA, 10689 bp, Cannabis indica
tttcaaaatatttactattgtttatagctaaattcaacttggaaaagattaaatcaatctttttaacacttaaatctcacagttttgacctctgaaaaatgagataaaaaatatttcttttgctattttaatctcttaattaatacttttcttttttccacatattgggttatgttttgtttagacactagtgcagtcattttttgctggcttggttggaacaggtgttttattctcttgttggaaggcttttgcttgtccttctcatttttttatttgggattttagaatggtaattgtatcttttctttgtcatcatacttttgcaggtgagttttcttaccttcaaaggctgaaaaatccaccatcatcaaccgttgtgaggacctttcatcagtattttcagcagttggtaatgttattataggtttatataagtttctaaaagagactagatatgcaccaatacattgcaaacctttcctttcatttgcaaatttctttgttagccaattttaattcatgcatatgtgcatggagtatgtaaaatcttgacagcttacatgttctctttggcaaaagaagttttacataattgatgtttctatattttcccaggtttctttgttgatattaacttaaggcaaataaggagagagatgctaaactttctaaaaagagtgttatggtagaaaatgttaaaaaggcacaggtggtgcttaaggtaattccctccaatatgtaatatcgttattgatgcaattaagtattatttaatgtaataatttttattaaaagatcgctaactgattgcaagacgttatctcaatgatactagacactacaagtgtctgattataattatcttttattcttttatgccctttaacgtttctcaaagctcaaattttccaaaagagtatttattgaatcagcatgcatacttgagagtgataaatagtagtatatagctagagtaaatatttatgtttgtgagatgtgatacctaaataaaaataatattatacaataacaaaaaacaatatataaataataaaaaaataataacaaattaataagagttaagactttttttttaataaaattataaaatttgtaaaacaaaatatttaaaattgtgtacaaacaaagatccatcatccagaaatttacatgcttataacagtcattatatctattattcactttgttaaagaaaaaaatacaatgttgctacgtgtaatgttatctgtaagagacattaaaatgttgctacgtgttatattgttatttgtacactttaatattaaataccttataacagtactcactgtttataagtacacagatatatctgtaccatgttatgtaacttataatgttgtcaagctattattattattatttattttatttatttatttattttttttgaaattggtgaagctattgatgtagatttatcttattatcttctactgttaccatgtgagatgaaagggataaatagtaccaaaatagctacataaataagactaacccaactacataatgcatacaaacatcagggattgaaatggaaaccccttttagtgatttctgagttaattaataataaaaaaaaaagctattagctatatatcctaaacttaaaacagtgaatctcctagtgatttacaacactgataagcactttgacatagtgttagatttatagtagtagtagccttttaacagccagctgccttgagaaaattgtcaaagggactagcaggaggaagcctcatcgacaaccatggatcctggggaaatgcagctccctggccaggaccactactttcaccttcacactcacttgttatctgtttcaaatggcatcataacttttatattaatcattttcattaagaaatgctaacagttcaaacatttaaaaacaaaatgagattaaagctagtttcgatttgtggtttagaaaatcgacatgagaaaggttcatgtattagttatgccccataaactaacctggtggagagttctgcggctattattgaagggaaaagctggaaaagatttctcagctgctttgccatgataattttcgtgggccaaccaattggagagcttctttcttgtgcctgtgccaagggcttcacactggctggccatggcgttgtacgggagaggtgatgtagagacggatgatcctgctacgtgacctgctacctcaagtgcctataaaggagaaaaaaatctaagttgtaatacaagagtaggcatgtctaaaatacaagcatttagtaactttgttttcttctggctaaaatataagaagtttactaaagcggctggacctttcatataggttcaatcattctgtttatacaaatgcatgtggtaatagcattgaacaaaaagagctaaattgccaaaggaagaagtaattacagattctaaaagctgtccaatgctgataatatgtgagccagatgaagttgatggcactctgggaatgaaacgagagagatctgcaacggataattcgctagtcgcatcatcctcaactaaagagtttgtcgggaaatcctgcagatttgagcaacaatatttgacaattgttttagttttcattgcattatcttgcaaacaatcacacaagggacttagttcgcatgaaattttagaagttaaatgccagcaagaaaaataataaagatagagataattataccccatcaaaggataaggattctttggagtgggaagccatctgatcatggtcaaggtccagtgcagattgtggaccaaatgagaatgtatcatcaggtgtgaatggttcttgaagttgctttagcacatcttccgcctccagcttaagaagcagaaacaagcaaatgaggattgaaattgaataactcagattgatgtggtattaatacaatgaattaaaactaataactcagattgctagtgttagtacaatgccataccttggtaatgtttgtcagattttgaactaagatgtcaattacgatattctcagtgtcatatattttatttcgcaactcggaaagaattgatgtagccagctgattatcagaagcagatccgaattctcttacatcagcatcaggctttacatatacttgaagatcatcgctaataccaagataggggtcaatctgaatatgcaaacataataaatacagaaaattagaagaaatttatactcgtcgacactagaagagcatgagtcagagtactttagggtaaaaaagccttttaccatcaaaatcaagaaacgtaatcacactattggcagactacaaaattatgatgtcacttacatcgtatggaatcaatgacttgagaaaatcattcagttcaggaatgtgatatatcttagctgcaaacatcaacatgctcattgatagtaccaaaacagatctctggcccgctggtgtcaacatccctggttcaccccacgaacaaatgagaaagagaacaatatcattagaaattctaatttcctcacaactgaaagagaaaggatttaaaccagccgcaccgttgttaggatcaagagacattttcctaagagacaaaagaagctggaagaagttgaccacaaggttgtctgttggattctgcaatattacaatttctaaaactttgtaagagatgaaagcttcgtttaaatttccactaaaaacaataaagtgtaagacagaatgtcaactttagtgataattaatacattcgctgtcaaaaattatatgaagtgagagcatgatctctcattaacatagcacaaggaaacgaaaataagaaagcacataacatgcatctaacatatcaccttcaagcgtgaggaaataagtgttaaaatgaaagaatgagcaatggattcaatattcgagggaagattgtctgatagataagcttgtatccaaaaagcagagagtaaatgtacaatttgatcctcactgagcctcatgacaaatggttcctgaggcaatcaacaaaccataagatagaaaagtaagcaaaactacacaatatcaaatacatccagatataattcttatgaaaatgagagaattacttactgcctcatttaagtcaattgaaccaggtttcctatcgatgatagagctaatcttgtaaaaactaggggaattcttgcggcctcgcccctgcttgaagtcttcctccacaatgtctttttctttattatcatcatgaaaagtgttcccgttcttttcggttttagaaccatccttttccctccggagcttctcaagtctggcagtaattgatgcaaaggcagatgcagtattcgagtgccatcttcttgattggtaaagaaaaccagatcgtagagatgcaacttcatgtcgcgggcgattagaacttggaacaagaagaatagaaaatatttgatgtgctccaacacgcacctcaagatctggatgtaacatgacctttaaaagttggacaagaagagattctggaaacacctacaggaaaaaattctgaatatttaacatgatgcactcaataatattgagtaggagattgatagaatttgatgcaatctataatgcacacttagtaactaatgaccccgcatattacctgctttgagcgtgatgagaccagtgccaatgatattgtatgagcaagaataattaatgatccaatagtcgccctagcaactgttcccgatggtagcttctccaaagttattgccatgaggtcaaatagtggttgagcattgccaatctagtaaaaacgaaacacattaaacatgtagctatatgcatatatatctaataaaatcaataaaaccactaaaattacccttttagcaatttcaagtaagcaatcctctatggaattctggagcataatattgacgttggagttggactcttgctctcccgcaagctgaatagtggcttgaagactctttcttagatgccagcacagatcagagacaaacccaatttctgccagcattgttccagatctgatttgcctagctaaaccagtagcaacttggattatataagatttgagttcaggatcatgtgagacatttttgtggtcgagatggcggatgacataagttaaagtcaactgctgattccctggaacagaagttgcaattagaagctgattgaagtttaggtcattagttcatgcatatttaggctaatcagatgaaaaggaaaagaaaataccagaggcctccataaagtaggacatatctgacaaaaccaacaaagccagcccttgagaaacccagtgccgtccggagtcaaagtagacaaacattgggtccaatattcgacgcatggttgtgctttccttcgataattctgccattctctgaatacaaatttgagcccatacttttggtgtctctgattcttccctgaaaaaaaaagagcatttctcaagttatttcaaagaacgaaattttcagtaaaagaaaattataatatcactatatgaacaacttttaggaaaatctgcagagaaaattataatatcactatatgaacaacttttaggaaaatctgcagagaaaaagctgattaccttgacaaaagagaaggatccttcttctctggccgtggtctaatcatggagcaaggactagcatcactaccaaggatcgcaccaattctgccttcacttcgaactacttcgtccacccaattatgttgtgattccaacctctcattgtcttcttcatcaagtatatctagctcatagttatccaaagtcacatgtacaatctgcaaatacaagaaatatcaggtaaaattaattttaaaaacataattgcaaaagaatgatataaggtggagttctataaaaagatgcaaaacttttccatggaaagagattgacacacatgtatatgtacatcattaattttttgttcaaataatttttcttacaaattgagtacacccctaattcaatgctacattgcaaacattgatcaatcagacaatcagttttgaacaaattgcataacttagaattcagatgtagcacaacatttcatgcaagctaccagaaaatacagagaagtgatacgtaaaagctttattatagataacataaaatatctgacctcatcaaaatcagcaaaaatatgagaaaattccgccatgaaccagacctgccaacaggataaacatgttaaatagccgacaaaatgaactctattccccaactaccaccataacatgagcagtgaaatgagaaacactaatcaaattgcaaagctaccatggcagagaggcactgcaagcttgatgccctcaagcagcgcttttggtgatcttccccttttacacgagccagcacacatactttctgtacaaacccctcaatgttgtgcgtgtacattgcatctgtctgttcacaaccaggccatccatcaaacataaatcacaataaaaaaaattaatgatgtactgccactatttactagaatattcaaaccagtatttacaaacaatgcagtcacataatctttcagcaccaacagaatattttataaaagacagcatttcccttaagcaatggtgaacggtaatagaatgcatccttgtcattaactctacagcaaaatattctctgaactttctaccaactctggaaatcacatttaaaagcagaaccactaatctgcatcaattgatcttctacaagacaataaaaagcacattgaaaataaaatagaaaaaggaatatccacaaaaatatgtttactaagaatatatgtggtcttatcatttttacattttcaaacttcttgacaccttaaagctacgagttcacaataaatctctaatttttattttgcgggtgcttgtactaataacactaaccagacagctgccttcttggcaagcatgtgtccattgtaatttacctgggcatatatgaaccttgtaagtgtttggcatccaagcatttgcacagcatcttgcttagagttgtctaaaagttcagtaaccacattcaataagctaacagcaaagtaggccctgcaaagtgcaaaagatattcaacaaaaccatacaataataacgggtccaatataaaagaatttgaacttgtattcttaatactgtacctagagatcttgccaagatattgggcaaatatgacatagcatcttaaatgtattatgtaagagaaacatttttattgatagataactaagaacttcatcgataaaacaaaaatcaaatgaaaagggagaggaaacaaaaagcacttacatctgctccttgcacagaaaaagcaacttgctgtaagtctctgccacaacattgaggaactttatgtgcccatttcgtagctccttctcacacctttcttctagatatttagcaatctatagcaaataatggagacatgtattcacaaaaacaaaaactcagagaactataataatcccagtgctacatccacatgtattcacaaaaacaaacagagaagtgaagtgaagtcctacctttggaattcgaacagaattttttgaagcatactcgcatagcttaacaattttcctctcattcggatggccatcctgcaattattttaaaatataatcttacttctctattaactctttgatgaagagataattgactgtatgttaataatcaattgaccaaacagaaatccccctacctctgttcacaaccagtaatcataacaaacttatcttaaatacatgacacaacttctaaagtgggatctcagaaaaattgaaagtgatttatataagcaccttttatttcatgcaaagggggtagcacttaacgtgatttttgacttttcagagggaaaccatgcagtaagatcttgaaaaaaatgtgatttagttaaggataaatgcttgaaaaaaaacttaaagatcaaaaacaggatctaaaagcaacacaacatgaacaacaaaaattttttttgtaaattttcaacctcattaacaacgtaagctctagaaactcgactaagtatcaacagattaagaacggtcattacacattgggagtgattacatcatcaagcagacagtcagctatgaaataacctagccacgaacatgaatttaataaaagtagctaaaataaaaaatataaaaacgataaatttactcacaagagatttaggaaaaatttcagcaagcaattttttgtagcgcttgacgggttttcgagagcttgacctcaaagcagggcagcatacgcacatgctcccacatgctgggaatatctttctggagatgacacccatttttcactaacgaaatcaaaacacgaggaacaagaattagggaaataaataaacccaaataccaaacaagaaaataatgttatgtaaagcagtaaatcacagaaagcatagaaaacagattagaaaaaaccaaaaagttcaaaatttgagaacacttaagaatgttagaagaagaagaacaggaagaaattcccacaaccgacaatgaaaggtgtaagagaaaatgtagataatagaaaaattcaacaaaaagaggtaaaacaggcgaaatgtacacaaaaaaagaaagaaattatttgaaaaaaattgaaagaaaagaaaagccagaatgaagaagagagcaagaaaagataggggtaccttaaggttggatttgggtaggtgaagagagagatctggtgagtgaaactgaaaggaaaggaaagcaaagcagtgagaaaagcttaaagagtaggagaagaagaagaagaatgaagaagaagaggaaggaaacgacaacatgagagaaataattgagagaaataattgagagaaatatttgagagaaataataagtattctcttacgtgttaatatataataagtattctcttacgtgttaatattggtattggtgtaatttagtattgggtctcatataatttaatataataacttttagaaagtatcgttagccaatcgtaagaagacacgtcttgaaggtactaaacagagagggaagcagaagcagaagactaccaagtataactatgagaatgagagtttcgactctgtatttgtcatatattccatacattacatatcatgtcttggtggtaaaatggtagacaatgattttgtaatctagtattcttgtgcattaagataataatttcagttgttgtagttggactctatatggattgggttagatttgaatcgtctatgatttgatctgatctagatcatgtaacaatatgttctgtcctcttctgctatatcatatactcggatcggattagattcgacccaacttattcagattggatttaattcaacccggctatttttaaaaaaaaaataattttatatctaaatttataattttatatctattttaattttgtattagtattatttaatataatgttatatttggtatcgacttgtattgatagattgtgtaaaattataatatatttttaataaactcgaccctaacaccaactacaggttaggtccggtccgggtttgggtcctgaaatccaagtccaggtctgggttcgggttcgagtccttagttcggatctgggtcccgacttcgaatccgggtcgaggtctaggtgtttgggtctggtcttgggttcgggttcgagtcgaggtctgggtgtccaggtttggtcccaggttcgaggtccaatctcgggttcgggttaaggtctggtcccagattcgggtcagaatttaggtcgaagtttaggtcccgagcctaagccccagattctaaggaatccgagtccggagtttgagtcttgaattaagtttttttttaatatattgaaaccgagtcagattagatccgattcggaaaaattattaggcagggtggagcagatctaatccgaaattcaataagtatccgaatattttcagattaaagctctgattcactccaactaaatggatttttttaacatgactaactctattatgaatgtgtcacatgagcctcaactgaatgcttgatgtatgagtgcccctgcaatgcgagttgctcttcttagttcattttttttttcaatttatttttatagaaaaaaatactcaaattcaaatgtataatctccaaaatattatattggtactgttataagtatctaaatttatataatttaatataataatttttcaatataccactcaccattttttaagtgttcaataacaatacttaaaaacaaattatcattgcaacaatactaatcttaaatgatacaatgacataaaatcacatatcattatggataaaatttaatattaaatctcacaaacattaataaagtgatattttacaattaatatcgacattcaaaaatatatatatatacatatttaattacaccaactcaacaaaaaattataatagtgtgaaacaattatattttccaaaatatttagactcacctcatctccctagtttaattttctgaataaaatcaaatcaaaataaaatttcatcactattcctactttgtacttctttttataattattattttccaaatgttttcaacctccaaaactttgaatttcatttttttttagagcaatttgcggcgaaacccccttatgttttgatttttatacacttaaccccct

SEQ ID NO: 297119 - DNA, 831 bp, Cannabis indica
attaattaaaaaatattgacaactaaattaccaaaaaaacctaacaaatttcacatttcaaagaaatcatacatgattttttttatatcatgacattactattaaaccattttgataatataatatagattcaactttttctttttgaaagggattggtaatataatcttataataagtgaaattgtcataataataaaattttatgtataattacaggaagcttataggagcaaggtacttcaacaaaggctactcaatgtttctccagcttgtgaaccgtaaaataacccctaaactcaacaaaaccatgtacacaccccgagaccatgccggtcatggcacccacactttatccactgcgggaggcggctttgttcccggggcaaatgtgttcaacaacgggaatggcactgccaagggtggctctcccaaggcacgcgtggctgcatacaaggtatgctgggaaggagaaatgtgctttgactctgacattttggccggttttgaggctgcaattgctgatggagttgatgtgctctcggtctctctaggcggttctgttaccgagttttttgaagatgctatttcaattggctcttttcatgccattaagaatggtattgttgttgttgcttctgctggcaatgctggaccgactgaagggtcggttggtaatggggcgccatggattataaccgttggagctagcacaattgaccgagaattcaatgcttttgtttctcttggaaatggaaagcacctcaaggtgagtgaagagagcctcacattcactaatttttttaaaaaaaattgtaattgacaattaaat

SEQ ID NO: 297120 - DNA, 3187 bp, Cannabis indica
ctctctctctctctctatacatatatatttaaattttccttcatagtctagttagccattcgttctattgggagttcaaattcttttacttctgctacttacagttagtgtacttgacataatgcttcttcactgtcctttttatctttagtgtgcaatggtcgcaggccacacctagtgggatgtatcagtattttatcaaggtaagtcctttggattcattctttgaaaacacacgcacaaattgatacctaatactagacgatataagggaaatctattagctctcagatcaagggttgctgtttatgttttaggtggtacctactgtttacacagacgtgactggacatgctattcagtctaatcaggtggttatctctttatgtatgcatatatttactatctggtttatttcatttatgaaacatggagcatgactttagccaattgcatattgcagttttctgtaactgagcattttaggacttcagaatttgggaatcttcagtttcttcctggtgtatttttcttttatgacctttctccaatcaaggtttgtctacttatgttttaagatgattaatttaaaatcatatgatggtttttggcccatttctattttctgatgaatttcctcattgtttgggatgtggatatttctttatggtctatcttacctgatttgcatgttttaggtaacttttgctgaggagcatatatcattcttacacttcctcactaatgtgtgtgctatagttggaggtaattcctaaactccccctactcaccctcttaaataggaacagctctcttagttgccaatttaatcaattattttcactggacagtttagattatacacacacatctacaaagtatagattggcgaacttcatttcaacttattttaagcttaactattttgcggaaaaatataacttttcaataccttgatatccctatgggaacccctgtagtttctgcagtttattaactttgttgcattcttgggaaagctaattttataaattgattgtggctttttgctgtattttctgtggtatctaaatttggtggcactaatgcacatgctcttaaattttcttcttatttaactcaaacaacgggcaatgcttggttggctgttgtgttcaggtgttttcaccgtttcgggaatcctagattcctttatttaccatggccagaaggcaatcaagaagaagatggaaatcggtaaatttagttgattgcttaagggggaacacattgctgccgagtttgttggttctgccttttggtggcttttaggataccacaacaatgaaggcacaaatgacatggaccatccttaccgtagaatggtatctttcgatcatgaattaaaattgtcatgatgtttgcctgttctgtgaattgggttaacattcttgaaacaaattcaaacgtgcctaaactgtttagtttgagtgactactaatgtgaacacatatgtgctagttagagaagggcttttttctttttgttgctgatgaatttctatagttaatacttggatatcatggaaaattacatatcttaatgaaattgttcattcacccctctttgttaccattgttctcttttgtcatcttattgaatgaacatgcctttttaaatatgttgactaccgttgcgaactcaggaatcccatcccaagttcaagagattttggtgtggatttcatagggttaatttgtgtttattaaaatttctcatggtttcttacttgaaacatcatggggttaattttgatacgtcatgtaaaatgcttgttgatcttttaagtaaaatattcctttaaggcactaattttgaatttcgattttcgaatagttctgtgcaagattttttggtgttgtatgtgtttgtagaattttgcacaaaacgatgctcttacgatgctgccatgaaaccttgtttgtttttttttttgtcgcagtggttctcatgggaacttgttttttgaggtaaaaacgatgtttggcgatgttagaacgatagtcttctgaaattttttatttttattcttaaacattaaaacaatgaaattgcatttcttttgtgatgcttcagactacagtgacggtcacacggaaacttaattttacatcatttcttgcctcaatagataactctttttggtgccaccgttggaggtcataagtttttatgggtccattaatgaagcaccattctgttcaaaactcaattggaacaaaaaatcacgtaaaaaaaacttgtataaaatggttcagaattttttttaaattagtatcttcattaaatacttcactttaagtttcggattaaatttctcatcatttaaacattttttttttatgtaaatatcatgggagcctcagtggtgatggaaggtgagagaccggcagtgcggttaaattagattggatttgtgtagacattgtttgtagactagagaaacagtggatgttttaagagagtttgaatggaagcaacaactttgtggaaaaatggcaaggttaatgtattcttggcccataagttttaaggttaatgttaaatttcaaatttgcaaaataagcatattcaatttatattatgtgatcataatgatcgcaggatgatcctaaaaagatcacgtcgtgcaatgtaattttaagattgcgcatgtgacttgcgtgattattttgctaataaaaaacttacaagttattttgctaatacatttttaggggtttctatagtgctaccctccaaaaggaaaggggcgcattaatacacctcagtcgtattttttacatcttgaaagttttattccttatttttttaagacatttaaggcatcttgcaaagttttaagaaatttaaaataatttataatgcaaaaagtagagttcaaacagtctatttcacacgtatataaaataaaaaaaaagtatgtgtaatagacttctttgcaggatatcttagtaactacaatgcatattattatataaataattaagattaaaaatatctagaaattgaaaatatgaaaggggtacatcaatgcaccacaaaatttctcgagatttttacacctcatgtcaaaattgacaccttttttacatttttatctttacacggttttttaaacttttttaacttttacatttttcaattt

SEQ ID NO: 297121 - DNA, 1723 bp, Cannabis indica
atcacccacaccaaactccaattccttgatcagcttggaataaaaatttcgataaatggcgtgacaagataataagttgagttgagagtaaataccaccaaatgacgacgatgaagcaccaaacgcaggtgtagaagaagctccaaaagctggtgtggaacttccaaaagctggtgaaggtgaagcaccaaaggcagtggtggaagaaaagggtgacgattgcgtagcagcaccaaaaacacccgttgaagtgcctccaaaaacagaactccctgtttgggagccaaagggagttgtgctaccaaaaggtttgggagcaaaaggattgttagcggcattgttgttctgcccaaaaactgatggagaaccaaatgggctactagatgactgcccaaaagctggtatacaatttcaactcattagaatatttcaaactctacaacatagcaataacaggcacatttggccacaaagaaaggacagcaaccatctctgtaattcacatacatgtttgaaaagaaaagagaataaaaaacaataaatataaaaatcatagcatagcatatcaagaaaagaagaaaaaacaacaaaaccaaataaccccacggtccacagactccacaccccaaatgtaataaaaaaaaaaacttcaccacttaatttcaatcaatacagcttaataatttatttaagctataagtccaaataacttttattaacaaataaatacaagtatacttacggttagtagaaccaaacatggttgctgtaatcgatgagacggctgatactttaagaagagagcgctaactcaaagctgaatatataaataaatatataaacctatcaaggaaagatcaaaacaaaagaaaagcgttagaaaattgaacttggggatctcaatatggaagtcaacaatcaaacacaaagatagatagcggaaaaggcaatgccatagataacagaatttcttgtcactaaataaaatattttaaaaattctgttagttttaacagaaatgtgtcaattactaacaacaatgctcaagagatgcaaatgaataaacgatacttattcataaacaggttattagatggtagctattcaatgacatattgtccatttcagttcaaaacttctctaaacaggttattcattggtaactaactattcaatgaagcattgcctattttgctctcctattttgtcactatgagtagataaaacaattacaattcaaattgcctagaaacaccataaattagattttatttgaagagaagtttctcaatgtcaccaaacacttcatcaacaccaaagatatagaattatctcaaaactcaaaactcaaaactcaaaacttaaacacagtactaaaataaaaatatatgtaggaacaaataccatacaaatgggattaattcgcatgaaagaaacataaatttttttattgacccaaaaaatcagagaatcgtgaaagtttcttacgtttcaaatctttccatccaacaaaatctcgtatgattcaatactaacaggtatcgtattataacgtttcaaatggcaataatatacacaatttctaaatctcggaactaaacattataaactaattacgacaagcctaactgtaattagagaatcggataatagctaaatcaaatccctatagaatgtcaatgtagaactctatacaatatagagagaatcacttgataaaact

SEQ ID NO: 297122 - DNA, 2501 bp, Cannabis indica
aatatataattaaatattattgtaatatgtataaagttgtaattatgtataagtagtcttattataagagtatacataatggtcaaaaaaacttacttactggtagggaacttatgttaattaagttttactatagtcttgctctatatgtataaatatgtatatatttagagttttttgtggtaaaatctttttaactgtcgttttacttgtatataaccttctaagcataaattttgacggtaaaatcttctaaactactgaattaggagaaaatttaaagtgtcattcggctaactgtcactatgggctgcttatgtgtacacttaaaaaaaataaaatattataaattttgaaatagtttttatattttaaaataataatattatgtgtaccaatataaatttgatacatgtacaaaagtgtacacataagcagactatattggtaatgaattgtaaaaaatggatgacaccttaaatttgcaagtagttcagtaattttgagagctttaccgtcaaaatttaatcttagaagattaagtgtaagtggagtgatgataattgaaagaattttttcgaaaaaaactcatatatttatatttatattttctttcccactagtgatcactttttttttttcttcaagtgatcccatggatagtgaaaattgttagctagtgatcaaacttattttataataatcaaatttgatttatgatcataatatatcaaaaatttatataattaagtaacaaaagcaaacaaataaattaagtttccctatataactaagtaacatattaacaaaaaagttagtatgtatagtactatgttatatcaaaaaaatattattccttctcaagtttttttgtaatgaccaaatctatttaattttcttgtaattgaattcaccattcttataaaaattcttataattatttattaatcatattcagtttacaatactattatttttgtagtgataagagagtaactaattcctagtagactagttgtgttttttcttcttttcaagtgatctccattaatagaacttttattataagatttaaatgattaataataaaattattcaacaaaaaaatatataaattttgatgaaaatacatagacacaaatctattattattattattattattattattattattattattatattgtgttagtacaaggaatatgctcacttggtatcttatatttgtttagaaaacaaatatattattttcaataatatttatttgtttttaaaattatatatatttaataatttaaagtcaattttgatttgactaaactaatgtcattataactaaaaataattcaatatgaattgaaaactcatctaattgaaaatagcctgattacattgataaaatttgactgatcaaatcaaagtttacaatgcccaatatgtatgattgtaaaatattaaatactaaataaatattattaaaaatatatagagtaccaaacttatattaaaataaaacacataagtaccaaatttatatctaaatatatttaaataaatttatattgaaagtgactctacttttgttatttcttgggtaactaagtagtgtgtctaatttcacaaaaaaagaaaaaaaaaagtagtgtgtcaatttgtgttatgctcatattattgatgatattgttagtttattagttgttatttgtggtccttgttatgttatttcactaaatggtgtattccaaggctaattttatgctaattaaattttttaaagggctaacaatttatcgttggtgactctcataaaaaaaaaatatctattagtactatttactattattttttcaaacctttcatattttcttttctattatttttttgacgttgtattggaatcgataataatttaataaaatagttagagttttctttgtgtgagttttataagatatataactatatgataaaatgtttaaaaatattatttataaattagacttttcttttttgttaggagctcaatttttaaaattagaatacgacctttaaatatttaggacgaccctagtgtaacccatgcacaacctcattttgttactagttttagtgaagattgtatttagactgatacttgttctcaattctatgttctcccgtaacaattaatttttattgaataaaatctttccttcaaaataaataaataaataccaacattacaaaaatatattttttttttagtatcttcaataaagtttgtgataaaaaaaaccatgaagtgaaatatctgtgtttaaattatataaattatacaaatatgcactttttaatttcaaacaattttacaattatgtataataaaatatggctaaattatcttatagttaatagttgcaatcggctaaatattattccttaatcctaatcaatttttagttaggacatatcaaatgataactctctctctttttgttttttagggtgtgtttggaagt

SEQ ID NO: 297123 - DNA, 1517 bp, Cannabis indica
acaaacactaatgtaaaattagttaaaaatattaataagttaataaatctaactacaagttaatctataaaaattacatcatgaagaaaaattcttcgacctttcaacctcaatcgtcaccgtgaatcaccgccatcaattgttcaatacaatactatatttaatattgacttgtactaaatacattataaatttttacacaaaaggactcagacgcgaacccaaacctcggacccaaaatatgccctaaacccggatccaaaccccagacccaaaccgggacctaaaccccaaacttgaacctgaatcctgaactttggacctgaacttagactcggacccagatccagcctcaaaccccaaacccagacccggaccccggaccctagaccccgactcagaccagggtctaggtctgggtctggggttcaggtcccagtccggggtctgggatttgggttcagggtttggggtccaggtcttggtcctggtctcggttcaggggctggggtacgggtctgggtccagggtttatagggttgcatccagctccgagatctgggtctggggttcggggtctagtccaggatccaaagtttgaggttgggcccaggtccaggtccgggtccgggtccggggtccaggtcccggtcggggtccatgttttggtctggagtttgggtccaggttcgggttcaagtctgggatcggtgctaggtcagggatccgggatccaaggtgcgggcctggcattgaccccagactctttgtaaatattataattaatacaatctaatgcaggtcatttattatgtattaaataatatgacttattatattgtataaaaatttatggtcgtaatatgtggagagattcgacactattttttctctatgtatataagtgttcgtggtgagctgtgttagattagaaatttaattataaataaaaatttcgtcacaaataatatcgggcaccatatatcatacaactgaaacaaatgagtttaataatattaattataaattccgaaaccatactttaaagttaactaattttccggcacattgaaaaataataaggaatttgtcgaaatttctaataactatataagtcctactaatacatggatcacaatacggtttgaaaatgacataaaatatatacactactaaaaaaaacctttggttacttctttttttttttttgatcatttagctttaatttaggataaatttgcaaccataggcattgcaaacgtaactaaaaagaaacctaaagagacactccctatggcttcgcggttattcgcggttattacatacatatatattaaccgaagccgtttactttggctcttttttcttccttgtccatgtacacattgctttaataattgtacgtatgttagaatttagggataaggtgaatgaggttccatcccaaaaccaattggcaatgggaggagtagctcattcatcttatatatcacaatttatttccacatattagcaat

SEQ ID NO: 297124 - DNA, 4281 bp, Cannabis indica
aatgggaagttcatgtaatcaatggaattaatttgtacaaattagtggagggtataaattttgatatggggtattttattaagggcaaattatgaaatttcccttttagtatactgtttaatttttctaaggcgtcctttattcatacaaatcattcgaccaatatggctacacataaattagttctgcacacacttaaggtgaatggtgagctaatttggatggaggattttccatctcttttttatgatgtactcaatgctgattttttttcaatgagaaatttgttcattgttcattgttaaaaataaaaaaataaaaaacacttggtaagtttcaatatttgtggggtcctctctttctatgtctttcgatttctgaataagcaatcttaagagcattgttattgggcactagtaatgcctaataccttctataggtagagctccacgattggttagggatattatctaatagttatcttcttaagttacatgggaccaatatttttttacactaataataatatgacaccgaaaaaaatactaagtgatagtaatatattttagcaattttccaatcttaatcaacatggtttcaaacaaatactcgtctagaaaagataaagcatgaactatacaattctttctttaacatattcttcttgagcaagaaaacgtctaaatctaataaataatcaaacccacacgaaaaataaaatcatttatcattaaacaaagacttttattccttttccaaaaaagaaaacaaagacttttacttttatttaattattttttatgaacaagaaagtcaataatataaaagaaaatatatttattcacaacatttctttgggcctttaataaaaaaaaaacatttctttggcccgaagaaaaaagatgattctattccattacataactcgtaattgagttagctaacttagcccacaagtcactaacaccacaccgccggaggatacctaatcgccgttgacccaaaaattttgtacagaaaaaggtaacatctgaaatgactaacatacccctatacagatttacttgccgacgttgatttagccgaaagagtatagggctatataagtaatttcggttctacgatgggtatctccatgaactccataaagccgacttcacgagcattcgaatattttgattctctcagttcatttaagcttccctcggctgcatttgactttgaactgtagaatccatatatcaatggcttcatatactgcaagcccaaattttgtagcttccaaagccatcaaatctatcaaatttcgtgctcccaagagctcttcatcatcatcatcatcatcatcgtcatcatcatcgccgccaaggaatgtaaagctttataatcgaacgattgattctttctcagctcggttactgcttcagaaccatgctaatttcaagctcagtggagctcctgttcgatttatgttctacaaggttgggatgtggattgatttttctagagaaattgtggcttccctttgttcgtgctttctagaccggacttcggcgattgatatggtgattgaagggtcaaattaccattttgattttctcggtatgttgcagattcatttgggggctgggaatcagagatcgattgcttggattgatgagcaaggtaagtgtttcttccctaaacaatttatcggagatgaatttgagatctacgatgtagagaatgcgaatgtagaaattgagatcgaagtcaaagggagtttggagccgaaattgggtaaaaggatgagagaagaagagaagatggtggaacatcaggaggaggaggataaggaagtgagttcttcgtataggcatggagtaatgccaaaacggcattgtattaaggattccaagctggaaaatcctcgatggccgaacacgaaattgctgagagaagaagagaacgcttatacgattgtcaggagcatatttctgcgtgggattaggaagattcatcccggtgctatcatcgccgcgattcatcagtgctcgcgcatgcggccattggagaaagctcatcgcgaaattttttcaaagcaaattgaaattactaaggctgctcgggggacatcgaatatggtttatgcctggtttgggggatcagcacaagccattgcaggcgttttggcacatgggtttagtgtggctggaaagctttctggctccgatgctaacgcggccggtgtccgtctctcccccttggccaatccttttagaaggtgattacgttgttccttttcagtttgtttttgcttttattgcatactttgttatattatcaatgtaattctgacggttgtgagtggtggttcagtgctatgcaatcgaaggcggacgataatggcgaaaaacatatgatactttgccgagttatattgggtaacgttgaaaaagttgaggcaagttcccaacaatattatccatctagttcagagttcgatactggggctgatgatcccacgaatcccaactggtatgtcgtatggtccaccaatattagcaggcacattcttccggattgtgttgtgagcttcaaatcttctgcaaacaaacaaggtatgataagcccccttgtttattttcgtatacattgttgccttaattactgtctactgaaacctgttttctgttcttatctctcagctgatctgggagggtttgcactaactaagtacacatttgctgaactgtttagtaagataaagtgttcccttcctccggtgaaagttcaggaatgtataactttgtacaattcactaaaggtaacagccttccagtttggtcaacgtgttgattcattatctttgatatgtaaatgtttgatctggaaatagcatagaaatatcaaacttagaatcgaaatattttttcgcccttgtttgtgccttattacaggatggaaaaatttcaaaagacattttcatcaagcagttccggttggttgctggagagaaggttctattatctgcaattagggagatttgtggctcagaatgaggttgatttgagatttaaatacgtccatcttagtatagccaatcaatattaaccaatgtaatgtcctcctactacgttagaactaggatttagatagaaagggctacagtaaactgaatagcaaaatttgtttcttccttggattctccatgctacaaaattgtggcaccaagttcattcttttagcgttcattttaaagtcaatggtctgagttggcatatccatacttagactatgttgaagggtataccggtacaatacaaggaatcgttttatgtacacagatatcaatatacacgatcatgtttcttattaaatttaatggtggctgccatattaatatcactatctgatctttgttttttcttcccttgcacaaggtccttagaatggatattatttgttgaaactcgatatttgaagttccaacaaatgattttaaattaaaaaacaacagtgttgtgtagtttgatatatgtatttactctcgtcttttgtggcacagaaaaaagaaaagaataaggaaaagcctggaatccctttctaattttgtataacatgagacctttccacatagttagccatgtatatcctagtcaacatacatcaattataggagaacaatttcttaataacttacattgaaggaagcttttacattaacagatgctattctgggttgtaattgaaggtatttttgcatgattgcatcctaacctaacctaatcctatctttgtttaacaagtgaacattcctctaaaaagttgtgcttagtgctttagaaatcaaactagttgtccactattcatgctacttttacgtttgttttctatagatgccgtccctgctaggtgtgcactttatatcttgtgtgaatctcattcctaaaactttccctcagtttgattccgatgttcattttagagaatgaactaggaaagtcagtgttatgagtcttcttaaggggaatctttttattatcctggacttgttatattcttatgctaggaattgaatatgtaaaatagatgctgtatatttgagtacattgtatcgctcttctatttcattactctgttttccctttttatcttatttttcgtcctcaacaatgacagagtttggtaggagtcctgtcctgtcatttatcgatgtgtatttattttgggttttgattttcatatcaatgctattctgtgtttaggtttcattatgttacatgcaattgtttcattttt

SEQ ID NO: 297125 - DNA, 1777 bp, Cannabis indica
aagaaaatctcccttacccttttatgatatcgggacctaatccagttaggagaagcgtgaaggggtgttagtttctcttctaccggtcttgtcatgatatgagtcgatggaagtgacgagactatacgcacgtcgttggccaaaactctcttgaagtggtccaaatcgaatatatcagagaactcgctgcattcaacaaggggggaaaaacgattaaaaacaactaacttcaaaactggaagttccccttaaaaggatataaacaaaaccagccataaatagaatacaataaaaggatcaaagaaagcacaacaaatcaaccagttttgttcactcatttaaagagaatatgagaaggaagtaatattctttcttacctttcatctccccaaatgacattgacttgtaagacagggacgaccaaagcagctccaagaatcctagcaatgatcacagcatcgacaatctgattcctctgctgattcaatccacccgaaaccacaaccatcaagtactttctcctgttgtttacaataccttcacttactctcctatactctcttgtgaacgttaaacaaggcttgtaccctaatccatctggctgtttccagaactcgttaccctcctctaactccgaaaacccatttgaagccaatgtctgtgaagcactaaagttggtcaagaaacctttttcatcaatctcgtcaccatttgcggcaacatccattttctctgtctttgaaaccccatttgagcttatgccctgggttagacttgtaatacacgggtatggagaaaaaggaaccaaagggtcaagattgaaacccaaccttaacataccaaaaagtgcaaagaaaaacagagagcaaaaccagaattttggtcttctgtaagtgttcaataagcttaataacctactgtttcttgatgatttcttgggcgagagaaggagagattgaagagacgaagatgatagagagttgatgatctgagatgggacagagatgtaagaaagtttttttgcattattctttgacttagccattagagaactatgttttgttacagttttggctcctttgatgagaaacttcaataaccttcagagggagaaagaagtggaacaagaagaagaagaagaagagagaaaaaagtgagagcgagagagagagagaagtcagaagaagaaaacaggcggcgggaacgcgaagactgatgaacctgtacgcgtttatattatttatattatcattatgagaaatgaggaagctctgttttgaattttttaagtatattttttctggccacaattaaattaattatacttctaattattattgttatgatttttgttattatattgaatgaagtggtatttttgtttttatattctcttttgtttatttaatcatcatatacttttctttttcttactttgttaaattataactaagattgtgctcttgctttgaaatgacaatttagcccttgagattcatggtttcttttcttagaaactcttctcaggttcacattggtaaaaaaaaaacacaaaatagatttgactttgtatggacaagggtgaaattatcaatgctacaactggggttacgatagatcttgtcattaaaagttatgacattattgactcatgcatgttaatgttagactaaaatacattcattaaaacaaaattttaattttatttgatttattttcctttcaaggctggtactcttatcttgcatttatttctcacgcatatttgaggtagcat

SEQ ID NO: 297126 - DNA, 4962 bp, Cannabis indica
aaaataataattttttgtagtggcaaaagaaaaaatatcataaaacagcaaggactggtcatccttaaaaaagaacagtttacataataatattacattaaactacatggggttgataaacaaccatgcataaagaaaaagaataaattaattattagaaagataaaaaacttcctgctcataaaattatgtaataaattgtccataaaaagagccatattgatgagagtgtttaaagagctcggccttttacgatgtcaagacttatctcactaggatcggttgcttgcaattcaacttgaatgccatccaattccctcttgaatctatctttagaacttgcatacaccatcttactcctcacccttgatgtgtcaggtgaccttattcaattccaaacaaatacaaaatacaaattgttataacattattgatctaataatttaatatcaaatcttacatattttaatgtaataaataatataaaacatcgttaacttgtatagagtttaccaagcgacgaagaaaatcttgcttttctggcagttttcgtcggtggtgaaatcaaaatcatagacagcatagcggcattcgttggcagggagagaatccgtgaaggcatcataggagtcacctgggcttcctagtttctctaccacaacttcttgattctcgatcttgaacacaatgaatcggtagttcctctttgttttcagctccaagaacttgagtttacactcatcgcttaccgccattccagatgctgcgttcgcctgattgaaatatagtttgttacaccaaaataaaagacataacagaaatattattcaaatcacattgatgcaatgatcaacaggactagatattttattgctttgaaattgaatgagggcaaatcccttaacgtacacatcttactcttattagacatcaatagaaaatgacagaatgatgaaatattacagagaaagaggacataccatgttttgatttttcctcaaatgaaagagacggaaacagattttttttttttttcttgaaaaattatgaggaagaaagagaagaaagaaagtgggaaatgaatgagtatagcagatgacagatccttaacttttgggaagcattagaggtgagagaattgcggtggtgaagagaattttgaggaagaaaacaaaggttgagaatttctcaaaatctcctactctatcatgtccacaactaacacattcttaatattgacattaattaattaaaattatacagattatgcatgccactactgccaattttatttgctccaccacacactttattttaattaatgattaaaatcatcctatattgaaatttcgttagttccggaaataaacaatgtatccttttttttttctgatttattgcagaaaaaatgtgttatatgtatgctaacacattgccatccagtgttccttattccattctcatttattttactgccaaacactcatttggtaacgcctattctcgataatgattaaattattaggtgtaaaataatttttatattattcatgagaatatacctattttgcatcctgatttaacaagggcattctgtctgtgatagtatcagtataaaaactatatagtgtatatttatgaaaaatttaacatataaaacaaaattttgattcggagagtttaaattataatgatagtgtccactaattctaaagtaggacaatgacaaacaaaaatcaagtcaaaaatgttacatgaatttactctcaagacaaccatcggctgtaacaatatttggttatccaacaaaatttactactttgggtccttgtttcttctttgattttatatgactttcttgggaatcagaagcagaactcggtattggttccgaagactcgtcttttttaccaccatttttgtcctctgccgtgaaatcatcctcaagatcatcgccacttgtaaatttgatcacttgtcctcttggtcttccctccgtagctagaaagagaagagaatactaaacttagcttgataagcaatgaaaatgcacaagtatgtatgccccagaaggttaaatgaaaagagaacctaaatacttcatgcaagatcagaaaagagaaaccaaatacataagtactactgaggcgcatggcccttgatgttgcatcaattacagcaagatcccgggtgacgaaataaacatgttattatcccctaatggcattcggtagagaaaattaacataatttgtgaatcacatgttcactctattctagaagcttaaagcatggagaaaagcataaaggagaaactacattttaaacttgaggactgccaagcataatttcagcccaaacgaaagaattactgccagaaatgaggtagaataaataggccattattatcaggtagagaaacgtacaggcacggatagctttactagcaactgcggaatcatgtgttcgttggtttttggttggacaatcttttgccaaatgtgtaaccccattacaaagtttgcaagaaccacccttcagagaaagaaaacggtgtgtcagaatgttaaatttaattgatagagagattttgctctaatagtgcaaactttagttacaattttaagaacattcaataacatgaaaaccaagaatgctaaactcatttaccttgggatatatcccatgagagtttttaggacagtttttactcaagtgcccagtctcattacaaatgaagcatgtggcaaatttcgttcctcctgcataataaacaaaaagacaatacaattaatgacttgtattgaaaacacactcacacacaatgacgccaattcaacagtcaatcctcatcataatttcctcaagtgcagctaaatgctcctttcaaagcagtctgaatgaaccaacccatgttttgaacatacaggccagcagtccctcgtaaacaattgaatagagaaactaaaaatcaaatgacataacaaatcactttcatgtgctacacaaccaaataaagggacgagcctcgccaaaaggagaaaccaaattttctcaacataggtttacccatggaaagtaaaggtgaaatcctgactgaaaaaatgccagactcaactaccaagttccaaccaagtataacatgttgagaaataaagccgtccagtattcatgtaaggttcaagagcttaaatctatattattcaaggcttgtgtcacattggctcaaaagatgggtgcatcactaaacaaacttggtgcaataagacatgacactaaacaaataaagagtatatagttgcaagaaacaattcaaatttatatagtttccctatgacgaaaaatatgtgataaattaccatcttgaagaggttgggggcatttatcaagtgaatgcccactttctccacaattataacacatttttatatccagggtctcatcgttcttgttagggcagttcttcaggctgtgcccccggcctcggcagagcaagcatatctgaaaataccacagaaacaacatcaaaaactaaacaaaacaaaaatttcaaaacgaaaaagaaaagaaatcgcttgattcagaaacaggaaacaagacatcccatgaaattcaaaaacataatctgactaaaagcccaaaccttgttcttttcccactgagcttttgagggcaaagcttggcaatatggtctttccctttacagatgaaacagctctcaccgggcttcataccaggtacccttagtgggtgttttctgagcccctttttgatgggtctggacccatcggcgggggctttcgattctaccttcttctttcgcttaaacttcttcttcttcaccttgtctgggtctttagggggagtaggctctggcttggggaacagtccagggttctcggccttgaatttcttgcgagcttccttctgtcttttgctcaccatttttatctgatactgctaatggaggttgagttgagagtttaggagggtttttgattaggagaatccagcggctggctggctgtgtgagcaaaagaaaagaaataatgctctcgctctaaacgacatatagtttcccaatttccaagctggaaaattcaatgtcgttttaacatatttttgtcgttttgttgggtatatttacacgttgttcaaacttggttctctcctctttatttattatcagtttggacctctaatttaaaacaattacatatagggtcctgtatttttgttaaatagctaacatatttaaagaacataaatatttgatattacaaaagtttatctattctttaatacaaattggtacatcatttatttatacggttaagtttgtttgcaatatctctaagtgaaagtattttttaaaaaataaatagactattatataaaacaatgcaagtcattatacatcattaaatagcaaatagagagtatcttctaaaagagcatacttttctaatttataaacactaatatttgtaaatctaaaaatatgagagatctgtactcctaaaaaaattagccacttccgaatattagtaaaaatacaataaaaattagacattatatttaaagaagattgcaatccttttgctaccataagaaaattagtttcaatgaaatgtactagaagttgcaactcgactaaccattgaaggctgtaaaagatatacatagcctctaaaatttttggtttgaaacatccatcgaatggctttgacaaaactgccacaatcgtgccatcagagttgtgaagaatagccccaaaaccatattttcacttcattgtatctactgcaatgtcagtgataagcttcagttgacctaatggagggttcaaccaacttggttcataagtaccatgtctagtagtagttgtttgttgacactactgatgtcgcccaattagttacactgcggtcgcggtagtaaacgggctatatgtcgtatccac

SEQ ID NO: 297127 - DNA, 1714 bp, Cannabis indica
agatccggatctccatagaaccctgtgaaactccaccactgaccttcctccttcctaatgaaagaatcaatatggaaaggagagaaagataaaacattggaatccacttgcagggatcaaagcagaatgagccctccacttttccctttagcttccaccacaaaacaaccgccaaaccccaactgaacctgcaaagactcggcctaaactttattcaacttggactctgagatgaacaccaggtcaagatgccaaagaaccactagggacttcaaggaacaaactatccaagggttccccagcccttggacgttccaaagtaagatattcatgattgtaggcgaccctgatccacagagttttcctcttctttaatcttagcagttgccgaatccccattatgagaaacgccaaatgccttaccactagccttaccacctttagccttagaatctttcttgactgagacattacttctattttcttttagggtatcattctgggtcgaaccaaacacaaagaaagagacccttccatgaggatcaactcatgagagtaagttaaaggaatattgaatagctcctggttagaggaaggtgtcgtaaaggggttaattttttttggagctttccataacttgtgatctccttatcctccagcagcatccgtcttcaccaattcttgatacatcaacaacattcgtatcttctggctccttgatccctgaacaaggattggaattatcgacagcctccaggggtttaccccgttgacgtcttccacaacggcccccacagaatttgtctcgacaacatcagcagctttggataaagattcaaaagaatttgagaccctgagtacctgttcagtcaatatttctcgtgagattctcaaacccccatctgcaatacgcttgctttctccaagatggttctcatgaaacccatccctgattctgtcatccacttttaaccaggtcccgtacgcattagcagtttcttcctcagcccatgttacccttgctttttccaaccgacattctttatggctatgcccaatccgaccacaccgaaagcacatgaatagtaactcctcatatttgaatgctacccaagttttagaacccgcataaggtagaaggtacccagaacatattggtttcttaattgacatccatacttggaacctaaagaagccattagcaaccattcttgaaacatccgagttctgtaccgtgataacctcccttgtcatggaagccaatcgtaaggtatttttcgaagttaggtaatctattggcacccccaaagcacgaccccaaatctgaaacactgttaaatcattctttctagattcactagaattctgcatcttccccaaaattagcaatccattcgataaataccatggcatcttggataagattttcgtccgaatattctcagagttgaaggtgaatgtgaggagtaaacttgaatcgaatttctcctttatcttattgctccattccacctctttcaacctccaaattcctcccaaaactttcttcagaaatcccctgctatggtcgacattggtgcatagggattgctaattttagggtcaacatcatgtagttagttaaacctaaatataattaatccacctaaagtgttgcaattaataaaattgtttcatattgtttatttttttttattaaaaaattattttcaaa

SEQ ID NO: 297128 - DNA, 2468 bp, Cannabis indica
taaattaattttttatcaaaataaaacttaataataatttgatttagagatgttatgataaatttagttacatttactgtaactgttcgtgttaaaaattatcttaaagttagttttatcaaaaaataaattattaaaaattaagtttacggtcttatttttaccattttaaaacagaaaccaattaataacttttacaaatattgcccataagtaaacatgacgctagagaagtgtgtctagagttgtgatctcttctcaggaaagggatagtgtctagtgagtagtgagagtgttatagtgttacaagaccaacccctcaaatcaaaataccagacttagtagttagtcgtatgatcagtcaactcttctggcccacgacagtcaccattacttgggttttctttgtttgtttgatcttgatcttgaattgatgttgataggcatggagctttggactctacttatgctgagacagaattgagtgaagtgaaattctctcacatgggttgttttcactccaagaccacccactttcactccccagacgacccttcttctaactcccaccaaggtttttacttttcctcttcttttgcttcttcaggggtttttgagattacttgcttaatgggtttttgatttttgaagcaaatggaaatctagttgaggaggaagaggatcgatctccggtgtttaaagagtactctcttaacgaccttcgaaaggccacaaatgggttcagtaccgactttattgtctccgagagcggtgagaaagctcccaatgtggtttacagagggaaacttcacaacaatcgctttgttgctattaaacgcttctctaagcagtcatggcctgatgctcatcactttgtggtaataatttttgcttaattctctttggtttgtggtaaaggactagactttagtacttgggggttgttctagttatacatttgtcattatttttgtgttttcttagttggttttttagtatttttgttgctgttttgaactcaaatgggatattatgctattgattattttttctcagtttgttttctcgggaaacaaacaggtggggtttttgctttttgtttaaaggtgttgaattttgttgatcaggttgaggcagcaggagttggtaaggtgaggcataagagattagtgaatctgattggttgctgtgctgaaggagatgaacgactcttggttgctgagtacatgcccaatgatactttgtccaaacatctctttcattgtatgaattaacttgatcacttttctttccagccaaaaagaaaacttatcacttccttttttttgttttctgctacttttttggttaatttactcctaaagtttgttttttgcccccacttttatgtaaacaagatagacttttctttttctttctccttttgcttttcttttttctttcattctttttcaagtataatttaggacttccactgtggagaagaagtatatttaggaatgtttgaggcttattttagatacttgttttggtataaaatctactgttgctaagtatttgagtcttttttcaacttaacatgtattcttcaactgttatctttgtataaagtttttatttcatttcatgataacttattacatcttttgtcataggggacaagcaaccattgccatgggaaatgagagttagagttgcttactatattgctcgggcccttgaccattgcaatgcagtaaaccaaaagatttatcatgatttaaatgcgtatagaatcctatttgatgaggtacgtaacgaatgttttctgtgtttttattttactttatttctataaagtgttgttggatgattcttagttagtttcttttttgttgcattttcgaattattaactacatgtatgtgcaaatgactactgtgacctcaagggcgaacatgttgtaagctgtgattagaatataacaaatctatgcactttttccaggatggtgaccctcggttgtctagttttggcctcatgaaaaatagtcgagatggtaaaagctacagtactaatttagcttatactccacctgagtttgtacgcacaggtaaagtgtgttctcataatttgtgtactgtgtaatcaagtttgctgcacatattcatgtttaataatcaaactacacacatttaaagaagtggatggggacacgtacatcttaagaaattgacagttgctcttcagcaagatcagctatttgagttacctagaatgaatttagtcattactaaaattatatagtgttgatattgataccatagttattacttattttgttgaccaatatccactttaagttatagaatatgtagcgattgaaaattattttgcttctcttcatttatgttaagaaatatgtgaatgtagtttttgttttttttttctgtttatgcatactgaatcacatgaaattttacttaact

SEQ ID NO: 297129 - DNA, 7895 bp, Cannabis indica
aaattataaaattgactataataaaataaaaaataattcatacaattacattttacatcatgatattgggggcagtcaacagaaaccaacagcagctaaaaatgcaatcacaattcgaaaggcaactttgtaataacttgatatagagaaaaaactggcttaagcagagtgagaaccttctgcttttagtaactaaaggtttgtaaggagtaagaagcaaaagaatctgaaggagttgttgaatctagcacatagaaattacctaccgcagagtttgatctcatttggtggtaagcagtttcttccatatattatttccagatatttacttcactgcaaatttgggtgattttgtgacctaattttgaagtatctttttaaaagcaaaatacacgtataatataatagcatatttgttgggctagtgattggattctcaggctaaccaatccacatatataaaaagtggtaatatatataaatatatatataacagaatgtatatctgcataacaagagcttattaattacttcagatatcattcatcaactaataagtgcatgaaaatagaacaaacgaaacttgatctcttctaatcagtaaagaagaagaagaagaagaaagaaaagacctcttaagctagcaaattacattatgtcctaaccaagctgaaacagagccagcttcaattaacaaatacaatataaaacctaaaccatagaggacattttacatgagttaatttcattttcaacagaataaaatcgaaaagatacataaaaataataaaactaaatcaacagaagtaaggtttatgaagattgaagacaactttgtatatattactttcccatttccatgctaatttttccattagctaaagcaaacaaatcaaactatttcgtttgtactggtcacgcatgatctatttcatccatttaaaatttgaaaataaaattaaaggttaaaaaaaagcaaatacctagatgagaagaggtagggttaattttttttctttttacctagtttgaaccctggaagaaacctgagctctgctccagacacttcaaatgctttcggccattattactcatcgacgactccatgcctagggttcataggtgtggtgttctttttccgtacggtacgtaaaaagttttttggcaagaggacaaaggaaaaaaaaagtgtcgggaagaggcgttgggcgggaaacattaatgggctgggctttcagggtgaacctcacggtccatgggccaagctcggtaggcccgatttgtcaaagctgagatgagagtagtcacgcgtgggttgtggcgcgtggatccacgaaccaactcccagtcccatcccaatggagtctttcccgccaataacttctgtgactgtgtgtactgtgtagacatatgtgtacctaaatatctttccagtataaataatacaaactcttcgcctgttctgttacttagggtaaaatttgcattccctacaacttaaccctaaagaagatgactcagaattttgaggatcagaacaagcttcctgagctcaaactaggtatgacacgaaaaccctagttcctcattctgatttttgataaacaatatatttaggtatattgaactgtcaaatcacttatttatacgcttgttaatgttttaaaagatgctaagcaagctcaagggttcctctcattctacaagagactgcctcaagtgagttatttctctttattcttagttaatggctgtgttctattcttagttaagattatgaaatttgatttatgttttctgtttggggtctgagactgagaggaaatggaggcaagggaaagaaagtttgagttttgatggctattttttgggggggttttcatgagggaaactatattcggctgaattatatggtaatactggagcccagttatgaatggaatttaatattttggcattattagtggtcatctgttactcttgttatgataaagagatatatagtacatcaaattatcaaatggaggaaaagataaaaagaacattttactgactaatttaaatttagtttctgtctggttaataataaaattgtatattttgatgtttaactaaagcgaagggttttctttcctcgtttgttctcatttttctatgtgataatcaaacactggtttaggcttcctttgactaattgattatctttctaaaagcaaaactgacagaagttatctaaaagaatggcaatttgaagcctttttctttccgtatcagctgttctgaaatgggattattgtttgggtacacacaaatgacaggattataaaaatttggtggtcatacgtctttattttttgttttcttattttgtttctcttttctcttgcaggacgcaagagcaattcggttctttgatcgtcgggtcagttaatatttaatcctatttcttttttcatctcctctttcctattgcggtttatatttgaatggttttccttgtattccaactcttatctgtaccttagttattagttttctttactgtcttgttttagtttttcatgaaagctcacactattgtttattttctactttcgactaccaaattatctaagaattgtttatgtttttcttaacaggagtggagatgattgatatttacttaaaagtaccttttgactttgaaactttttcatgtgcatatctgtatgtagtgtcattgagtttgtctccatttccttgatgtcttctaatattttattgtatttcgttgcctatttagtgtaagatatcacattccatttaaatgataacgggttatgttgctgttactatttcattgctttgatgactaatcacaatagtgtatcggccacaagcatgcagtgcttgtcattagtattgacccaaaactagcttaagtgttttgcactggaactgtaatttagaattttgtgtcagatagaagcatgtttagtaggtatataggcatgcagtctaatcatatctattatgagttcttgaatgttagtttgtatttttttttctggttgtgtacgctctctcactctctgtcatgatatgcagctgctctattcattataaaattcattactttcaacatacaactacaatgtcttacatttctttatgaaattcctggctctagtgttcattcatggttcttgaatttacaaaaatatggtcctagtgattttcttaactacttttgcatatttcgtcttagtttctatgtgcataactagtgcttgttttaaaataaacttgcaaaaactgtgcaggattactatactgctcatggcgaaaatgcaacttttattgcgaagaccttctaccacactaccacagcactgcgacaattgggtagtggttcagaaagcctctccagtgtaagtgtaagtagaaatatgtttgaaacaattgtccgtgatcttcttttggagagaacagaccatgctgttgagctctacgagggtagtggctcaaattggagactggtgaaaagtggaaccccagggaatatcagtagctttgaagatattttatttgccaacaatgagatgcaagatacccctgttgttgttgcactagtgcctaattttcgtgaaaatagctgcactattgggttgggttatgttgatcttactaaacgagtgcttgggcttgctgagtttcttgatgatagccattttacgaacgtcgaatcagctttggttgctcttggttgcaaggaatgtcttttgcctttagaaagtggaaaatccagtgaaatcaagactttgtatgattcattgactagatgtggggtgatgttaactgagagaaagaaggctgattttaagatgagggatttggtgcaggatcttggcaggctcgtcaaaggttctattgagccagttcgagatttagtatctggatttgaatttgcaccttgtgctttgggagcactgctgtcatatgcagatcttctggcagatgagagcaattatggaaattattctatccgaagatacaatcttgatagctacatgagattggattctgctgctatgagagctcttaatgtcctggaaagtaaaacagacgcaaacaaaaatttcagtttatttggactaatgaatagaacgtgtactgctggaatgggaaaaagactgctgaatatgtggttgaaacagcctttgatagatgtaaatgaaattaataccaggcttgatttagtacaggcatttgttgaggatcctgcacttcgccaagatttaaggcaacatcttaagagaatctcagatattgagcgactggtgaacaatcttgagaagaaaagggctggtttacagcatatcgttaaactttaccaggttgagtctttagtattttttccctttctattttggttttaagtattttgttttacgcttgttggagttagatgaatgtgttggctaacaatcttccgcttactctttctttgatctgttgttctgtctgcttgtatttatgatgttcatctatataatttgtgtgtaaagtactaaacactcttcatgaacacactgaatgtgaaatgaggattttttttatttacttatttgaatgctacattcggattttctttcagctgtggatatcgtatacttttttattctcctccctcttaaccttacaatatttggagatcaagaaactaaatcaattggtatgttggttttccaagaatttgactgtgtgagaagaaaccacatatttgctcattagagctgcacctcttagttgtcttttcttataacgagtgacatgaatagttctttattttccatgaatgtgtaatgtttcttcttgtaattctgtttatgtatttttcttgaaatctcttcatcataatatgattattgttcacctattgcagtcgtgtataagacttccattcattaagagtgctctagaacagtatgatggtcaattttcttctctggtgaaggagaagtacctggatcctcttgagatatgttctgatgaagatcacctgaataagtttgttgctttggtggaagtttctgttgaccttgatcaactagaaaatggggaatacatgatatcatctagttatgaccctgcactatctgcattgagagatgaacaagaatcactagatcgagaaattagcgatttgcataaagttactgccaatgatcttgatctgcctgtagataaagctttaaaattagataaaagcacacagtttggacatgtatttaggattacgaagaaggaagagccaaaaataagaaaaaagcttacgacccaatttattgtccttgaaacccgaaaggatggagtcaagtttactaacacaaaacttaagaagctgggagacaagtaccagaaggtgcttgaggagtacaagaattgtcagaaagaactagttagccgtgtagttcaaacagcagctactttctctgaggtagttatacttaaacttccagttttttatccttaaaactttacttttgctttggattaaaggaatttcaaacatacaggtgttcgggtctttagctgctttgctttctgaaatagatgtcttgctgagctttgcggatttagcgtcttcttgtccaactccctacactagaccagaaatcactacatcggtaaccgattactaataattatttaatgttgactcttcaattcctctttttcttctcatggaaaatggttttgagacttttccttttttctccatttaacaaacaggatgagggtgatatcatattgcaagggagtagacacccttgtgttgaagcccaggactgggtgaactttataccaaatgattgtgaactagtgagtattcatgcaaaggaaatataaatatctctttccagatttttaaattaaattgttgaagtccttaccgttttcatttcatcccttaatcaggtgaggggtaaaagttggttccagatcattacaggacctaatatgggtgggaaatccacatttattcggcaggtgtggttttggtaatttagttatgttgctcttttctacagattatgttgatttatattcaagtgtccttgtattggtcacaaacaaattacttggaggtaaatctctttgtattattgcatgccctgataccttgacccatgtgtactattttaaaataaataaagaaagaaataaaataagtgcatttccaatggagatgcaaagctaaatataactctgtaaaagatatacttcaattcaatagcgtgcttggtgatgaatgtgagacaacatttgttatgtgctaaattatttgtatcactataaatgtactactatttcatttacttttatgtcaattttatcattttattagtatatttagcaataacttaaattatttatgaactatgaactattattattattttattattgttttatataataaaattaatgataaagctattatttttgatgaaaatattaattaaacattaaattttgcatcaagttttgtaatgctaaaaattgatgcaaatatattataaaataatttttgtgttaaatataacacaatttttaggagatggtctaataagtcaaagatcttacaatcgtttttcttttgtccttgcataaggttggcgtgaacgtattgatggctcaagttggctgttttgttccatgtgacaaagcttgcatttctgttcgtgattgcatttttgctcgtgttggtgctggtgactgccaagtaagaccaattttatattctcttggaagtttcaactccctcaaaatgtactgtattatttcaactttctttcttagtttccacttgaaaaacaatagatgtggcttctcatttctggatcaggtgaatatacaacattgttcaactttcaatccatcatatttacgatccaattttatgtactgagcttaacagacattaacctgccattttactgacatcacctggaaaagcattttaggcttttagctaaaatgtgctgggtaggttaaaactgatgatatcacaacattaccgtttatatgctctcatttctttgtatataataatacttgccgactcttcataaataactgctttattttattaattatttaagaaaatatattttttttcttttcttgttttctgaataaaagtattatacatcttattttctagcgagatgttaattaactgtgttccttttcttgttagctacgtggggtgtctacgtttatgcaagagatgctagagactgcctctattttgaaaggtgctacagagaagtcattgataatcattgatgagttgggccggggaacatcaacttatgatggctttggttggttctctctatcaaaagttgttgttgttgttgttattattattattagtattagatctcaggaatattcatgttacatccgcatgcaatggatcaaatttgcattttcttaaaaaatgactcatactaagaaaatgtttccattggtttcaagaagtgtttgaatagtcatattgatcttcttgtcatatgtgtcattaaactatttatatcttaaaacttgatttaattgtactctcgtttttaccctggttctcaggtttagcttgggccatttgtgaacaccttgttgaagtgattaaggcacctactttgtttgcgacccactttcatgaactaactgcattggctcatgaaagtgctgatcgtgaacctaacatcaagcctattgttggtgtagcaaactttcatgttagtgcacacattgactcgtcaactcgaaagttgaccatgctgtacaaggtgatgacttaactatccctaggttcttcttcttcttcgtattattattattattat

SEQ ID NO: 297130 - DNA, 3461 bp, Cannabis indica
ctacacgttatcttacacgatggctctatacgcattagcattgttttatgttgcttgtaaagatctgcttcagccattcaatccagttccaaagtttattataataaaatctgtcgttttcctgacttattggcaggtaaaaactgttcacattgatcatttcatctatattatttttattaattatgatttaggacatggtttcaattgtaagcatacatgaggtgtgaattctggagtaaggtttaaggggagttttgacaagaattttggagcttgtcaatagaaactattaattttctatgtagaatagattggttgggtaatcaagagtattattgcgtgctaattcatgcatattgggaagcaactgtgttattaagaaggtaaaccaaaatcgtacttcatttcaatatggttctgatcttgttgctttctatctccagggtgtgttggtctttcttgctgcaaaatcgggatttataaagaatgcagaggaagctgctcggtatcagaacttcattatttgtgttgaaatgctcattgctgccataggtcatctttatgcattcccatacaaggaatatgctggtgcaaatatcggcgctcctcgtggtttgacagggagtcttacacatgccgtaaaactaaacgacttttaccatgacacagtccaccaggtaaactgtgcatgctatgagctgatctttgcctgtggattctcacagagcactactatatttggctcaggctcaagctggctgatgagtatattgaactttttatttatttatttgttttattcttttgtagtttgcacctacttatcatgattatgttctctacaaccacaatgagagtggtgatgaggggacaaggaagtatcggtcacgtacatttgtgccaactggaccagagatggatgcagtcagaaaaaacaaacacatgcttggaaacaagattgatgacatacagctctccagtctctcttcttccaattcaagcactcctgaaaattctcaatcgatgcctgattctgctaactccgaggcaatgaaatcttcactgcttgtggatacatcaacagatttctctgtgccttatgacatgtctttaattgacttggatctttcaacttacccttcaaaggttcccgccgttaaggaaaacgagactaggtgacaataatggatgaagttgttgttagttgtgtaagaagggtgtctgtattctgtattagggaattcttttttggtttgttaaattgtgataggagagaggtgggatgttctgttcttttgcaaagccctaattgtgtgctgatattggtttgaattctttcttacccatcagcttaaagtcatgtaccgtttaaaatgtgatgcttccaagcgaagttatccttaaatggtcagtttgtccagtgtgtattgtttgtagataaggaacttttagttgtcatgaattaacacaccacagaatcaaatgtagaataattgaccttccattttattcaattcattgctttgttcgcccacttctcttatctactatgtaatttcacacaaccatttattctcatatgatatctataagttgttttgaaattgcagttaaatgcaatgttcttattcttttcaagaagtttcaattactggtatttaggtcttcaactctgcttctttcttttctgggctttctttttgttggacaaaactctgcttttttaaattgatatcaaaaaatgatttgatcctgctttaaatgtccacttgagctaatttggcaattttttataggtggaataaactggaaaaaaaaaggaaagtaaaatagtaaaatgctagctggtctgtgaatgctcctgtcctcgacaaaaagcattggctatcttaagtaactaatatagttttaattatatttgtcttattgtacactttcattacagaatgaagtaaacaattgtaattttcataattatcgataccaattaatatatatattttaggctaattaagattttattcctggtcatatatcaaattatatctatgaaagattgttaaaaatactctctaaactattgagattattagatttaaagatttttttttctaattttaataaaaaagtctaacatgaatgaaagttcagagaacataattatgtacatgtcaaaattcgaggggcatgattaatgatttggtagatatcaaagtttgggagcatgatttaatacataaacaatctttaaaatagtaaaattgaatgaaagttgacaaaactcattaaatccaacaatttcaatagttcaagggtatttttaacgataaaaaaagttcagggacatgatttgttatatgtcaaagattaaagacaaaaatcctaattagcctatattttattgtaagcctcgagttgagtctgctctgcattgaatcttacagtcgaattaacaaataataattttcattatttactccattcgcaataagatttccatataccttctcataatccatgtacatatattaagtcatgcatttgattagatattgatgaataagtgatgatgttattataactagaagtctataaactcatataaaacatctctcctaaaacacttttttcttcttctttcttttcaaacaatcctaaagcacatttttaagtcccaacaactttggaaacttgtgagttcgtcccgcaaataaaagtaaaagatttcgacatctcaaagctctctcaagtattatacttttctataaatttagttcagaaaattttgctggttttgttgaaataactgtgtggagtgtgaagtttcttattgactagacaaaactgtaattggtccacaagggattaactagtttcattatgttggcggctacatgcattgagatttcaaatatgacatgcatgaatacgtgtagtcgtgtactgaaagagaaagaagaattaaggtgtgcttgattagataatatataattatatatatccacgtattaattaatggtgaaacttgcaaggtatataacatacaaagatacagtctgtacgtgtttggtgcaaccaatccaaacgttttccatcctaattattattaatttaatcaaaattaacttagtttatccaatatatatgttgtatatatctagccgaagcttttacattctacgcaaaatgctatatattacttctaatctaatcattttgcgcttcagcttaatttaaactactttggactaattcatacatacataggctcagtcatattacaagaaataacacatcttaaaatgatccacttggcaacataatatataactatttttataattaagataatgcaattttaatgagtaatttatgacataaatatttaagtttaattctcggttgtaaataaatacgtaattttattttttagcactaataatacctaagttatattt

SEQ ID NO: 297131 - DNA, 2657 bp, Cannabis indica
tttaattaaataacaaaattttaattaatcacgattttcattaacctcgttgattagcaacgagctgcacagtacgtttaaaatcacgtcaacacgcctatgttagttagggtgttacactttccttctttgacatttatgtctttaggcttttcttaaaacgcttttgcatctttgacatttatgccttgaaatcttttattgtatgtggatccctttgtaggggactctgggcttcctaaaatgcatcaactctgaatgtgttatccatgtcatggtaagggaactttgatccttccttgtgcatcgctctatgttatttatgaaatataagtttacgaaaggagctttagcccctccttaagcagcactcactcctgtttattacattcttcaccctaacaatgtgcgctgaatgttttgtattttataaatttgatatgagttgttggaatttttgaatgtcaatgtaggaggtatcattcatggtttcttttctctttgacttctgcataggattcttggagatgagtagttactagaggttgatcatagagtattgatggtggaatgtatggatacatttccatgattcggggtgaccttttgttttcttctttaaccattgaccgtaatgctttgcattatttgatccagtatctcgcataagttatttccacaggcaatatctaacttcttaacttgggtttgtttatttttcttaccctcattgtatgcctcttacaacactatttcttgcaagaggtaagcttgaataagaaatgttgtcatctcgaacctcaagcaagatgtaaggttaagatacgaaggctttgtgagatgccccataagagatgcatgctgatgggacatatgttgttgagatgcatgttgtcgagatgcatgcgatatgatgcatgtttttcgaaacacatgatgtagagatagatattttcgggacacatgtgatcgggatgaatgctgatgaaacgattgctggcgagacacctactactgggatgcatgccgttaagagagattctggcatgatgcatgatgccaagacacatgctttagggaagatctcggccaagatgctatagggaaaaccttggtcttgttatgggtgtgatagcgggtagctagttagaaacaatctcgcagatatagaggaatcctctactaatcaaccctccaccggtacaagtaaacctgctccacggtcaaggaccaaattcgtgggggtttattttgaggcgagccgtatcgtttcttcttttgaaagcatattccaagttagagatgtccttagagctcacgagctcaacttggtgtgggacggctatgcagagccctgactcccaccaaacgtaactattgtcctcctcatgaaagcatgtttgcgtcggacatttccttatttatggtggggggtgcactcccactattcttttattattgggaaatccttggagcctttgggatggcttccttccagctatcttccaatagctatcggatcttggctgggcttaagtccctttatcacatactagagcttggagacccaacacccgtggaagtgttgtacatctaccagtcaagggccagtccaacttggagggttaaacccgacgatggattctactacctgagctatttgactactctaataattcttgatggtctccctaacaagctgcataactaaaaaaaaatgagttcttctgggtatggagcacatttgacaggggcacccacgacttcaagcacataggtaatacacgttgcactttagcttcattcaattattgttgttgattatatttctctttgtaagtgttgacttgcctttttttctttttaggggccattcccatccaactgtcggattggttgaacgagagggtgagtcttatccaaagcattgacaaatgtaagaaaaatcttcactttctcctccatgacgaccacctcagggtgtgcggtctattacaagatacggggatgaccgcagatgttgcccttcagaaagtcttatttaaatgatatttactctctatatgcgcagcaattactataaattaatagttgggcatggtatacatattttaattgtagtatatataattttgttagcattgtatatacattttgagtattaatttactaattttacttttgttaaaagaaattgggggtatataattttattactaagattattaatttcttttgctacaacatatcaaatatttttatatatacaatatatatttaataatatagtatatttatttattgtaattataataaattaatatactaattgtaaatttatctaacataaatatatcatcatataattttttaaaaaaatttgacatgaaataacaatattttaataatttttattagggtgtgtttggaagtaactgtgtaattactaggtagggtaattacacaatttagcaattacactatattttaaaatacaaggtgtgtttggatatgaggtggtaattacatatgaattcctaatatcttgtttggcaaaatagttagtaattacatgggaaaataatattttttagtagataatgtttaatatgaattttttttagtaattacacggtgtaattacatccaattctcat

SEQ ID NO: 297132 - DNA, 3617 bp, Cannabis indica
ttttactgtttcagtgattgtttatgtactaaatcatgctccctagactttgatatctaccaattcatgcccctcaaactttgatatgtattaaatcatgtcccctaaactttcatctatattagaatttttttattaaaattagacaaaaatccttaaatttaacaatcttaatagttcagggagaatttttaacgacaaaaaaagttcaggggacatgatttagtacatattaaagttcagggaaaaaaattgctaattagcctaaaaattataaaaaccgctaaccaattaacactcttatgaacaaaaatattattattagtgcaatttaatatctaatctcacttattttactttaataaaaattataaaaatggctaacacattatagtctcacctcataggctcgtaacaatgctctttaagaataaaagaatgggaatgaacctagccaaaaaaaaaaagcaaatgggaacgacaagccaccttaaacgcgaaaacaaaaacatcgaaagactgaaataactgaacaatatgtagaaaattatgatgtttcttccagtgtaacttctgatggtcatgttatatagaaatcaaatcaaacagtccaatgaaaaacacaaataagcattttccttttaactatgttttacagtgaattcattcaagattgaaaacattgccccttgagtgcctggccgatcttatgaaaagtgatgtttcacaaaaagcatgagtaccatggaataaacacaagagcgtaatgacttcaggcaatgcactaactattcaacaaaccacaccatgaaggcaggagaattcgtgagggtaacatgaccaattgtgtacttacgaattgtgaatacaacttgttgtggtcaactgtgaaaaagcttgaaatatagaatcaagaagattacaaaaataagagctccaatgactgagcctataatccatttgtgtttggtcatcctccgggacattgcagttaaaacttttttactcttgtcaatggcatcatcaactccatgaagctgcaacaaaaacataaacaagttcagcatcacaaaccaatgctgttaatgagtcaggatcctaaaggaataatctcccaagtttcacacaaaacagtaaactacagatcaagtccaagtgacagtggattgtaaggaaaaaaatctcgtagtgtgcatactttattatgagaatgcagaagagtttcacgttgttgatgcaaatcttggagaattgagatgccaagctcttcagtctccaatatggtccttctgctctccataattctgtcactcgactcatttaacctctccactgacattgccattctctccctatgttcagcagaagcctgcacgagttgttgataaagacaaagatcaactaaacaaagaaaccggattcgtctaactcatatcgttaacatgtcaatgttgatgttgtaaacagaaataatagaggcctgctatttgtacagagttctaatcaactttagaagatcaatagaacaataaaatgatataccgaaaactgtctaatctctctcatatccatgagatactttagactatgcatgtctgtgataggatgtaatgtagtaatcaaagaggtgtgtggttgcgtaccaagaagctatagaaataactagtaacaaattctactgataaatactaggaacccttgtaggcaggaaaagttcaagtgctcaagtgtgaagcgcaattattttgaatggtatgccaggcggaagaaccaaatgctgaacaacaaagctaaatttctcaaaaagagattatagtgataatgaagcagagattaaagcggagaacacatcaaacatacacaaaactcattgatcaagatggcgtagaggaaagcatcagagaacaaatgacaacagcatatcaaacaacacaacataaaatcaagggagtaacactaaacaagacaatttgttgattcaaagaaataccgaatgaacatctgcatttccagactctaacagctcttcccgggaagcctgattagcattaggtgatgttactctcttgaattctcttttcaactgattcaaatcagatttatattcccttaatttagcaagaagtacagctttcacgctcggttgcaaacttcttgcttccaagtccattttccgaatctaacaaaaagacaaggatcaaaagctagatcaaaaaccgctcaaagctgagagaatcattaccaaaatgaaaaaaggcagaagccaagatcaccagaacatcggcatcatctataccagctttaacctcaacaaacttctgctgcttctgctctgcaagtcgtatttatcaattagaagaacaataaaaacaaagtgtgatcattactctaaccaaataaaaccctaattgcaaaaacttcaaccctttgttgacccaaaaactttacatcgaaatcgaacgaaattttcattaaaatatatatgtatataataaaaactaaaaaaatcattgaaacgctaaaagaagatatattgaatatgctattaccatgatcagaaagagcagcagctgaattacatttcctagaaagattagcggagagctcacaatactgacgctcgtaaccttcgaagacctcgctcatcttcagtgtacccaatctaaaaaagggactctttgattattcaattggcgtcagaaaatcccaattttgatttgccgtacggagaagatcggaaggagtaggatctgggacgatatgcgatctgtgactctgtgaggatgggtggatactggacagttggagaaggtaagggagaattggaactgacaaaactgtacggttgccaaatggatgaaatgagcgtccggttcgggtacttggattctattttaccaccaaaacggttcgggtacttggaaaaaaaagtacatataatacttaagtttaatacctatttaagtttaacttttagtggtattaatatttaagttatatttttaaaacttgcatatgcagctaagcgttaagtgttaagtcattattcatatatcatttttttattagtatatttaaaattataatacataaaaaaataaaaatttaataacttggactaatcaagtactattatatggtcattaacttgatatttaacggtcagtgaaagtttcaaaagtataatttaagtactattattttttaaaaattaaacttacgaatatatctctaaatgagagttaaacttaggcaccgcaaattacttctatttattcaatttttttaacaaatatttcgttaaattataataacaataggctaattagtaaattttcccctcgaactttgacatatactaaattattcccctgaaactttttggcagttaaaaatttctcttgaactattgagattgatagatttaaggacttttgtctaatttcattcaattttactgtttcagtgattgtttatgtactaaattatgctccccagactttgatatctaccaaatcatgcccatcaaactttgatatgtataaaatcatgccccctgaactttcatctatgttagaatttttttactaaaattagacaaaagtccttaaatttaa

SEQ ID NO: 297133 - DNA, 3861 bp, Cannabis indica
aaaaatatactcatatgtaaattataaatttcaacttcaatacaatcaaaattatcaactataaattttaaatttcaaattaaacaatgtaaaatataaactttaaatgtaatataacttaactattaaacaatttatttattatatatgactaattttaggaaaaaatatttaaatcggtctattcggtttattcgagttatttgagcgggttagaataatattcaacttgtccaatatattcattgggcagtatcaatttttcgtaaagttatttgggttatgttttttgttggtttattcagtttggtttgagcggtttactcaggttgaatggtttgtaatttttttaacagtcctatagtttacatcattaaaataaaatttaaatattttgttgcacaaatgtttatttttttcttatacacgtagtaagtatctgtttaaactattcggtaaatttgatacgcaagtatacacaatcaaaataagtaatataatgataaataaagtatcgttcccacgaggattgattatcaattccaattaattaattctttatatcatcaatggcaagaataatgacatctgttggaaatgaacctcatctacattgggttcccaatcttttgggtacacatcatcatcgttatcacaatgatattgaccttcatcccatgtcgactgtggtggttgtgttggctgtgatggttgcaatttgatccatgataagatccttcatctctttctgactactttgaaaggtagctttcatctcagtctgtccagctagaatcgtagattattgggtaccccaaccttctccaatctcttcactaaccccaggtagttggcgttattggctgcaggatttgaggtaggggcactatggctgatgtcaatggctctgttggattgtccagtggtgttggtggaatgatttttgcactctaaacatattcagccacctgttttgcttgggtttcgaaaacagtgaaatcctatgtaacaacttctatttcttctatctcatccgacccatctccaccgtggggacttcaccctcaaatttggtcttccaatagtccacctctcaatttcgagggtacaaaatttaatgaaccaccattagcaaaatgaagaataaaatcgcatagcctcgcacaataattgtaaaataggttgaaaggtaaactcgcacaataaaaatcgatacaacatcgtataaactcacaagaactcacaaaaatatacaatatctaaccaacaaattgcacgaaaattgcaagcatgtcactatatataaattgtaaaaacttacatataaatcacaaacatgtcgtttatcataaggtagaatcactaaaattgaattgtaaatcacaaacatgtcgcttaatatcataaaacatcttaaacatttgctaaataatgtcaaaacacatatagcagaatataattgacagaaagtgaaagattcacataaccttttctcaaacagctttgccacattatttttttaaggtcatgtttcgtaattgaatcgggagtgctctagttcaacatttgagggaatttgctccatttgcactagccctacttcttccccacatcttgcatgacctcaaacaccttatattgtagggctggtgcatactcgtacacattatactttgcttctagttgaatgacttttttctctttcttgaacttcttcttcttatccttcttactcgacaacttatccatgtagttttgcataaactgcaacatatttttagcagtggaagacaacaatttctaataagaaaagaggccccattgatagttgtagaagttatcttcattttcaactaacttaagcatatctgtccaaacacaccctcggaccaggagaataatacgctttcaacaaatgtacataaccccaaccttgtacacatcgtctgtaatatcattcttctcaaaagctagccaaagagttttaaagctcacccttttcttattgttaaaatggtcttgcggtattcaatcagaattgcattgaccattcaattcttctgtcgaggggtcacccctcatctttaggcatgtgatcaagaactctaacctcccgaatctggcctccgttttacccacgtaaaaccacacttcatcgtttttaacctcactcacctccttttcctcaataactattgatgcactattacccctaaaaaattcaaaaggagatgccttcaccttgttagtcaaaccatagacttcaaacttcaactttattttattaaagtacatgttgcctttgtatgtgatacaccttgaaaaaggctctgacaatggtagattcagctctagagccatctgcattttaaacacaaaaaaagatgagcgaaaaaataaatatcagtcgcacaaagtcaaacattaatggaccaaaaatcgcaaaacagaagtaaggaatcacaaaataatgtccaaaattgcttaaacatttggatattgtacacatcaaagtcgcaaactaagtcacaaacaagtcgcaaactaagtcacaaacatatctctcaattatcgctaaaaccctacacattgcaaatcactatagaaaacatatcaaaatcgcaaaacatgtcaaaacccagaaaactataattacttggcatatttaatcacaaataatcgcacaatattgcaaacaataaaacctatatattattacttggcataattaattgcacaatatcattcaattgtaaaacaatacaaaacccataaaaatgtcatatcccgaaactcatatccttccctaaatagaaaacagtataaatcaaaccattaatcacaaattttattggtttaaacgatgtattaatcacccaaaacaacaatttatggtgtattgaaaaaaataaacaaaaaaactaacctttaactggttctttcattatcagtggtggcaaatctccgatggtagcttgggtcgttgatttcacttctagttcaagtgggttcgacttcattgggggcttttcagttgaatggcttcggttcgcgtggaatgagtcgactctgtcggggattgagatggttgggttgatggtcggctccattaatgggtcgagtttttgaagagagagaacagagagattgagagaaagaggagagagaaggaagttagagagatagggagaattagaaatgagagggataattttggaacccaattgaaattaaagaatacctttcctatgattattatgtgagtttatttttattccatgtgttatagggctgaacatcgggagggttgaccagcttttgggttcgcgagttttgggcctaaaaaattgaacccaaacccgcccgttcaaaggatttgggtttgtagctttcgactcacaggttcgggttcactaggttggccgagtcaactggttgacacggtcatctcagtcaacattctttttgtttttattttttttatcactcaaattaaaaagaaaaccatttcaaatccaaagcagaaacgtaaatcaattaattcaaaactaaacaaatcagtagtcaaatctatgttcattgttcacgaaaatcatgaatgaacatgataataaaactaaaagtatcaaaataaaattgtgactaaaaatttaaaagtctatacttcatagtccatctatacatttcgtaatagttattgtccaccataatttatacatatgatatattcatatctataaaaataatccaaattaaaaaagtggttataaattaatgttcatatgatataagacataaatatttataaaataatagttatacactagtataataatacacatacatacaatagttctaaaa

SEQ ID NO: 297134 - DNA, 3456 bp, Cannabis indica
tattgttggcccctttaatttaatatgttaaattatggtgagcgcacaagtgaattttgtatacatgagtttgattgcttttcaagattaagtttatttatacatacatatttatatatataaatatataaatatgtaagcaggaaataggaatataaatttattaatcattgcaaacatagctgcctctcagtgatctatattcccttagtttttgttggaaaaattgttttacgtgcatactgcgtaatggtgaatttcttcatattgtgaaatatgccttagttaagagttaagactttgatttgattgtcattaagaggaagtgttacgtttctctcttttgaactctgtattcccaattgaacactttgtcgatctaatttgcatttatacctgatcgcacagatttattcctgtttttgttctgccagctatttgagaaactgaagacccttattggggtgaaacacaagatggaagaaggattttcttggactcttgttcgtcggtctagtgttggctcaagtacttttgtatgtgatagatttcaagaatgcaatgaagcacaaaaaattgaatgcaatggcaagatagctgttgcattgtctataatggacgaatgctttttgcctatggttgacaacagaagtgggatcaatctgattcataacattgtttataattttggtaggcatactttttgcttttagtttatctcaacatttcttcagaaatgtgtgtgtgtgtgtgtgcttaataatactaattaattttgtctcctgtacaggtctaactttaaccgcctgaattatagtggttttttaactgtaattctagagagaggtgatgagattgtctgcgtagcttcagttcggtatgtgatggcattatgctaatgagattgttattcttcaacagttagttgttggttaatgtctgggttagcttttgcatgatgagatagaattgtttggacaaatagctgaattgaatcatccctcttctccctctatgtaacaggatccacggaactgaattagcagaaatgccattcattgggacccgctatatgtatagacgccaaggaatgtgccgacggcttttatgtgcaattgaatcggtatgttctaacagtaaacatctttgctttatgtcaaaatacatatgaaaattttgatagttctcctttaagtttctataatgtagattttgcgaattcactgtactgctacattcagtttcagtttactgattgattacggtctcaattctttttagaaaagaaaataatgctgaattttataatgttggactgtaatttttctttttgtttgataatatgctatttgaaattgtaaatgcctggagtgatgtcttagtgtttcttccacgtatcggtttgtgattttcactaattttattaaccattgtcacgttattttctactgatttatttttgttcttctttatcaggtcctttgctctctaaatgttgagaagttggttctgcctgctatctcccaacttacagaaacatggacttccgtatttggttttaggccccttgagatatcacacaagaagaaaatgaaaaatatgaacctgttggttttcccaggcgtacagatgttacagaaaccactgttgaacattgacaatgcagaaaaaagttcaattattgctgaaggtagttattttatttttgtatttcacgtttgtcagccttcaagacatgttttatatcataatgatacttactgcaggtccaaggtccagtgaacctgggcaccataccaaggaggaagtgttgtgtaaaactgatgaaacaggcatcaaagggtgtgtttctaacatttctagtgaagcaaatcctggtgtgaatataaatgaaactgctagtgtatccggtttgcagcgtcttgatgtctgtttaaataatactgagaacaaatgtttgatcaagctttctgtggctcatgataatatggaaggtaaaatcataagctttgaagattcacatggtttgcctgaacagaccaaagagaccagtgactgtcaaaaggatttttgtggcccagagacttcagttcttgatcaaaaagtaaaggagttgggaaggcaatttagccagtggaatatttcgggagagaaaattgaatcgtctgttttactttgcactgaagttgatgcaactaaaactgggggatcttctctctgtgcctccagggatgataccgaatgtgttcattgtgaggcaaaagttgaggatcacactgttgcaaacaatcttgattcttatgataaggtttctacgcactgctctgctggaatcagtgcttctgaacttaatgaaaagattgttttgtctgagttggaagtttctgttgaaaatggttgccacgactcggactctaggactggagtaaagatatccagtgatgatatagatagctgtcatcatcctgaagaaaaaatacttaaatgtcatgtaaatgactgtgcagctgctcagcaaacatctgtaacagtagatgacaaacatatgacatctaatgcctgctctgtttcccaaaatactaacaaggtctctgctgatgcagttcacccaattttaagccaagaagcacaagacgatattaaggatagaatacctttgccagtggactctaattgtgacccttcttgtgcagcctctgttgacagtaattgcaaatcaaatgaggttatttccagttctcttggggtagtggtggatggtctccggcattgagatgtaagcttttctgccgaaacatatataactaatactatgctgataggaattaccaaccggaaggtcttggttaattgatgactcctcaaagcaatctatgcacagtttgatgatagtatttggagcaaaatctgactggctgttcactgtgcttctggtgcgttcaacttttcttttttggccatggttatgtggttataattgaatgaacaaggctaattgattttgttttaggtttttcacagtggttatgtaataacagaggtagatccttctaggtggtggtgttgacttgttaggaaacaactgagtttcattttggtccttaatattcaaaggatggcagtagcataagcagagtaatatttcttgtaggtatttagggaagaaggtacatagttgtttctttgttaatagctaagcctaaacggttttgtagcggcttgtactttcttttagcacaactgatacatattgctactagctgagagtcgcctatcggtttttgtatcgttaggcctctctcacattgtaaatataactattcatcggctaggaaaaaagcttttgcatttatggagcgtttaatctttattcatatttattagagtaatttgcggcaaaaccccctcaactatcaatttacttgcaaaaaaccatccaacctcatattttggtgg

SEQ ID NO: 297135 - DNA, 2287 bp, Cannabis indica
aaactacatcatagtagccacaaagagggctacatcctttaaataacccgttgattgcaccttagtgcgtctagcccaccccgctaaagcatctgcaatccaattcccaaactgaggaatatgggcaaaggtaaccaactcaaaacacttacaaaatttaatacaggaatcaaaaattgggtaagtgccccaagcaaaaggcaaagtaccactgctaagagccaacactgccaccttcgaatcagattgaatgtgaagctttgagatgttcctctatcgagcttttcagagagcaagaagaaagctagtaattccccttccaaaacagtcgagaccatagttaactcagttgccacccataaattatcttgggcttctccgttgacctccacaactgccaaaccagcttcgttacaagatatcgacgcatctatttggaagcagatacaatcatcctggacatgtgtctctgtatgtatgtcacctgtctcaacctcctctgaaacaacttgtcttaactccatctccttgcttcttgcattaatttccttagccatttcctcgacattgcagcagccttccttaaaaataactttgtttctccacttccagactaccttgcataaacatgccacataaacctttatttctttgtctttgagacttctccaccacatagcaaaatctagtattgtcttccactgcatacaatcactccgaatcccccaccaactctggaaccacaaggctctagtaacaaggcattgacaaaaaatatgtagagacgattccatactagagttgcataaaacacattggttctcctccttgcaagcaaaaccaatgcgatatttggttgggagaatgtcaaaccatgctttccataacaatagcttcagacgtgggtgtaaatcgaccttccaaagttcatcccaaaccctatttggctccttgaatatggacttctagcttacccaatatgcacatttcactgagaattttccagaatttgacgacttccaaaacagaacatcatttgtttctattagaggtctaatttgtagaattgatcttgccacttcttcctcaaagcaggccctgataatgtcctcattccacgcctttgttccatccaaaaacaaatctgagactttccaaaatgcatgtcttctgttatacttgaagcttaacttaatttcctcaatcgattttctcggaatccatggtctatcccacatctctatatcgtcattgccaattaaaaaccccgccccatcatgacagatcaatcgcgtagccaataagccctgccaacctcgcaaatctccaccatgtttttcaacgtcccaggcgtcaattgaatgacagtactttgataacataatatgcacgcaagccttgtcttccttctgcaaaatcatccagtactgttttgcaagtaatgcaagattcatgtcctgaaactttctcaaacccaagcctccacatctctttggttgacatatatcactccaacttttcatagcacagtatcgtttcttctcagtgtttcccacccactagaacctcgcaaccaccctatccatttcatcacattagtcttgggtaccttagccgtggatatatagtaattgggaatgctttggagcaccgatccaatcaaagtcgttctttctgcctgagacaagcatttagctttccatccctccaaacaggaaacaattttttccttgaggaaaaggaaatcctcacgtttccaagctgtgaaaaagaaaggattcccaaggtatttttctttggaattgagagtgttcattcctagcgttgcttttaaatcttccatgcgccttgtatgcgaatttggagagaaaatcattccactttacttttattgacttgttgtctcgaccacttctcatatttttacaaacattcgaggaaagccacaacattgtgttgagtggcatgacaaaagaaaatagcataatcagcgtaaaacaaatgagtaataggagacgcagtacgagagacttttaccccagtcaactcacccatggattctacacgtaatattagtttggacaacacttcactacaaagaataaatagaaacggcgactgcgggttgttagaattattttaccaggatctagattcactaccaagtatgttgttaacatcctaatatgaatttctaaaataatttaaataaacacatataaagtttaagaaaccttacattgattgcagcgaaatataatgactcattccgttcagatctctagcc

SEQ ID NO: 297136 - DNA, 3632 bp, Cannabis indica
ataataataataattagaaataaataaaacacttgggtttctgttgcaacttttatgattaaaatcacgttatgtatgtgatagggaccaaataagaaatatccaacttcttttacgtgtttgactcgatattttcgaccttaaacacattctttgtgacaatcaaatgcactatgaaaattttttaactttaaaaatagagatttagttatgccaattatgcttgttgcaaaattaaaatccaaccatacaactcccaatattgtttgatccttacatctacattaatgagatgagagaagaggtttccagaccaataatgattatacacaatcatagctggaaagtctcttaatatcacccacacatattaggtcttaaaataatagatattaatttctttccgtcctttctttcatttattagaaatccttttgagaatactttagagataaaatttacaatattaaatatcattaatcgagtacaagattcccaatacaagtatcaaaatgattggagtaccaaactcatcatggtggccgtatatgaataataatcactagacagaacaaacgcaacattgtttatgtataaacatagtaatgacaacatcgagtacagattcctttgacaaaatctgtgataaaaccttaattaaccaaagtagaaccatcttgttgtgtaaagggtattaaagttagttgtaacattatacattgacaaagccaaaaccagtatccatagtgagtaaagaagcataataaattcatttgcttctattctcatatttttaattttttttttctttttcaaaaccatatcattgcatatgattggttactcactggtagaatgccaaccttagaaacctatggatagttacattacagagttggaaagagcatgatcaagcatgtacaaattacaaattgaactgattagtaattaatatactaacgtgacaagcgtttttcttttcttctttttttttagcattgaattaacaacaataatactaattagagtaacaaattaataatacctctttagttgagtcagtcagctaggcatgtacaggtatggaagagctcatagatacacaacctttcaagcgttcaataatggcatttcggctgactaggctcgaatggtgagcaagaggaagaccctccttcacacactcatcatacttctccaaaaccgacacaatgtcactgaaatccggcctctttgaggggttcgcagcccaacaccgctttatcagatgagcaagagccggttgacaactagctggtagaggaggcctttcattctgtaatacataaacaatattcaatactcagttttaagcaaagtgttaattttttatataaacacaaatcacacaagtagagtagtgtgtactaacatacaattcaataacttttcaaattgagtgaagtatgataaagttgtgtcatacctaccaagaattaaaactctgtttttgtttttgttatatgttatctcaagtaagtttgagcaacatttagttacaataaacacatcttttttcgagatttggaaaaatagctatctgaccttctccgccacagcaaatgcagcctgcacaggggtcattccttgaaaaggcagcaaggccgttgtgagttcccatagcacaatcccaaaactataaacatcaacttttctggtgtaaggcttctccttaatcatttctggcgccatccaacggtatgttcccatgttacctttggtctcctgacactgtgtttctagacatgaagtaccaaaatctgccaccttaactctcatatcatcatttagaagtaaattatttgattttaagtccctgtggattacaccttgagagtgaaggtactccattcctcgagatatgtcaagagctaaccttagaattgtttctgttgagagtgaataaggctccttcttgttcaggtacatcctcagtgttccttgtgacatgtattctgtgataatacagtacacagggggttttctacaagctgcaataaactgcaatacgagacaaaaattaattaaaatggtcaatgaagaacaccacattcaagtttcacaaagcattccaaattctgacaatctttaattaccaatgcatattaacaataggaataaagtcaaaaacctgttttatttgttggttgattcctatttcaaacaaaacagagaagaatccaaaagaaaataaaaaaaaaagaacttcaatcagaattgtttagacttctaaatcttgattgtgtttgtttggttgtgtgagttaaaccaattaagaactaagtaggggggaaacaatgtgagtggggtaactatgtctaatatgtgatgatcaaaattagccccttgcgatagagacaccaaaatataataatgggactaatcagcaaacatttacaatcaaacagttatacagtgtgcaaacaaaatcttatttgtatgtcatatataataaaaaaaaatatttttgttgtttgcccactaacgtaagtgggaaaataatcaaggaagcactagttaaaatttggaaagaatccaaaagggttacctgcactatgtttggatgaaagagacgtgagaggaaggcgacctcagacttaaattgctgctcaagtaaggttcttgtttcctcattctggtttggaatccttaccattttcacagcaacggctctctgcttgtaaattcctcgatagattctactatgggctcctgaagcgaatttgttaccaatgaagagttgggaaagatcagcagtccactcctcctcttggtcctcctttgatggctcccaagtttctacattttctgaatccaatatcatggaccatgactctaagctgtcaaatctctttctctccaaagtctccatatctgaacttgcttgggtttttgaggaggaagggactggtaaaggtttgctctttgactttctaatacggagtgcatgaaaacacgaggacgccattacagcttgctctcttcaaaggccaaaaggatatggaagggaatcttataataatattatcaaaaaccaaacaatcaaaaggaaccctccttctgaatgtgtgaatcgatttcaggaagtgcatgaactgattcaaaaacatgagttccgaagaagaatggaaaagaaatatggggtttcatgaatttaacgaaacagacgctgaacctgattaaacccatcgagagttaggtgaaagaagagccaaactaacattttctcatgtcataatacatataattaagaagcagaacagcccttttgagtatcaaagcagaagaaaccagttagtgatgaagaacaacttcatgacgaatagaagaaaactcatgcagatggagatcatggtttcgtgaaacgagggaggcaaaacgaaggaacagaatccatggaaatccagagtttcttgaataaagggagcagaagagagagttttttcagggctggtgtttctgataggatcaggaggattaggttgtttggcagtagaaaaagatgaactcaaaggaaagagatttcaggagaggctcgtgattgctcggttcaaaaaggcaaaaccttttttacgagagagagagagagagag

SEQ ID NO: 297137 - DNA, 5828 bp, Cannabis indica
aatactaaagtaaaaaaaaaaaaaaaaaaaaaaagaaaaataagttctttggagcaagttcctgtattaggaaaaagaaaaattaaataatcatattctcgctttctttaattgtttccaattatttttgttttccttttatttatttattttaaaaagcttcatttttattgttttgattcatcttcaattcatttaaatctccaattcaaaatttaaaatttgtgttaaatttaaccaaaaaaagaaattgtattatatttcacccactatttaggctatttacaagttgtgttcttatatataaaacataaaataaataaataaataaaattaattattattgatagtcatttaatattttttttaagatgaaaatagataaattttattagaaagccaaatctacaattacaagagatttaagagcaggaaaagtactctcaaaaaaattacgatcagactaagaacaagagccacgagtcaagcagtgtgcgaccttgttagtagattgtttgacatgataaatagtaacattattgaaagaagataataaaagtttgcactcttacacaataataccaaagatagaaggcatatccactaagctatgcgaagcttgaatagcaataatgcaatcagtctcaataacaattttcgaaagattagaggcatttatccaactcaaatgctcattatatcagtgatgggagcacttgaggaaccaattgagtgggtcgaaaaagccaagatgacaacctcatttgagtcacaagcaatgaaaccaatcccaaatgcattttcagcttcaaaagttgctccatccacattaatcttgatcattccctcaataggtttagtccaagaattcttgttgccaccacaatcagtgttaaagtgcagcggctcaaaacgacatgtttgagcatatttccattgaccaagaacttgatgtgcaatagacacagcttcagcagtcgaacgtgtacagttgttccaaaccagctcattgcgagctttctaaatagaccagttgaccatcaaaatctcttcaatagcatcacccttgtgccgagaccacgttgcaacaaactagacgtggaaatcagcaacagtcgatgaaggcagagccacgactgatctgttccagcaagatttggaaaaaggacagtcaataagcaggtggtaagtggtttcagcaactccattgcataacaaacaatgagattcaacggaaacatgcttgctttgtagctgaacacaagtcgccaagcaaagtgaatgaattttggcagtaattttaatttccaaaagtgcttctacatatctgaaccatcatcaacagaccagctacctttcaccacttgaatatgtttataaacgctttttactgagtaaaaaccaataggttccttagactagtaccagatatgaccttgataaagctcactaagaaggatgctcatggtgagctgggcatcccaagaattgaaaatatcatggacaacatcaatgtcccattctctaatgttgatcttcatgagctgatatactttgctatgaaataaactagggtgagtagaagtgacacaaggatgttttcagatgggagccaaggcgtattgaggatatttgtattgaagcttgaaccaatacgaatcttggcttttgccttaaccagatcctgggactcgaagatgcttttccatatgaaactaggtttgctcctaagagaagccgatagaaaatcaccatgaggatagtatcgagtcttataaacacaaccaataagagattgctcattgagaaggagacgccaaccttgtttaccaagaagctacaaattatagtcatgaagactacgaaaccccattccacctacatctttatgtttagtaaggcgcttccaactcgtccaaccaattccacaggtgtttttggaagaagtgctctaccaatactttgacataataccctccaacttagaacatgtctccataggcaatagaataatagtcattgcataactaggcagagcttgagcaacggttttcaataacactttgcgacctgctttagacaggagtctgccttcccaactctgaattcttttctgcattttttccttgagaaagcccaagattgcatttttatttcttcccatcgtataaggaaggcctaggttagtacaattttcatcagcaatctccatttgaagcaaataacatattttattcttcaccgtatcagtggtgttggtactaaaaaatatagaggacttactaaaattgacttgttgccctgaagccatctcaaacaactgaagaagtctcattatattggacgcctccctttcattagcacgatagcatatataattatcatcagcaaatagcatatgtgagataacgggagctccattggccactttacaaccttttggatgaccaagactctcaaattgcttcaacaaagatgagaacccttctgcacaaattaaacatagatagggagacaaaggatccccttggcagatacctcagtgtgggataatcgggccaaaaatcttaccaccatgaaccacattatacaccacggttgtgactgtttgtagaatcaattcaacaaagtaacttgcaaatcccatacgaagcatcatggcacgaatagtgtcttgttcaattcgatcatatgctttacttaagtcgagtttcagcgccataaagccctctttgcctttgctcttttaaggtagtacataacctcaaaagcaatcatgatattatcggagataagacaacccgagataaaagccaattgattttcagagataatgtgaggaagcaccacctttagcctatttgcgagcactttattaataactttatagagcacattacaaagtgagattaggcggagatcactcattgtaataggttgcttcttcttaggaatgagcacaatgttggtacgattcaaaccagcaggaacagagtagttagcaaagaaactcttgacctgattaataacatattgcccagtaattgaccaatacttctgatagaatcccaatgtcataccatccggacctggtgacttgtcgggatgcatttgaaataaagctttcttaacttcttcatcagtatttgggcagtggaaagattcattttcagcaacattgatagaaggttcaatgcccataacaacctcattgcaactagtgtttgaagaagaaaataaggtctgaaaataattcacaattacaacagcaagacacaaatcccaatttacccaagtacctgagttatcttgaagactttgtatgttattatgtttactccgtgctgtcgctttggcatgaaagaactttctattttggtcaccctggcgaagccaaagttgtttagacctttagcgctaaaagacttcacgttgattcatattttcacttaacagcttctcaacatcacaaaacttttgtattgaaacttcatcaagacctttcttccaccttcttatttcttttttacaatttgtaattcgttccttgaagttacccgtgtaatcacgaccccagacagtcatctttttgccacaaatacgaagtctttccatgatattgtagtcggcatgaagctcccaaatatccttaaccacctggaagcataaaggctcacgaaccatgcgttctcaaacttgaaatggcaaacaaggacaaagaaattttggacagtagggtgaagatgtaatgggcagtggttcgaggcagaaatttcaaggttaagaagctgagcagatgtgaaataatcagaccagcaatgactcaccaaggcacgatcgagacgtacttcaatccaatttgatgtaccccgtcctcgctcccatgtaaacggatagccaagaagaaaaagatcaacaaggttacaatcgataagtgtttgattaaagccatcatttaacgcctaaggatagttgttacctcctcacatatctgcttaactagtcacattgttcaagtcccctatgatacacaaggggagagccgaagactgtttcagatttcgaatgagattccaagtttgttggcgttgacctctgttgggctcaccataaaggcccgttagtctccacaggatagagctaggcttagtaacttggatgacaatgaaattaaaagaaaattgtagtagttgggcctttgcactgttcctccaaaacatggcaatacccctactatgacccctgacatccatagaatacaagccctcaaagcccaacttcacacgaagcctttctagcacatcaccatgacttagagtttcacaaagaaataagacattgggtttcttctggatcacaagatccacaaggaattgaaaaaacccatgggttctcaaacccacgacaattctagcttaatatactcatggtaagcggtgggcttgagtaccagaacctaccaataaattgttttttgagcccaacacagagctggtgtcatgcctaatagaaacagtaccatcttcttccatcactttaaatataggcccacgataattagatggtcgtaattcagattgaactgaatcaataggcccaatcacaatcccaaacttagtatggcgtcgtttaggatcaagaatcaaatagtcctctagttcctcctctaatatatccacgtggatagcttcttcagagttgaaaaactccccacctatatttcccacaatttcctcagcccccataactccctttgacttactattattagcttgatactgaattgaagcaccccaatttctcgcactcaattgctcaatcataggacgttgattggtagactttttccttttcacactgccagttgaccaaccaaaaggcaacgaatcatcttcttcaccatttctcagccactggcttccgatgagatggtgtcgacgacgaggttgggcccttatccagatgccataaggttggaaaatttgatccgtgggagtattgaaccgctgtggacataacttctcagagtgactaagaatctcgaatataaaataaaatgtgggaaggtactcatatttaaacatggcccataaaccctcatctcctgtggtgcatcgtagcttcattctacgcttcaatggagtagtaacatccaaggcaacacgtacacgtaaataatctctccatatacctcggaagttcttaggatcagactcgacaaacgcacctatgtagttaccagccctttgaataactaatttcgatttgaagccatattgaaggccataaacttgaacccatatatcaagaatcttaatagtcactgaccgtggataatctcttggctttagacgtgcaaagatgaactgtatatggttgaaagtccatagactcccttctatgacatgttccagattaagttcatgataaaattagaataagaaacggtttggctctaattgctttacatacatacctctacccggatgccataaagaggccatcatacggcgcattacatcataatcaatcgcattggcaatgagaaaatgcccaacaatacacagttggacatcagcaacttggacctcaggatccccaacgtcaaacatagagacaacatcatcctccccttcaatttctttattagcacaggggttctctaaatccttgacagaataaatacttgatgccatattcaatagaaaaacactaagaacagaaagaattagagaagatttctcaccatgtcaaacgacaagactatgtttggttattttttttttgtttttcataaatgcatattcaagtaataataataataataa

SEQ ID NO: 297138 - DNA, 6960 bp, Cannabis indica
agatatagtaatataaaaaattcaaaaaaaaatgtttataattattattattattaagcatccttagcaattgccacctttgaccacctcattgcgtatatgatataaatacataacataacataggtaatgcttgttaatttctttgtttgttacattttcataagatatattaataggaaatcatcccaattacaaaacaataaataaagacaaatatgacatgtatgttgtttcccatagttgaagaaatgggacaaggaaactatttccatttaaatcataaattggattagaatagcaacacgacacatttagtttacaaaaagagagagagtatgtgtgtatataatatgcatacgtaatgtatattattattattattattatttattatttaaataaataaatgaagttccatatcccaactcccgaggtttttgttagttgggtttggttttggactcaccgctcccttacatcacattatctcaattcataatactcatctatacgacgccgtttcatttatataattaataatatctaattaatctacattataaatatttaaatttaactctccattatatataaatacttaaatttaatttttaaaataataatacttaaatcgtatttttataacttttgtaaatagttaaccgttaaacgtaatgtaaatagtcaagtgatagttaatttgtttaaattattaaatttaataatacataaataatgacttaacacgataaaattactctaagatgtgtttagaaataacaatacccattaccgcgacgtttcattcatacaactattttttttaagaattaaaattttttcttaccaaactttaatatataataaattatattttctgaattttttagagcgttaaaaattttgcttgaactattaatattattgtatttaagaattttttattcaattttattaacaaaaatatgacacatattaaaattttgggacacgatgcgatatatgtcaaaattcgaaagacataattcaataaatatcaaaatttaaaggatgatttaatacataacttttattgtattaataaaattaagtaaagcttaataattatttttaaattcaataatcttaaaattcaggaaaaattttaatggctgaaaaaaaaattaggagcataatttaataagggaaaaaaatcttaattatcttttttttaaactattctcttctctttgttttgtatctctctctcattaataatcatctatacgacaccgtttgattcatataaactatattttaacactcttctgtttgtctatctctccttaatataatctctattcttcttcttcttcttcttcttcttcttctccaatctccatggccatctctctctcctattgatctgatcctcaacctcaaccctaaactcctctcccctcttctctccgcacaatcaaggtttaacctcttcttcttcttatttctacgattacgatttgtcgaacctactttcctactgattattgatatagattgatgtcaatttgttttctcgcattaatttgattcccagtaaaacactcatcttttcactgtatacgcatttaatctcgattcatactgctctctcaagctattcaattttaaattatatatatgtttatgcaattgagataatagcttcttctttttttggcactgaaactgaaataacaggaacccctctgactggttgattctccttatttactgtttcgggtggtgagcggttgcttttccaaccatgccttctctgcaattattgcagttaacggagcatggtcggggatttttggcttcaaggaggtgaatttagattacctttctttctcattagtgttatcgttaatagcttgtcttgtgtttgtttttggttagattattgagtttcttgtgttgtaggaaaactttattactagctactggcattgtctttgctggtggtgctgctgcttatgtgcaatcaaggtatagctctagaaaacatgattctttgggtcgctacaatggtctccaaacgaattcagaggataaagctgtcaagagaaatactgataaaaaagggggacttaagtcactcaaagtactggctgcaattctattgtcaagaatgggccacatgggtgctagagatcttttatctttagttgcaatagtggtaacttttcttttctctgtcctctcaatatttgaaattcataataatttaatgatgtaattgttattttaaagcctttttttgggtatatcttcgagaaaatcattagtttgcagtagttgaattcacttctcgtcgtatatttacacacactagttctaagtaatcttaaaattataggttctgaaggtatcattgatgtgggttgggagaggagggtcttatgtattttaacaatagtttttttaaaagaaaaaaaactgcatgttaggtatcattgataggtcatatagaacatatagaagactggtcctgtgataggagaagcattcttggcctctcttctgatgtttacttgtgtactatttgcaggcgttgcgtactgctttgagcaatagactagcaaaagttcaagggtttctatttcgtgcggctttccttcgacgtgtgccattattttttcggctgatctctgagaatattttgttatgttttcttctttcatccatgcattctacttcaaagtatataacagggaccttaagcctgcggttcagaaatattttgacaaaacttatccattctcattactttgaggtagttatggttattataatttattaggctgacatagtgaagaacaatttactattgatgtctgctcttaaatacattcatcggaatgatctttgaatcgcctttgcaatttatctatcgatctttgtttgggtttcagaacatggcatattacaaattatcacatgtagatggccgaataacaaatccagaacaaagaattgctagtgacgtaccgaggttttgttcagagttgagtgaaattgtacaagacgatttaattgcagtcactgatggtgtgctttatacgtggcgcttgtgttcgtatgcaagcccaaaatatgtcttttggattttggtaattttctttcttccaaagtcataaacgttattagtctttcataggctttatacgtttatttatctgcaaatcttttgttaaagctatctgggtaatgcttgattaatgttttgtttcaggcatatgtactaggtgcaggcacactgataagaaacttctctcctgcttttggaaaattaatgtccaaagagcaacagttggaaggagaatatcgacagctgcattcaaggttaaggacccatgcagaaagtattgcattttatgggggagagagtagagaagaatctcacattaagcagaaatttcaatcattagttaggcatatgagagtagttcttcatgaacattggtggtttggaatgattcaggactttttacttaagtatcttggtgctactgttgccgttatcctgattattgagcccttctttgcgggcgatttgaggcctgacacatcaacattagggcgtgcagagatgttaagcaatcttagatatcacactagcgttataatttcactattccagtctcttggaacactttctataagtgcaagaaaacttaatcgtctcaggtaaatattttttattccatttatatgcaagcttattgtttacacccattgaaaaggtgggggtctgcttgtatggttaaccaattatgacatactcatattttctttatttcagtggttatgcagaccgtatccacgagttattggccatttcaagggaactaagtattggtaatgataaatctctgacgaaaatatctcagagtagaaattactttagtgaagctaacttcattgagtttgatggtgtcagggtatgtatgctctaataacttttcacatgttaatggtatatcgttttgtattcaacattctgattgcagtgggatattccaggttgttactcctactggcaataccttggtggataatttgacacttaaagttgaaacgggatctaatcttcttattacaggtagggttatttgtgaaagagtatttgtctgatcctataacttttctttgtttttttttacggctagcagttagtttacctcagtaagtacacattattttgcattctgagaatatgcaatgaaaagtggcgattgctttgatgtgtggttttgtggcactatcttggaccactatttaaattaccattgcaaagtattgaatgtggcatagtatgtaaaaagtaggcagcttatttatgataaaaaatgttctttttgcaaaaatattgctcaaaaatagttagtgtgtctctttaaattgaaaataaaagatctttttagcaaatcttaaaattacttgtgataaaaaattagttgagtggttgaatatgacgttcgtttgtgcatgatggatgaatttagcacatgcagaaatctgaagttcttatcagggatattgttgatgtgcccagtgcttttatgtttggtgcttgctagatgtgtttctctgattttctttcccgttaagtactaaaaatataattttaaactacctgattagcgtgtgatacatttgacacttcaattttataatcatgttgaaggtccaaatggtagtggaaagagctcactgttccgagttctaggaggtctgtggcccctagtatctggtcacatatcaaaacctggggttggttctgatctcaataaagagatattttatgtgccacaaagaccgtatacagctgtaggaacgcttcgcgaccagttaatttatcctcttactgtggatgaggaggttgaaccgctcactcgtgatggaatggtggagctattaagaaatgtaattctctcattttattgtttttcgtctttgtttgtttaaaaagaacatgatttgtatccgcgtttgctggatacaaaatacttctaaatttatttatttaacctcgactttatttactctgacataattattggctgatgactattgctatctcaaggttgacctagagtatctgttagatcgttatccacctgaagaggagataaattggggtgatgaactttcactcggagagcaacaaagattggggatggccagactattctatcataaacctaaatttgcaattcttgatgagtgcacaagtgctgtgacaactgatatggaggaacgcttttgtgctaaggttagagcaatgggaacatcatgcattaccatctctcatcgtccagctctagttgcatttcatgacgtggtcttgtcattggatggtgaaggaggctggagtgttcactacaaaaggtttgaattgagttgttctgttgttgtatttgctatatgaatagttggttataggtgttacttttaggagtatgtcctttttcatattaagcttttatgacaacttcagggaggattcttcagtccatgaggaggatggaattaatacactgaattcttctgagtcacatcgtcaaaacgatgctatggtagttaaacgagcatttgcctcaagtggaaaggtatatatttttttttatagaaaaagtgtatacaacctgagtaggttaatttcacctggtgatgtggcttaaggtcttgggagcccagatattgtttgctgcttataacaatttcatcttacttgagaggtctaatggcctatgggaaaaatgcatatgaaaataaagaagcccttgtgatgaatagcaaggctcaaaatattctaaattttaaaaataaaataggaatttataatagaaatcgaatagcaaggtttctgtttttttcctctcttgatttactccacacttatctcaagtataatttgtttaggattctgcattctcaaattcaaagcaacaatcttacattgctgaggtcatagctacttctccctctgcggatcatgctgtttctttgccagtttttccacaactccgtggagcaccaaggatgctgccattgagagtatttgccatgttcagagtactggtgagattttaattttgattactgatacactagtgatcgattcttctcatttattgttccacagtttgcatggtgccttcatctatgttttatgtctagtgttggttttaaaaatctgatgatttgtgtgcctacatcctagtctactttgtcatcatagccatactgctttttaatgggtgtttttaagttctgagttgctttggaggatgaggatattccattcttggaacaagacatttcttctattcttccattcacagtatatatacttggaactgagtttaataaccttttacctgtgtcttttcagattcccacagtgtttgataaacaaggagcacaattacttgcagttgctttgctagttgtatcaagaacattgatttctgatcgtattgcctcattaaatggtatttattttctccttatcaattcttttaaaatggaggacaaggctgttattgaagtgtatcaatttatacaggaaccactgtgaaatacgttctggagcaggataaggcagcctttgttcgtttaattggtgttagtgtgcttcagagtgcagcatcttcattcattgcaccttctttgaggtataccacgtttttggttaccattaatggaatggatatttgttgggactttttttgtttctaaactggtaaacaactacagcgtggtcaatagagaagtttttgggggtgggataatctgttttaagatgcaagcttttgcatgttggatcactgaatattaaggcatttcatgtttactataattttagatagatacaacctctaagaaaaataaggaaagagtagaggagaacatatatatatatatata

SEQ ID NO: 297139 - DNA, 5285 bp, Cannabis indica
ttttttgaaaacatttagtaaaaaaaatagtatttttgtaagtttcccaaataaaatcatgtaattttttgtttcttattactagaaacattgggctgagattaatgggttaataaatgggcagcagtgagtgggctttctgtagatccatacttatcagccacgtaatggttaacagactagcgtatgactagtactattaacataacatggacttaatcaacccaaacaaacaaacactataaatcaactcacttctaattactatacaaaacaaaatactaccaaacttaaataataataataataataacaaaaaagaaaaatgagtgatcatggaacaattccatctcattcctccaaccctcttctctctaggttggatcgtttagatttcattgtgagtataattaattaacatatctttctttaaatattatttgtaatggaattaatttgatgatttattttctttttatgtattatagatgaaatatttggaaaggaagacaaagtttattgaaggatccaataatattattataaaaaataataatgttaaaagtggttataataattataattgtggaagagtattaatggaggagatggcattaaagaaaactgatcatcatcatcatgatcattatgatgagcttaagaagggctctaataataatttgtgtttgattgatcgtgttgcatcacttgagaccaggcttattcaggttcacctatatatcttttctcttcatcacttattattatcatatgtatacaattcttttctatatatatacacaaatatataatattggaattaaaagaagttgaaaaatgttaaacatgttttttcaagtttcattattttctctcttaattaattttgtcaaactagttgtttcataaaaaaaaaattatactagactagttatgttatatatctatatgtacgtgtcacctgtttgtattatctttcatgaattttgttgtaataatatgcaatgtataatatttatttattacgttattacatacatatatattattcttgtatatatatattattgaagaattaatttaaattttactattaatatttttattttcattcaacaataatttatttttattttgtatttatatctatattttgtattcaaaagctcaatatatatacaatacatatatataaataaatatgagcattcttataatattactaatgatataacttataaaataaagccactaaagttagcttagtggtgaggtagagatggaaaaaaaagaagagatcatgtcccttacttgtcttttaggaaactaaccttacacttgcgataccattgctaccattgctaatgatatataaaaggagaattactttatatatattattttttaacttttttttttagaaaaaatttacggtttgtgtttctaaactggttgtagcgttagttgcaataggagtttctatacgatttttttttacaatttaagttgcagcgctagttgggtttagaatttcataaaatacaaaaaaaaaaaaactattttaaagtataaaaataaaaaagtccctatataaaaactcttctccaaataaaagaaaataatgtatgagtcacctaggcacatatgaatctcaagtttgtctaaaaggaagaaattagcacacgcaatctcctctttctctctatatcaaaaaattaaatagttaatatatattttttttataataattattaaaattaaaatatgtgagatgtatatcatgttaaattatcaaaatgacaatataacatgaatattaattattttacgtgcataaatatatattaatattatcagctatgcatggaaatggatgaatcaagtagtagtaagtcacacagttcttcatcaagtggtgttattaggcataatcaatgcagaggagaatcatccaattcatcatcttcttcttcttcctcactcccaactttcaacttaaaacccaactatcaacccaatattgcaagattatccaaactcaccactactactactcatgaaattgaggtaattattaattatatattaatactatatatatatattcatatatgtgagccttattaattaattactaatttggcacaatattagagtgtgtaacacaaaaatgtatcgatgctaattaaaggcacttatttttttaaaatagtatttaatgtagttagccctttgcaattttttttaatgtacaatgctcaaatcagagtttaaattaatagtttatttttcatgtgtgtataataatatatagtttaaccacttgaggctagctcaagtgaccataagtggggtgtgtgagtattggaggttctgggttcgagtcccaaattaaacatgttgtaatatataaacgcttaaataaataaaataataatatatagtttatttttaacatagtatttttaattattcaaataaataatttaacgtggactaataaaaaatttccatatatgtcgatagatttatttagtatttaacagttaaaaattaatgaaaaaatagaaacccaaatagaactgacgttcgaaggttttaccctccaaaatttcaatatctagagttgattctacaaaactttacaattcaaataatttagctgtaaattaccctttgataaattatttgaaccctatttcatatgccataaattaattaactaaaatttcttaaaaacttgcatacaactagccttttatagctattaatagaatgaatatggtcataaaaacatttggaaaaaattatactacaagtgactcaattagagtcgtaccccactaaattaataaataaatttacattatataataataatgataatacttttttttttataaaaaaaaaatataacaaagaatgtagtagctagtaaaaaaaatatggttgacaaatttatgtttgaccacttaaccctatcaagtggcaacaaagagaattaattttatttgctaatataaaacattcccaaaaattactgggcacaaaaaattcctttggagatatcgaacatataatatatacttaattttcttattaaacctatatatttgtgctcaaatacttttttaatgatatatatagtggaagatgaagatatatgtgtgtatgtatttttttgtatttgtttctgaattaatgtttttaggaaggaatagagagagataataaaaatattaataattaaactaattaattttggttaattagggtcacaacaaattattctcttcatgccactaactagggtttcagataaatgcaattcacatcagtgtctacttggaaaaagctttttgcttttgcaaattccatacatatcacatttatataatttaatttatatttaaaaagctaattaattaattaattaaccttattaataaataaagagtggacatgatgtccttttggaatattaattgaatcacttatatttatttatttaattttgttttatttggcaggaaaattgtgaaagtgatgaagaagaacacaaccatccaagtccactacttcaggagcaaaaacttattaataataataagaagaaaaatattaataataaacaaaagaaattagatgagaactcttgcaaaaaagagaagaagaaaaccccacctacttggccactctctaatctattaggctgctaattaattcatttatatatctatatgcatgcagtactactctttattaatattatatatatttaactctatattcgttgtattcttgttcttcctaataagaaaggactaattaattaattagaattcttaaaattatcactatatatggtggttctcttatattattttaattaataattaatattcattacataattaatatatatctatattagatatatatatatatctttaattccatactactatatatatagtaagattttaaaataacctgtttacgtgtatataaaacaagttttaaaactttattcaaaaataatacctaagatttttatatagtaaattttctttcacctaagtaaagcccttagccaataatcttactttgaaccgtatttgttcattctcattgattgattctctctttcacctcgagaatccatttacactccacaatctttttattctttagttttggtacaactacacaagtcttgctctttcggaacgaaccaatttcttcattcatggcctggagttattttgacttatttccatctaaaattgcctcttcgtagctttcaggctcttcgatattagttggttatactactatcattgcaaacacaatcaggtccgcctcaacaaatcttttcggagggtgaatctctcttctagttctatcacgtgccaacagataaccttccagaccttcctatctggaacctctgtttggtcttctaatcttctggctcaacatcagcttccgtctgcgcattatgttctagttccataatagcttccggttgcgaactctcttccagatgtttcgttccgtattccatttctatgagtgtagtgttattgtttcctgattttcttgcatcacacggagacacacgacattttccaactgtcagtgaggatattctaattaatttattgaaaactacatttctagaaattactacatttgatctaccctatttggaaatacatattctataacccatggtacctaaggcataacctagatagtttctttaactgatttaggttccaatttgtcgatagattggtgtacataaaatgtacacccaaagattcttgaatgtattagatttggggttctattgtaccatattttataaggggttttcaagcttataactcattttgggcttatatttataaggtcagttgcagtagctagatatttccctcaaaatagtttttctaatccaaaattgaacatcatgcatttaactttattcaatagggttcggttcatcctttcagcaacaccattttgctctgggattttcactacggttccatgtctagtaatcccacattcttgacacaattgtcaaatttagagttaataaactcaaaccaattatcagtcctaagtagggctgtacatcggtcggtttgggcggtttatcctatatattttctaacccaatctaaagttcgggttgctaaaatttaagtgcaacccgcccaatttaaaaaaaaaattctataaaccgaccaacggtttgggcggtttggtcgggt

SEQ ID NO: 297140 - DNA, 2769 bp, Cannabis indica
tctcgactacactcagaagtcggatgctgacgcagcaagataccacaccgaagaagttaccggggaaactttcgacgtaaaaattccggggccgtatcctttactatcaatgcttgattcctgaccaaaacagattagatattctgattgtatcaagatacaattgaaatcaataaggaaaaggcaataatcaaagtttccctaaaaaagacaactttccaaaagagaatttcttctcttttaattaagaagttttcaacaaaggaaagttcagttgaaagtgtaacttttctaacaaggaaaagggcaactaaaaaccgaatttataaggtaagaatccgaaaatgaatgcacaacaatcttaccataaaaggaaaaattattttgtcaactaacttgccaaaagaggactttacaaaatataagaaagaatacgatatgtatataaataaattattaataattataaattataagattagagagtttgcatatttattaaattcttttcttcttgtaaacaaaaataattttattgagactttatttgatttagttgagatatgttcacaactgatgacacaactaatttgtttgaagcttttgattcctccttaaaaaaaaaaaagcaccatatatcatttcttttctttatattgcatgcaacctcggaccatttggggatacgagagatatagaataagttgagagagaatttgtgagggctatataaatagctaaagttacatatttaaaaatatatagtattagaatgaatataatattttacaaagaaaatataataaataattatgagatattaagtaaaaaaaaaaaaacacaacaataaattaataatggaagaagcatttatttgtattgtatattaattaaatgtcataatatatattctatatctgaatgagataaattaaaataacatatacatgattgatacaaatacaaataaacctaaatagaacatatattaatacaagcctaaatgtaaatgatgatatatatatatatataaatattgtcaattaattaacacatattgttatggttagaaattcttctagccattgcagaatcacacaaagaagatgaaagaaagaagtgaaagctcgattgaaagattgttattcatagcacgagagaaaactacaactggtttatatatatatacaccagagaacaaggcaaaggccaactagaataacaaacaacagaaagttgttagaaactaaaaacagttacaactaactgtcttgacacatatgctgtgctcattcttattcttttgtgcttttctattcctcctgtaacatcgaaaaattcgttgagtagatatagctgcaaaagatttcatgtcctgatcattagaattagttgagttgtgtttatgaaacttgtgccaacaacttgaaagtacatgtttcaagtcaattgccattaaagcaaagccttcaacttttgtatgggatttgagattaacactagagattggaaggtccttataataggatgatgatgattccaagtttaattgccattctatgagttcatttccaaaaaaatcacctttttgaagaccatctatgggacaagtactacttccaaatgtccacacaacaccttgtgttatcaacacatcatatcgagtggctctccttttcgaatgatataacttttctctaaatatgtcactggcttcaaatatttgcaaattgtttcatagacgtagtcatccatgttttgaagcaatgaaacctaaaaatacaataaataaaaaactttatatatttcatatggcaatgtatatcgtaattatacaagaatatatggttactaatttttgagaagttttgaataaattgttatatttctgatgggtgaaatttgaaggtctgcatgtactataactatacatttacattcttatcaaaacttttacttataattttttcaaatatagaaaaatatataaaatggactaaaacatgtatgcaatagaagattattatttattaccttttttaatatagggaaacacatgtgtttcttgattaacattcccaatgagaaaggaagtacatacaaaaggttgacaatatcaacatcttgtccttcttcaaatctcaattcaatgaatttcttaatctttggtgtttcatccagcttagaaatttcattttttgatatccacaactctgccttttcttctattgtattcctctcatattttttgacacccaatattttgttcacccaagctgcaaactataaattaatattcaaaatgatcaatactatagtaaagtatatataatcacaacaaaaagaaattaattatgtttactgacaactttttagtcataacatatatttattacgattaaatatgaattttagtcacaacaaaaaattatttgtaacttaatatttagatacatagtatcactaatttaattttactcacaataactattgtgactaaaaatacatttaatcacggaccttttagtcacaacatataaaaataacaatttataattaattacaattttttcatgacttttaattataaattttgttgtgactaaaattaaaactttttgtaatgaatagatcatagaactaaaaattattgtctagtatagctactatataaatatatatatacatatatatatactagggaacaaaaccgcgcttcgcgcggttgtctaatttttgtaatatttttatattttgattatttttttt

SEQ ID NO: 297141 - DNA, 6694 bp, Cannabis indica
aattactaattagcgttttttttagccactacaaaatgggcttttcttgttagttaacacaatagtcaaagtttggaaccgaaaaaaaaaatgttagcgagcgaatttacataccataagggttagaagatgatgatgaagatcgagtttgaatgtttgatgaataaagagagcactttgaagaattaatgaaggtagagagagaaagagagatcgggtgggatggagagtgagtgtttgtgtctgataattttgtgattatggaaaacacaaaatattgtgtaattgttggcctttttttctcaaaggttaggatgacacctcactaatgaggtgtctcaactttgatttagtatgcatgcatgcaaccagctttccttcccaaatgactaatttgtcccttaaagttaccctcctttccttaataattattttttttttaattttaccttaacttttgatttatgcaaaaaaaaatgccataattttatcttttttttaataaaagcaaatttagattaaaactaaaaattagacctcatgatcattacataaaatgttatctggaatctcgataaagtcgaccatcccagttacattcctggcaaaagtccacttagccatattatgggccgtaaaattacattgtctagaaatagaaataaaattacagctaatcaaagagatttgagaattgttcacattgaaccccatagttatcgatgctccaataggagtaaattcccttcagcatattgataaccttcttggagtcactctcaatcatcacaaaatagcacttcttcgagacaactaattccacaactaacagacatgccatcgcttctccaattagagggtcagagaagttgagaactttggaagtcgcccagaatactgtgtccttatgatccctagccaaagtcaccacgcacatcaaattgcagccaactttcacatcatagttaattttgatccaatcatccggtggaggggaccaagcaggagactcagatgtcatcggaggagttaccaaacatgaaccataatctgcgtaacacatataaatagagtcaatatactgtttaatattacatatagaattattatgcaccttatcattacaggctttctagattgtgtcgactaaaattgaagcatacaagaaaagctcttgaacgttcacacctctagtctttaggctccaaagaacattaacccaatcacacattcgggctccagattcctgaattgggaaaataccttatgggaaagatctccaaaggtgaaaaagttgcaatagagaaaaatgtgctgcatcatttcatcactctctccacaaaaaggacaggaaacatccttaatatgcaaccttttagccagaatggagtgaataggtaaagcttttgagagaatgctccaccaaaacaccttgtgacgctctaaaattttcaaattcaaaattttattccacatactcaaagcaacactgcaatgaggagcccgattcaaggcttggaccaggtaggctgacttagtagagaataaaccattcgactatttagtccaaatctacttgtctgtaccctgacctccagatttacctcccttgatatataatgttattcgtaatttaaggattgaacatagcttggagcttagttaaattatagtccccattttttgttagtaagttcgctactttctccaaaccctccacctgagtgcgattcggttgagggtagaaatcatggccatgcataatccatggatcctcccagatattagtatctttcccatctgaaatgattttacaggcaccttgtttaatgatttccttagtttttaccacattcttctagaaccaagagtccgggctctagtagtcacaattcaagaatgatcttccctttcgatacttagcacttaggaccttacaacacagtgattgatccctagtaagaagagcccagccacatatttctagaagagcacgattcatttcttgagttttcctgaagccaagaccacctctagccttcggtagacaaattcgatcccaagcctttaagtagatacccttgtttccctgcttacaactccaccaaaaatccctaaccataccatcaattttagaagcaagcctattagatagcttcgttgtttgcattgcgtaaaatggtaaggagtgacctattgatttgatcagagtagctcgacctgctctagagagcgatttcaacttccactcatgaagcttggagattaggttatcaagaataaaattaaagtatgcatctttatttcgactacaaaacagtgggagccctcgataattaatatttctagtgccagtgttaaggccaagttctttcttgatattacgtttcatcccctcgttcgtattctcgctaaagaaaatagaagttttcaatgtatttatacgttgtcccaaccagtcacaaaaattttctagacacctccaaatacccgtagcctcctccaacgtggccctgcccacaagaataatatcattcgtgaagaatagatgggaaatctgaggaccattcctactcaacttaattcctttaatggttccattgtctagttccctttcaagaatatgcgatagaatttcggccgcccatatggacagataaggggatggagaatctccttgcctaaaactgccttcggaggtataagcttattaatctgatatccattcaggcatacatgaaatgaggtcatggatatgcattgcctgacccaattacaaaacatttcaggagccttaaagcttcagagcacatgatcaataaactgccaacttagtctatcatatgctttcacgagagatcaattttaacggcaaataaaccctcttttccttttttaagcttgaacgtgtggatgatttcttgaactaatacgttattgtcctgaatactaagcctagggacaaatgcagcctcagtcgggcatatcagtctgggaagcacaggtctaattctatttgtaattattttaggaataactttgtacgccacattgcaaagggaaataggcgtgaattgtgaaacttttcttcgaatttgggaccttggggatcaggaccacattagtaacattgatacccttatgaatcattcttgtaaggaaatttttttgaatggcctcatagaaatccatgcccaccgagtcccagtaatgtttaaagaacaaaactgacatcacatctcgacctggggctttcagacttcccatagagaatagagtctgtctgatttcctcaggccctagaatcacttccaactcaagttgttctagcggggaaagagaatctgcagttaaatgacttagtttctccatcagacgctagaccgggtttgtgaacacatcttccacaaactctaaaaactccctactaatctccctcttggtcgttacccaaactccttccttattcaatatactctctacatcattacgcctattacacgtagtggcggtagtaaagaaaaacttttaacatttgtccccctcctttatccaagaaacatgagatctctatttccaataaagagctttctatttaagggcctcgttaagggccttccttacttataattccttggcccaacttctagtactcgttggcatcctctggatgttcgtgggttgctttcccagttggctggtactggtattttgcttcccaaattattctccattccacttactcaactccaaacgagtagctccaaccttcttaaaaattctagcatgagcccaatcatgggaaactgaattccatgggtgatcaacaaccagagtactctttgggtccctagtccaccaagctttaaaccaaaatggacattttcctcttgtcttcaagacccctatgcgaacaaacaagggcctatggtctgaattgcaggtatgcaaagagcgaattgaagtttttgggaagagccgtaaccactcctcatttaccaaagattcatcaagagtagatttgatgtggcgtgggccttcccgatggttatcccatgtcaagttatctcccttgataggcaagtctatcaaggcatggcacttaatcaaatcagaaataagagggataaattggtcttttcctttagaacctagccgctcagagctacttagcacaaagttcacatcccctaaaatcatccaaggcccattaaacttgcacccaatgtccatggtgttcgaccaaaattgcttcttctcatgaaagtacggtggcccgtaagcacaagataataaccaaggataatttgtagggtcagagtacacaattccagtaatttggttttcagttaaacagatgctttcaaaactaaaactgtttttccacactaagattaaacccctgacattacccacagcaggcacagtagtattgaaataaaaatgaaagttcttaagagtgcgtaccaaaaatttagcatccactttaagttcagtcacaaagataaaatttgaagagcacgaccgaatcagggctttcagttccacaactgtagaggtctgccccaaccctctacagttccaagcaacacctctcatgtctctagtggaggagggatagcatcctcctccaaagggtcacatcatcagtacgaataccaattgcagattcctcatctttaacgaggaaatcctccttgacagggatagaaatatccatcaaccgagtcctagccttctagaccatgagtctagcagattgtcccaacaagatcagtttgtcaacttgttgtgagtagacagacaactccttaaagcaatcaccccttttgacttcatcactttccatgggctcctcagaagaaccatcaaaaacacaaacaagattagccaacccacgcccacatcaaccgggccgactccctttggaaagtctcgaacaacttgcttcacccttagaagacgtaagcttggttttattcctaagagaaaacttttcaaaatccaacctccacttcttcacttgtgtagttctctcattgaattcagaagaagattgaacctcaatatcaacacaagaggctttcctcttattggggctagaagtcccagtagtagtaagttcttggatgtatccctcttatgccttaaaaaattttgacaaagcccttttctcatcaagttgtgccgagatcttttgcccatatcatgagttattaggctcatcacacacaatctcactgtctgccaaaagaagctgcttatttggaccagaacccggcctaacagacaccaacacatcattattacccaacttattttccaaaagaaacgaaccctcattaaccaccccacccaccgggttcccctcacggcccacatcatttaaagaaaacccaataggtggcctacatcctaaacccacaacttccatgtaaatctccctaaccaataataatcccttgctctaattggctttcagtcctacaaatatcacacttaggaattgtcggagccacgtcacctaccttgttactgttggacataaacccacatgacttagttgaagtcaaacactcaccttcattaggaaataacacatgcctctttctcaccttcagatgtgttctcgacgtaagcatgcaaaaatcgtcaacaccctcagctgcacatctcggttccactgtcgagcgcttagaaacccataccatgtcacgactgaaataagagagactcgttgctatcaatctagttttgaggttcgaggattgagtacgataactagaagcatcctcgcctgtccctacttgagaaccgctcacgatggccagagaagacgactcctggtttctcagcaaaccactgttatggccaaaactattcctaaacttaggccacgattttttttcctgaaaaaatagtttggatactgcgatgaagtgttgatccaagggccatacaatggaaatgagatgccactagcatcaagaccggtgatcggtgacgacaaagagtacccacttcggagatggcccaaacgactgcacaagtaacataagttgccaatccttttgtatttgaactgcacccaacaggagtttccatctcccaactttaaaaaacaaccattgaacaatggcttggtgacctcaaactccacttgaatccaaatccatttcttccataaaaatggtttcgattcatccagatctatgcacaccaccctaccggcctttgctcccaacacattggcattacatcgtgagaagtaggcatacggacactataaaaggagagctcctttaaaccaaaccttgtggaccaagaaagaaacacaatgagttctcctttgatgcaccagggaccttgctctaaaatctgtctcttatcagctacattttcaaaaccaaaccaaaatacttttggaatattttgtcctgaaatctgagaatcaactttcaccttagacttccatgtcttagcacaaaagcttgcaacttcgttctcaccaaaaaccctatgggaaagcaccttacccagaagacaatattctcccctcaaactaaggaacacatactcatgcccttcactctagcgaaatcaccttatgccgccactaccaccaaagggaactcgccgcctgactatcacctttgtcaggaagactttcgacacaggtcctaacaccgatctc

SEQ ID NO: 297142 - DNA, 4295 bp, Cannabis indica
ttttttaaaaaaaaaaaagctatgttaaactgacgagatagaagggcaaagaggatccttctggacattaccaaaatatcctggcttactcaccaaggcatctaaaccaattcaaacaacaacttattattacacagcaaaaatccaatgaacacagttccatctttcttataatgtgacctccaacaacgtacgaattcaacaataatcaaccaagtagagttttcaaatcaaccatttaaaatacgacacgtgttcaactactctagaatcgagacagagaatcacagaccatctcgatataaagtcctgaatcctgggattagagaagcccaaacgtaagaattcctctctctccacaatattctagactcttcttcctattagggtttatctccgtcgtcgttgcaaatctcctcagccgtcacaaaaatggctcgtcgtagctcaggttcttaaagatttaattttattagctctgtgtttaatcaattagcttcgcttaatttctctcttattgttgtttttatacaccttgttgaaatttagggttaggagacagaactaattggaaaggtttacgccttgtcgtgattggatttggggtttgtttttgctttaagttgcatattaaatgattgttttagatggatttggtagttattgggattattttcgtgtggcttattcttatttatggatgagattcaatcgtgatgtcagtgtttaagaatagtgaattggaggcgtattgctaagagagatgtattaccttctggggtttgagttttgggcgcggcttagtgttttttcggtgggtattgtgtcctgtaaaaggagtgtaaaaggagttgtgttaaattggatgtctcttcattaataatatagtaacaacttgagttgtaaattgtaatacagttacagtgctatactgttataattcatggaagtacatttcgcttgcacaagctgtatggaacttgctatgtagcatttgaaatgttgcaggctcgggtcggttggcttgattcaaatgcctatctgttatgcttaagcttgacttaattttagaagcgttctgttttgttgtctttcttgaatgcaaactaggaaaggatgtattttgtataagttttagtgtcctgtctactccactcatcatagacttattgtgttgctcttaacttttttattaggaagatctgcccctcgtccagctgcacgatctgcacctgtgcgcaaccctcctcagccaggtatttttcgtttttcctttatgtatgtcatgataggcattttttttccattctaaatttttttatctgtatctgtaaatggcttgatgttattcttggcacttgcatgagcatcttcttatatgggtttgtgttaaattttttctttctttttaaattggttcagctagccgtgctcctcctccagctcctgcacagcaaggtggcggtggaatgctatcagggattggatccaccatagctcagggtatgcgaaatgagatctatattatatttgatggtatgagcttcactttcaagaggattctcatgttcttatgttttgctattttgtaggattggccttcggcacaggaagtgctgttgcacacagggctgtagactctgttatgggtcctagaaccatccagcatgaaactgtagcgtctgaggctgctccagccccagcacatgctgcaagcagtatgggtggtgcagatgcttgcaacattcattccagggcctttcaagatgtaagcattactttgccctttgttattgaaccttttttttaaaatcaaatgcttgaattgattcatatatgttttaatttattactttcttttaaatgtttagatttaaagaaactgttggattttgatttcaacctagtgaataaatgttagaatttataaagtatgaggtttagaattttgctagtgcgagcagtgaactaattccgatatccaaattagtcatctgaatcatccattatattgtagctatacctataggttcctttagaatttactggttggtatttaattctgtgagatattatatttgtggccttttgtctaaactcatctctcctttattcaaattattaaaaaagatcatctctcatttatgaaatgcacttttagctttgtagaggtaaaccttttctgtttgcaagttgctttggctatgaaaatggtttaaacttctgttttttttatttttttatttgcagtgtatcaacagctacgggagtgacattagcaagtgtcagttctacatggatatgcttgctgaatgcaagaagaattccagtggcatgttgaatgcttaagaacctttctgaaaatacaaatttcatcttgcactttggtactgtagtttgtgtttttatgatgatgaacttaaagaaagagtccatgaagctattatgttaaataattcattattgggagacaatcaatacctatgatccatataagtactctttttattgtggtgggcacttggatctaaagtcaagtaattctttaccatctttatattcttaaatggtggactctgtttttgagtattttgatggattagtcatttcctaataaattaatatattgctcgttcaaacttcacaaatgtgatttttcttacatgaatttgttggctactttgtgcatgatgcccttaagataagataatgttgcattttatgaaaagatatgccttggttagttggttgtattttaattttatcccttaaacaagtttaaagtttaatagtaagcataaccgatgaaaaatgctctgaaagtaaagtattgctgatttcaaattaaactgtgggggccccttgaagagaccatttccacccgttgccgccatcgggtatgtgaccaccgtcaccgccgctgttttctcttcgtctttctcttaacataacaagactaatgctcataatcccaacaacttaaagtaacagttcgatgtatcttcacagatgacagaaccaccaaaaattaccttcctctaataacctttactttccacatgtatgttccaatcttgaatagagacaaaaattagtttgtactgatgagtagtaggtgatgggataacaaacaaaactagccatcctcaccacacattcttcaaacaccaaaccgataaggcctctcttctcttcaccctttttctgtctatttctccttgaatcactcctactgttttttgtgaacttagaaagcatctcaaaatatttaagcctaaaaatgttatcactaagaccttgtaagagccaatgtcaatcaacatttctcccatcaataacaaccccatcatctaagctccatcaaagactaacccaaacaacagttcacatgagaagaagaaaggtaattggttgtactaccagtgacaacaaaggaggaggaggagaagaaagcaagaccgaaaacagacgaactttcttgacaatcgaagaagccggacttgtcgaaatttctggcctcagccctcatgagcgctttctttgccgtcttacggtacaatgcatattacatacatcacttactcactttctttttatatatattttttttatagaaaatgtattgatggtgtttgtttgtgttttagatatcttccttaaacttgttaagagtaatatcagaacaagaagaatgctcaattgaagagcttaatgctggcaaaatatgtgattggtttgtaaaagataagctcaaaagagaacagaatcttgactctgctgtccttcaatgggatgattctgattttcaactttgattttctattttctttctctctttttaataggatagtattattattgtttacagtaattttatacactcaattatattgcaagggaattaatttatgagcttgtttgtaacattttgggaaaatgtgttaaaagagtttgaactttcatgacaagttatattatcataatcttattaacataattttaattggagaggtgaaactgcttaataatagcatctatgaataattttattttgggtaaataccattttagaccatgtgttttgcaaaagttatctattaggggctcgtttggaacgccgtattaggtcgtattgtattgtattgtattatattgaattgtattttatgcaatatttttatgtaaaactatatgtggtattaacttttatggacacctaaatatataatattttagtataaattaaagtttaacaaaatattatataaaaatatgatatataatccaattcaata

SEQ ID NO: 297143 - DNA, 7180 bp, Cannabis indica
tttcaaaaatactgtgttttttaaaaaatattgtgtaagttttatacaatgtactgtgttaaattttcattgttattctactgttgtttttagttattctgttttgtgctctactgttattttattaaaacacggtatttttaaaaagatttccgtgtgacagtatttttataaaaattaacccaaattctaatatttttgtaagtttcccaataaatatgtgaagttcttacaaaataatttttaaatatttttaagaacatttgataatattaacatgtatataatttgtatataaaaatacttgtggagttcctaagtccaaatgccccatcaaagtaagtgattatcaacccatctcttgttgtaatgttttgtataaagtagcaactaagctcatttgtagcagactcaaaaaccattctgctagaccttatagctcaaaaccaaggaggttttattcagggtagatacattgctcataatatagtgatttgtcaagaccttattaggcatcatggaaagagatcaaccaagtccaattatatgatcaaattggacctacaaaaagcctatgacactatggaatggggatttcttaagaaatgatgtttgcttttccatttccagtcaaatttgtgttacaactcccaagttctctctcatatttaatggaactcttcatggcttctttgaagctaagagaggattgagacaaggagactagatgtctcattttctctttgtccttggaatggaatacctgaccaggataatgggtgaagttggaaggaaaagtgacttctatttccatgaaagatgtggagatttaaaacttaatcacctaagttttgttgatgatgtgctcttattttgcagaggtgtctttaagagtatttatctcatgctacagggtctaaaattgttctcaacttcctctggcctccaccctaacagcagtaaatctaccatttattgttgttgcatggaggaatctgaaatcagaagggttattgacatatcgggttttagcaaacaagacatccctttcaagtatttaggaatctctatttgtgctaagaggatatccactactgattgtagaatacttgtggagaaaataactggcagaatcaaggtttggagctccaaaaatctgtcctttgcaggtagaagtgtcttgataaattctgtacttatgactatccatacttattggagtcaaataatgatattgccaacaaagctaatcaaagaaatacaagatatatgtagaagcttcctttggaaaggcataagtcagatgacaggttcagggagtatagcatgggataaagtttgcaagcttaagaaagctaggagaattggttttctaaatatagctgattggaatcgagttgccataatcaagaatatctggtttttgattgcttaataaacacatttttatcataattttttttcttttcaaaaagtagcttttagcttttccaaaaattgtaccaaatgttattgttggttttttttatgagtttaagtatgccttgtaaaagattttttaaatcccatatttaattgtatattttaaggttcttcctctttgttgaacctaaactagagaactcaaagctgcacctaagcaagcagccatccgaccaatgtactgcactactgttagagctccagatttaccatctgacaaacaaattgtgagaccggtgatgttccaaataccatctgatccacacaatccacatacacaacagagcaaacaacggatccctgccttgaattgatatcaatcaccttggtttccttaatcttcatcggttctctctattttaccttctttacagtgttctttggtggaaatctctgcactttttacctctcgggtttttttgagcgctactgttgcactcctacttatttcggcattcgagaaacaaaagcaattcaataatgtggaagattatttattgatttaccgagataatcataatatggactataattttgtgagacattattgatttttaccgattttatggtattattatcttttcacaattgtaatgattttattaaattaatataatattaattttttaaaaaatattattaataaattaatataataatataaaatattttttttagtgtaatttttggtattatgattggagtataaataattttttatattaaatttaataataatgtagcaccaaatttactatgctgaaaaattaaattatcctaacaaaaaaaataagtaaaaatttaaattacactaatacttcttagaaaagtattacttttttttttaaaataaaagaaaaatgactgcttaggttttttattattattattattttcttaaaaaaaaatctgattggttcaataaaccaagtgggccatcttaacaacaaattgggatgctttgcttccagtgttgatggcctatatgtaggagtgtcagtgggttgaaaaattggttgtaggaggagaggactgtggagacatcatattttgtccaatatgaatgagattggttcaattttctattttcattttacaatgacagatggctagaatggaatggaatggagggaagatcaagaggaccttaaaaaatatgatttttaatcatctgtgttagcaatcactcacattttgtgctgcatgtaattattattgaaaatgagaaagaaaaaaaactaagaaaaaaactattgggcttgaacatataattcctaaaacaacgtcttaacttaagaaattgcctttttcaaagaaaaaaaaatacgttaagaaattgccagttgactgatgatgtaatactgacactacattttcccacctttaaagctactgtgatataagaaattgccagttgactgatgatgtaatacgttaaccccaaaactcaaacccaatatgcaggactttatagtttcttcttcttgttcttcaaatacttgtttttgtttagctagagaaaactaagctaaatcaaaaaaaatactttctttcttctcttggtgtctggaacattataagagatttctagctctcactttctcctttgttggttttttgagaaaaccctttggaagaaaacaactaagctctctccctctctctctctctctgtgttaagttgtcaaagttgattccttttgtttggttttggtactaagtttgtgaagcaaagaagaaaaagaaaaaagcttgtttctttttgaaaaattaacgtgatttctttctgagaaaaacttttctctgtagaagaaaacaaggtaagcttgtttttgtactaagtttgttttgcttgtgaaagttgcttgtttttgtaccaagtttatgcctttatgacatttagtgatgcttttctgggtttactatgaatttaagagaagagccatttgaaatagtgggtatgtgtagaaatgaaatttatttgtgtgggaaaggttttgattgagaacttgagtgaagagatttgtatgagtggcatagttttggtctgatcttcttttataatttataaatatatctatatttatatactggcacacacatatacatgttgttagtgaaaaaaaaaaaacaatgtgtgtatattattatatttgttaagtgggtttactcagagttaacagatcatggaagaagatcccttgaaaattttgttcctaaaataaaatgtccaaatgagttttttttttggtgaagtctttggagtatcaacttggtgaaggccatttgtatgttattatgtaatagatgaaaaaaaatatatatataaaattgatgactctgtaacaagagacttgaaagaagaaaaaaaaaaagattgtcattattcttaggaatatattattgtgttgaaacttcaattctgtgtttaaactttgatttatcttgtgatcttattagggcctttgttggtagcaatgacgaagtacaaatctgcagctaatggaaagtctaggatggtccagaatcggagaagtaaacgtttaatgtacaaatcttcacctaattatcaatgtgatacgagcttggatgtcaagaagcctccttgcaaaagagctacttactcaaaaaagactagtgctgaaaatgcaaatgtaggaaatgaagtaatggaaatgaagccaaaggtaaattgtgatccaaacaatgcagaagaaaggctatcccctatctggtggtaagattttggtccaacttttttgttttcatatttgatatagcttgagtgagtttacaatgagctttcaattttttcatcaggggaagcttgagcatacacaatgacaactttggcaatgtggatgtatgtgcggctttcaagtcaaccaagatttcttctgatatttttcgtgttgtgaggcaatttccatcattgcttcctgcacaagtgatcccccagcttgatgtttggccaacatgcttcgatacttcgccactgagtgatgaaattgtagacctctacattttacaaggagacaaaaggtgttgtttgctttgctacaaattaatgtttcccaattcgagctactcttcattttgacctcttgttttcatttccttcctgcagtgatgatatcaaagatttagatagcttgttggattatttgcatgctcaagatcttggaataacaatcgcggttgatgggacaaaatttctcttgttttcttctcgtcatctttcgcataagtatggagtgagttcaagcatcacatgttataatctcaatactcagttgttctttctcatatctcatatctatgttttgatatggtgagttacatgattttgtaggacataaggggaagtactatttgtgggctgtcataattggagccaatactttcttcccacatttagaagaatgtcctaattccaatggcttagtacttgctcaagataattcctccaatccaagctaattggaattttttgctcactaaggttgcattaagttttcaataataaaactctatcatgttcccaagtcattattttgtagcatgtttttaaggccaacttactctatgaacacataaatatacaaaaacaaaatccatgtgaaatatcaaatctcatagctgaactaaacggatattctttatgaggaattgattagtttgagagttgagacactttaggataatgtatttatacacgtgtactcagttaatgagcagcaaattactatgagcaacaaatttagttaatgtaagtcattgtcattgccattctaacaagtttcctagttgagcttctcatgcctcaaatatttttctttttagaaaacatattctctgcattcatttttttatgttaaataagttgacatgaattttgttacattttttcttgtccttgtttgttattgtggccaggtaaactcaatgttgtagcctatttcaaagaaccggacggtcaaagttcctttgaagggtcgcctcaagttggaagagcagccattgatgaaggcatcgctttagtgttttctacacccgatgaagatttaatagcaaatgctgtagatgtttttctttcttctgacagcaacattgatggagggaaaattcggaagacttgttcatcctcatcaattatcccaagagagagcactaactctgcagctgtacaagtacacgaaaaagaaaagagttttgtaacatcagttatgcaacaggctctaaacattgtagaaggcgatgaagtcacctcggctgctgctgataatggttaattagttggtcaatactatgtgaaaccgactttggctacaactcttcgagcaaacatcgaaaaacatggtgacattgctcgaaattgtcttgagaatttaccaagaaaagttgctacttttgttcttgaggagatatgtgatgtggttcaactcaagcagttgagccaaaaaatctaaggtcccatcatctaaattctctagaaacagtaatcgctttaggtgaatatgcaaatgtggatgtcgaatggcttaagaaactccatgaagaactccaccaagtaatgaacacaatgaaaaagtatgagaaacttaggctgtctcaacgttctaaagcaaaagaactcaagttagagaaaaccgagttggggaaattacagggccgagttcagtcattggagaggaaaatttcaacattggaaagggattgtgaaagagtagatagtgatgttcaccgagctaaacgtgtgatcaagcaattccaaagcaattcatctataatgcatggctttctctagtcatttttttacttagtagtcatcatcttagcctttgaaagttacagaggaaatttatatgttaatattattttgataacaagaaaatttattaggactatagcttacttctttatctttataggtctttattatttatgcttataattaggggtgttcattgtactacatccaatgcttttaggcttattcaaattcgatctaattatatattgaatgttagattttaccatccgattcaattaatttcagtcatcaaatcgatctagcatccattagatgctggattggaaatctgttggatgtatttcatttataattattggtttaatttgagtttattcaatattttagacttagtattattttggatcggatcggattcatatttaggtacaatatgtattggattggattggatccatccaatctaagaaagaagagtaaaatttaatataatttttatatatacatatatattacatataacaatataaaatttaattacttatctaaactaaataaaaaatattaattagttcgactggatgttggatgtattagattttcagacactccatctaatatccgatccgatttaattggatatttataaataatatccaatgagatcataattaaatatctaatgttgtaattagatctatcaattgtgattagattacatgatttatgcacaccttgtactaatgtaaagaaaaacaaactcatccttattacttatctcttacatcttacaaagttatcattattatttatgcttgtaatttaaagaaaacaaacttgtccttattattacttttttttttttgaaaatgaaagtcattttattaaacgaaaatttctgttaccaaactaggcaacaactca

SEQ ID NO: 297144 - DNA, 2879 bp, Cannabis indica
  modified_base (237)..(237): a, c, t, g, unknown or other
ggctttataccgggacaaaaactaataacatactcgactttttacattatttaaaaaagacagctatatatgcatttttattgttaaagtacttaaaaaacaatatattgatggataataaagatataggtcagtgtttaaaatttggaaacttaattaaagaccaaaaatactataaatataatatatatatatataaatatattattaaccaatatccaagctcgaccacgacgngtgaaagtgacatgaaagaaaaggctaatataataagccagtacagatctgagcaataatatgagtactgaggcaacacatgtagccaaattattcagcagatcccaaaagaactcttcttgattgtaacagtaaatatatatacatatggttagaaattagacaatatttgttgatttgaaattgaataaagaaaatacatacagtaatctccattctcattatctcaatttgattaaggtcttgcatattaagtacccacactattacaatagctatatttaattatctagcaatatagcatttttttttttttaaaaaaaaagttaagcaatatagcatctaaatgttttaattaaaagtactattatatatcgacttttaacaatggaagtacacagtactgcactcctaaaagcttttgattcatacgtatcaatgcataacaataatatatatatatatatatgtatatatattacacttataaatgcagataattaattagttaatcaaacaaagaacacagccgtttaattataaaatattgtaattaaatggaacgatacaaaatgtcaaagtcagcaagaaattccaaagtggttattttctaataaaacctttcactattccatttgaaaatcatcatcagtttaattagttagaagaagtgtcaaatattatataataatgactttacaatattcgattgatataatgtcagtatctgcatggaaacttaacataaatgcctcgaaaaaatatgcatgctgtcaaaacttacaactggttttcataattggtaataacgtttaatcatatctcccttaatttctccaattattgaagaatcatcaaaactatgttactctctgttactcccttttaccaccctcccagtcccatggaaagagagccaagtagtagtagtggtactactaaaactagtcctaatactaatactacattaaatcctatactccctccaggtttcaggtttcatccatctgaccaagaactcatagttcactacttgaaaaacaaagtggcttcaaagcctttaccagcatcattcatcgctgatattgatctctataaatataatccatgggagctacccagttagttctctttctttcctatatgtacatatactcctttattttaattctaatatttctcattattttatttatttttgcatgtacatatacagagaaggctgcatttggggaagaggagtggtactttttcagccccagagataggaagtatccaaagggagaaagacctaatagagctgcaggattaggttactggaaagccactggaattgacaagccaattttcagctcttatggattgtcaaagaaaattggagtgaagaaggctctagtcttctacgctggtcgacccccaaaaggggaaaagactgactggtcaatgaatgagtacagactactagactcaccaccaattaacaagtcatcaaggttcaaaggatcaatgagagtaagtgagctaaaagaatataggtacctaatatacagaagaaaaaaaaacaatcaagtgtgaaaaagaaactcctaataatgggttgtggggggaccaccacttcatggctaaaaaaggagaaaagtagcctatattcattataaaactcttagcatagtaaccatgcgccagggccacttttcttcatgaaaaacctccttttagctagaatctatcttcggttttcttactctttcacactcttccacttgtaagaagtcattattgtgtgtagctttagaaaagtccttgtcaattaaggcaagtttccctactctcccccatttaatatggtccgaggcagttataatcttggtcaaacttaactatttttactacaaattcttaatatgatattacaccaaggtcacttgccttgctcatccatgtggttaaccatatggtaatttactcttataaattctgaggtgtacaacatgtcccagcatctgcagcttttaaatcagaatcaacttctcaataatacaagactcttaaactactacatgacaagacagttgacttttttatttgatgattggtactttttattaatatttttcaaagttttaacagattttgtggtgccaattttatctatatacttttctaatcaatgttgacaaacaagcattgaaataaattggcttccctgttgtcacagctggacgattgggttttatgccgtgttcgatacaagggaaacatcccaaagcacacaacacatgaaattcaaaaagcccacagcactcaaccaatgagctgcctaccccaaaaagctgaggagataagtttaggaagtgcaactgcaaaccgtgaccagatgatcaccgattatatatacaaagactgcatactactagcttggatactcgccggtcaatctgtaactcccatggagaccattccaagagttggatttacaggaagcaacaatagtagtgatggaaacaacttgagtcccttttctgaaaatggttctaatggagtaaatggtcttacagtttcatctatggacaatagtttcaacatacaaaatggagaaacctctgaggaaaaagacatcgaatatgtagatagcaagacaa

SEQ ID NO: 297145 - DNA, 2200 bp, Cannabis indica
atgaataagagaaggtgagcagcagacacagacaaatgatataactaaaccttcaccatgtgtgcctcagcaattgatgagctaaggtcttctcgagactgcgatcgtctactctgtagacgcatctgacttctgtgaggagaccagaaggaacccgtgctaccattgtcgaattgcatctgccccagattagtcgacgaataactatgtgcaacactgctagttgacgacgggtatagagaagattccattagctggatttcaccattgctgccaattcctgtaccgaaaccaaacgctctctgctgagtactaccgattgttggactcagaggcgtctttgctcttccgtcccctgaaacagatagtgtcatatcatgttgagtttttactgtgttctcatgatgaaatcaagggcgccaagagagcattcatcaagggtgcatgaacattcaacagatttaaacatatgaacagtttgttgaggttcctttctacaataatctattttcattttatgtcatgcatatagaatagtacaattcatataaggtattccttacacacaaaaccagctatcacagctaatacaataccaattaggaaactaataactcagctttcctaatattactcataatacataccttatataagagattatattgaacactacgtttcccaaagataatcctaataaagtttgacattcaatgctaaggaatcttcaaaaatgacgatatatatatagatcaaagtactattcttgaaacatggatacaaatattaaataaaaaccttgagggattgcttaccagaactaattggactccatcgctggagccgaaatggagatgtcatcccaagaacagatacagatgatgcattgttatgtctgaagagtggaagatatgaccttctcaaaaatttcggcctccaattgccagcacacgataacacacaaagaaggagaaacaatgatataaataaaactataagaagaagaaacggatttatctccatctgaaatatataatagttgcgaatccccattctactcgaaaacgcattcccagcttccaacagagccactccaagagtccatgtaatgctaccagaaccaatggtgattttactatccttaatgtgcaagccttctctcagcagtgatacaatataaggcgccctaaagcagtactgttcaataaatggctgtggagcaacgctattctttgcggtctcccatgtcctctcacaaaattcccgacccttttccaatacgttgtcaagtgctgcatccgaagataggttgaaaaaccgataaacgacatagaagccagacaatgcataaaattgtccagaaggacgaggaaatccatcaccaagggcacaaggttgtaaatcacagttaatacccgaactaacattggaccactcagacaaattgacagcaaatttcgcaagtgcactgcattcgtcccaattaggagcaccgataagagtcacacgagatcctaattttcctcccacatccaaactctttccttgttgatactttgaacactgagaacaggtgtattgttccttatatccagtctgcaagcaagggtgcttgatttgtaccttcccactcaataactctgcttttatgttctctggaagcctcttaaaaagatgaaccacagacttatcaaatgcatcattcaaaccatacccgggaagagaataagcagtgaggtgatgattcacattcccaattctaagattcaagttagtttcactctgatcatgaggttcactctcaaaagtaacttgcaatgaagaaccccccaaatctaaagcaccaaaagtgggagttcttggcttagccccaagcataccctttaaatggttaagagctatccaaccaaagtaagcttcttccatgccactaatgattttaacccactctcttctacacaaaaaaggtgaagaattgagaatggaccaggcattgtcaagaagccatttggaatctgcactaggcagccttcgaacacccgcggtagcataaagaaacaccgaggtagtctcatgagcgtgtcgcggaatttgcttggctgcccaacgaacaaggggtttaatagcagatttcaaaccagaaatattgtgaaccaatttgtgtaatcctggttcagtctccattctatgataagcacga

SEQ ID NO: 297146 - DNA, 2461 bp, Cannabis indica
tttttttttttttttctatttccccagaattacatttgtgaaaaatcgtttgggaactgagaatgactttttcttggtttaggtgggaaaaggtttgtccaaggatgataaggcacaaaagttggccctacaacattggctcgaagctgtaagtaattcttctcttttttctttttagagttttttcgtgtttatatgtgagtcaagtcaaataggctaacttttaagtttgattaatttgtgttctaattacagattgatccacgccatcggtacggacacaatttgcacgtgtattatgatatttggtttgaaagcgagagtgctcaacccttcttcttttggtatgtaattattcactatttcaaatttaaaacataacatatatgggctctctctaattcactgtttttttctataaaaattgcaggttggatattggagatggcaaagagataaacctcgagaaaatcccaagaagtgttctccagcgccaatgcattacatatcttggacccgtaagttctaatcttatataaacacaccattctattcactattcattcttcaaaggtgtatgcatgcacatatttatgtcaaactttgtgttggtttttacagaaagaaagagaaggatacgaagttaaagtggaatatgggaaacttatatatagacaaagtgggagcccagtgaatacggtggagggttccaaatggatttttgtgctaagcacaacaaggtctctttatgttggtcagaagaaaaaaggctcatttcaacactcgagctttctatccgggggtgccaccacagccgctggaagattagtagcccatgatggtgttcttgaggtaattaatttattatttatccccacatacatttatatacacaacaaattaatctatattttttgaatacccaattgagttttaataattatgtgagatatttactctttttgcacattattttcaggctatttggccatacagtggacattatcacccaacagaggagaacttcaaagagttcattaacttccttgaagagaatcatgtggatctctcaaatgtcaaggtaaaagatatagcttatagcttatatatattttgttacattatttatatatttaaagaaatttgtgacaagttttctgatataattttatttatctttttgtgtctgcagaggtgtgccattgatgatgactatccttcatccattggtcccaacgtgttacaaaaatcaggctcgacaactccaaagaaatcggacggtgttaagatggctgatgtggctaaggagaatacaatcacagccgtcaaaaaagaggagaaaaagaaggtcgagtgtgataaagctaagccaccattgtttgatttgggccagcgtctttcttgtaaatggagtactggaactgggcccagaattgggtgtgtccgggactacccaacagagcttcaatcaagagccctcgaacaagtcaacctatcacctcgagtggctcctggacaatgtttcagttacggcccaattccatctccaaggccaagcccaaaagttcgtctctctccaaggcttgcgtatatgggcctccctagtccaagaaccccaatcactaccattaactaagtcatattgactcaaggctttgttcgtcactatatggcccaataatgaatcttctcaaccttcttcaaaaatcaaaataaatgggagggtaggagctaaccttttttttttcttcccatttttttcattctttaaaaattgtttctaatattccagccatttttttttttcaattgtaccagcctaatagataggtctctctatttatttccttttttacaccctttttccgctcatatttttttgggctgggaatatttatttgtttatcttgtaaaagtaaagttaatgtgacattcgtaaacaacgaattaacttagaataattatacggggttaagtttgtaaacataatatagtatacattgaattatttgagggaagaaataagagaatttatagtaaatttattgttttaatgatttgttcttccttctttaaaaagaaacaaaatgattggttcttcctttgttaaaaaaaaatgaacgattgctcttctttttttgaaatggtgttaatgtttgactcaaaaattattaattaactagtttatgtgattctaacaaatcacgattgattatataacgaaaattaataggactttgagtttattggaatttgaacttttaacttcttaattattaaattaatcaaattattactaaattacaatacatatttaacattaaatatataatattttatgcaatatttttacgtaaaactatacgtggtattaactattatggacccctaaatatataatattttagtataaattaaaatttaacatagtattatataaaaatatgatatataatctagg

SEQ ID NO: 297147 - DNA, 2065 bp, Cannabis indica
ataattaaaattttaaaatacaatctaataaagttttattaacaataatataaaaaaaatcttattaaatttttaatatcatagcatatatactaattatcagattattatattaaattttttctaaaataataatattttatatagatatattatatatatttcttcttatatgaaaaaataaaataaaaatcatattataagaattaataacattataatatattgtgtagtacactttaaattgaaaattacaatctgtattgcactgtcgccttgataaggaaatttgaaatttcatgcttacaataccctaaaaaaatttccctaaatacatagttattaaaattggtcatatatgaccacattactaatatcccacaaatacccctcccatttcaaaaactaaaatcaaaaactcaaaacttctctctctccctctcgctgaacgccgccacagccttcacctccgacgaccaccgacccaccaccaccaatagcaccgaacgaccaccagcaccggtatccaccagcccccctctccacctcgtaggaccctctcccgtcaccccctcaccatcgcgtatcggaccaaaagccaaaaaaaattcccagggaaatgagcatcggacccatcgggtccattggacccaaagccaaaattttttttttaaaaaaaatagcatcggaatcagacgcatcgggcccatcagacccagaccaatttccagcaaaaaaaactaaacaaaatggaccatcgaaccccataacatcggaccatcagactggacccatcagaccatcggaccggacccatcgggaccatcggactgaccccatcgaactgtcttcttccccaaaaaaaattcacagatccgaatccacccattctacccaaaaattcttagatctaacaaataataggtttcacaaataatcccaaacaaaatcacaaacacaataaatctaaactttctaaaaaaacaaaaaaaaatgaaatggtttcggttcggcgtgggtgggctcgtcgtcgattggctgggtcactgtgggtgggtgggctcgtcgtcgatgggctgggtcgaagtcgcctgcgccgccgtgcgccatcaccgtgagcatagcttcgggtttttgtgggttgaggaggctgaccgagagtgtgggttgagagagaggaagagagagactaagattaggatttgaaatgtgaggggtagctttgggaaattagtaaagtggtcatatatgaccaattttaataactatgcatttagagaaaaaattataaggcattgtaagtatagaaattcaaattttccaaacacaaaccacaactgcactgtatttaaattatattttttatacgatgtgatacggtgcaagtagtttgtgcggtgtagacaatttgatcaacatccctaaagaatagtgtatacaatttaattttttcagaatcattcttgattttttttagatatatataatataccttgattttttaaaaaagcggaccaactgtactttttttcttcctttcctcctaatcaaatgaatataataataaccgtacaaaaaataataatttaataataataataataataggcaaaccattaattacaataaaaaaggaatcccttgttgtgatatattcatttgagtttttgattaacgtaataactcaccaattacccaataaactctctctctctctcgcatcgcatggtcattgaagaatgagattttctttaaattgaagtatccaaagttctcatactccccaattgccaactacacataccaaaaataaaataaaataataataatattattaattcaataaaagcattgatgacgtggtacatccaaccagacacttcttgtccacacgtcgctctcttaacttctttaacggagagatcaacggcccagattctctcctgccctctcgcttttcttttatgtgtgctgctactacatttccaattcttcttctcctatttcctctctctttctttttcttcttcttctactctctctctctctctctctctctagtatt

SEQ ID NO: 297148 - DNA, 3837 bp, Cannabis indica
tgttacccgacttagaattcttcccgaaggagtggtatcaaaaaacgacatgggggcgtgtaggatgctgtaaagaatctgtgagaagaaaacctgagctgtcttaagcccccaaatggtgcaagagaatgctcttagtgtcaccagcaccatggaaacaagggcaataatgccataaacggaaataaaaatggaaggattaaacatagtggctcgttctgctgatgtttcataggccagccagtaatcaccagccatcatcgttccttgccatgtaaggctgagcagaacaatcacaattacaccccaccatccataagcttcagtgcagtaaactttgtagacatgtaggcctactttaccagtttccctctcctcatctttgacgagcttggaacttccctcttcggttttcggttggtcaagggcgtggttttcaccattggcctccccatgcttagcagagggtaggcgggacatcttccgtttaggggaattttcgctgtgagaagtggtgccaacatctacaagctccatggatgtttcatgggctgctacaagtgcatccaaaatctgtgcctaatgcttgcagatctttgtatcttcctgattgaactatcatgccatctctcataacctgacacgatatttatgtgaaaacatagatagaaaatagggaagaaagtaaaaagacccttccattataagatcaacactgtccaagaattccatgatatttatgtgagtttaaggtacataaagagaaaacagagaagcaaatagaagaccttaccatgataagatcaacattatgcaagaagtccacttggtgagtaacaagtatgatagtcttgtgcttgagcgctccccttacacatttctgtgaaaatcaggtaagtatttgaaaagaagaagagtataagtctctggttttaatttttgacaaatgctttctatagctaaattgcatatgtgtgcgattcctctcctaatttatttacagaaaatagtttagtagcctgagtggatagtgctacaatcaacctataatgctaaagaaagtgtaggatagtcatttcaccttgaagatatcagaaccagtatgagcatcaacagcactaaagatatcatcaagaagatagatatcacagtcttgatagacagccctggcaagctgtattcgctgtttttggccgccactaaggttgatcccgcgctctcctatctcggtttgatctccatactccatcatttccaagtctttctccaagcaacaaaccgtaatcacttcattatatctccttctgtccattggcaaaccaaataggatgttttcttcaattgttccactctgaatccatgatgtttgagctacatatgcagttgtgccacaaactcgtacctgttattcagaaaccattaagtgatatcaagtttgattcatcctatagctttgcaaatgggaatttcaattcgtaaaaagattgcccacaaagtaggaaaacttccatacctttcctgagagtttatgcatttcaccaagaattgaagacagaagagaagactttccggatcctactgtcccaactatagctgccaactgccctttattgacactcaagtttatattctgcaaaaccttttctccagtctcatcatcccagctaaacgctccatctttaatctccactgcagttataccatcacacccctcctctctctcaacagattcttctgcaagttccttgctcatcataaagcgatccaatctccctagcgaaatcatggcctgagaaagcgaaatcatcgattgtgggaatgtcctgatcggctcctgcaatatcttgaagatggtagtggttgtgaacacagtccctgcatcaagagggactccaaagagaagggcagtgccgaatgtgagcgttgatatcagcaaaggagtgctccacatgactataatattgccagaaattgagtacataaacttggacaaccatccaaactccaagtcccgaaaagactgaatcctttgattgaagtgttcttcccaagcctggaacttgattaccctcatgtaattaagcatctcattcgtcgccttcattctcaaatcgcggtttttcatcaagctgaattgaaacctgttgtttcttttagtgccaaatatgacaaacaccataacaccagcaattcctgcaacggcagtgattactgaagctccaaggtagttgtatagtagagccagggccataaggacctggaaaggagtaagccaaattgaatgaagctgcagcatcatatcagagagttgttgagcatcaacagccatgtaattcactatctgtccaaccccatgagcctgcctagccgagcaggtcaatctaagccctttcttgtacaatgaagtaatgagagttgaacgaatgagcattccaagcttttgagagttgaagttaaattggtgagtagtcaaaacctcaacaaatttcgcaacaagaagaatcaaaactaagtaatatccttcatatagggagcttcccttccctgaggtgaaatcgacaaacttctgtattaaaacgggtcccacgaacatgacacaaagacggattacggcgaggaaagccgtgaacgccagctcacgccggaagcaccggaggagcgtggttcgaactgggtggtttgacttttcttctggttttggccactttgattcgaagagctttgacattttctcggctctgtgttccggtgaaagagtaggaacttcttcaagtttcaaaggagatttgtagcctttacgaagaagtggattcatccatatccaaaacgccttggatactatgctagctgaagcgaaaccactcacgttgtttgttttgttcaaaaggggttcgtatatttcaggttctacgtccattcctgactctgtttctctgttcactgaaatcccagttgaccctttaatggcggcaacgacaagaacaagcgacagaggcaaagacactattgaaagtatatcatccaaacgcaaatctggaacctgggtttctcgaacagagaccaaacgaatgatcccagaagcagaaaacaaggacaccacaagaaagtttgccacccaataaattctaagcgataaagggtgtgtaacagcttgaaacctcttctcatggaaaattaagattgttatgattacttgagttatggcttgaactaaccagaacaagccatctaacatcttccatggcgattgaccactcttagtgagtgttatgatacatacaacagtataacaaattgataataaacctagtcaaagaaactgaaagtttgaaccaaagattggttttttgatgagctctgtcacttgtatgagaggcttgttgaggctcgtactgctttggtcattggaaatgaacctcgagagagctttggattgcaaataccaaaagggtaagcaagaaaaggaaggttcaatgtagatgacagagctctctgaggacaaggtgagaggaaaataaatctaagccattgaaaaacagtcgagacctctgtggattgaatcacagaagatgatgaacaagaaagtgatgtgatccaaaaagaagaagaagacatattggtctcgaactttggaatcaatatagatcccttatagtattccttgttttgtattcacatcaatatttatataaatattcctttttcttgttgtttttcctccctgaaaagataacattgagaaaaaccagaagattaaacgtggaagtaatgatcccgctcttctgaaccaataaatgtagtctggtgtgataagggaaataaataaataaataaata

SEQ ID NO: 297149 - DNA, 3691 bp, Cannabis indica
atgagcatttgagagttaaaccaagcaaattaagtcacataaataaatggtaaacatcttgcttttctgctatgtgtacagatttctgattttggttaatatttgtatgattttagtgtatatctccaaagactcttcttttcaccaattgcaagatttggggtttaatatttattcatttttaacattttagcaaatgatttcatgtatcttgacttaacattttgactacaggcagaacagatatggattcattgcagaaaattgattgataaagattgggatttcaccaccccacatgaaattacaagaagaagtactattcacaaaccaaaaatttcacttcctccaaacacaaaagaagaaatttttgattgcttaagaaagaaattttttctatttaatgcttcagatagagaagccatcccaagttggttcttgaagtgtgttgagttgttctttggttggtcaaatcctcctagaagatatttgacagctacagctgttcaaacaatagtaagatctcattcaccaaagagaacaataatatcacaaagccaatcaatacaacatgatgagccatcaccttcaccttcaccaccccaagttgaagcaccagacccttttttcagacaagatgttattgatttaacaccttcaaattctccccttgagccctctccacctaaggctcctgcagacttgccttcactagattttattgattcacctcctcctcttccaccatcaccacctcataaacattatgcttctatttctcaatcagagaaaaataatgagaattcattgaagagaatcatatattttggaactgcagctgggataatacttttagtcttttctatgcttctatgttgttgtttcaagaagagtgttagagatggacataaaagggatgagaaacctcttctcacattgacctcaagtgatttttctgctggtattaataaatttagaataatatcatttttgccccctgaattatgaccgttatagagttttaccccttgaacttttctctgttgcaaaaaatttcttgcaaattgttgcaaatattctctccagttacattctactcatttttttaaaaaacaatttgattatgtatctatgagttacaggtataattgcattctaatggtctattttaataattttaagttacatgaaatccaatttattgacattaaacatacgaattgtagctctaagaatccacatgcatattctcataattcatcatttatctgctatttatgtatttattttttgtttgatgaactgtactagagatatttgcaataattattatagttcaagaaaaagttatgcaactgaaaaaagttcaggggacaaaactctacaatggtcatagtttgggggaaacaaatcctattcattcattgatttatcttttcttttgtttgtgactcaagttatttcaaaggttaagggacatgatgatgatcatttattattttgcagattcatcacagaaatcaattagtataggaaatgccagcaacaaagacttaaagactagtagtggaaagttttctatcagtttgtcaatgaaatctgaaaattttgattccccacttggtgaagcaacatcaacagaagcttcattatcttcacttaaaaattcttcagagaaaccaacttctctaccttctgggccaccgccgcccccaccagctgccacgcgccctcctccaccgcccaaggctcgccctccacctgctccaccgaaagccattcctagtaaaggtcaccctcatcgcaaaacacacagtgatgatagtgatgctgaagctagagctcaaaaggccaagttaaagcctttcttttgggataagactgttctcacaaatcctgatcaatcaatggtttggaatgagatcagtgcaggatcattccagtaagaatacaatgtccattttgataaagattatttaacccgaaatggcatattaacaactgttctgctcacttttatctaaaactttacaggtttaatgaggagatgatagagactctatttggttataacaatgagaaaaacaaaaatgaagggaaaaagactcaacaaattcagaaactcctgttcagtatattcagatcattgaaactaagaaagcacaaaatctagccattctattacgagcactgaatgtaacaacagaagaagttttagatgctcttcaagaaggtaatgagcttcctgtagatcttctccaaactctcttgaaggtccaaccaacatcagaagaggagttgaagcttaggttgtatagtggtgatgttttattactcggcccggctgagcggttcctcaagatcttggttgacattccatttgcttttaaaagattagagtcattgctcttcatgtgctccttccaagaagaggtctctagtgtcaaagaatccttaacaaatttagaggtgagacaatgtaactgtatgttaatttgttagaatttggtaagctgtacggggttccatctcaaaaccaattaacaatgacatgtatatgttttattgatttggttttggtctacacttgaaatggcaggttgcttgcaacaaactcaggagtagcaggctattcttaaagcttctagaagcagttctcaaaaccgggaatcgaatgaatgatggtacctatcgcggtggagcacaagcatttaggcttgacacactcttgaaattggctgatgttaaaggaactgatggaaagacaacacttttgcattttgttgtgaaggagatcatccgttccgagggtgtaagagctgcaagaacagccaacacaagcagaagcatgtctagtgtgagaacagaggattttgcagaggatatcaacgagggagcatccgctgagcactatcgaagccttggtctagaggtggtttcgggtttaagcaatgagcttgaagatgttagaaaagcagcagtggtagatgttgattctcttacgtcttctatattaaaaatggggcaatcattgcaaaagacaagaacatttgtaaattctgagctgaataatacgaatgatgactgcgaattctatcgaactctagctagtttcattgaacaagcggaagctgattcaacaaaactgctagaggaagagaagaggataatggctcttgtgaagagcacaacagattacttccatgggaatgcaggtaaagatgaaggcctacatttgtttgtgattgttagagacttcttgatcatgttggataaagtatgtagagaggttaaaacttcttcagctaagcctacaaggaattctaactcaaggaaagacacaacaacaaagcctacatctccagaaactagccattcactctcagatgttcgtcgacgactgtttccagccattgctggacggcgaatggaagattctagctcagatgaagatacttaatcttctcaactcatgaaggtgtgtgagcattttcttccatatatctgaataaagagaactaaacttttaagtactcttgagcatattatagagcatgttaagaacaaacataatgaaatgagcattgctacttagcaccaggctcggccctggacataggcgggctaggcctgtacctggggcccacccaacctaggggcccaattttttttttcttttaaaattatatat

SEQ ID NO: 297150 - DNA, 1856 bp, Cannabis indica
aaaaaaaaaaaaaaaactctgctaacaaagggcataaaattttagtgctttcttggactacctaataatctaacatgagcaaatagaataggttgaaagaagttcaatactgcatttttcaaaacccgaaaagaaatattgataaattacagaatacatttgtctgacctccaatattagcaggaaaagtcacctcccatatgtggactgtaccgtccgaagatgtagatgcaaagactgcttcagattccgaaaccataattccagtaatgcaagtgacacctttcttgtgtgattctggtacttgtgaaacatttctccactataatcaaacagacacagaaaatgaaatgaatccacttatagatgatatctttcaacaagtaagtagagtaaaattttcaaagataataaaaaagctacctttccttcaagaagagataattcccataaaataatggtgccatcagcatccccagaaagcagataatgccgctctaagtgtttagctgtccataaacaaacaattccaataaaaaaattattagcattaatgcttatttagctttcatcatgtttcaaatccaatcttaaatctttcaaagtttgtttgatacactgtattagattgtattgtatacaatctaatattatactatacaatacaatatactataatactgtgtactaaacgaaccctaactaaacaacgtgtcgtattcaattgggatacagtcaagaaccaaaatttatggcatcaaaactttccccacctctttaggaataaaaagtcatcataacttctcctaaaatcgactaatgttaataccaagggtaattttattacatcgtattacgttgtattgtatagtattacaaaagtgtattatataatatatatttttgatgtaattctgtatttggtattgacttctatcttatataaacatacaataatttcatataaatcaaatttaacataatataatacggtctaatactgcgtaccaaattaaaagttaaatttacaattttttcccattactagcatagcaaaagagcaaattagctacaacaacacaaaataaatgtaacccaattttcttcaagcttggaattaataagtgtatatctaaatacatataagggtggataaagacagtacctttaaaagcaaatttagcattaggaagccattgagtgcaattaacagaagccttatgacccggaagagtagtcaaaatctgagcagtctgcaaaatttaccaacaacaaaaaagaagataactttgaagatattcatacagtaagtaatgatgaagaagaagaagaagaagagaaaaaagacctttggagagaatataacgacggcgttttgagctccaaaggatactaaatcagaggcaccccatgaaacgttgttgactattctgttgcagccagctccgatgaatactctcttcactccaactccgccgccgccattagacatgtctgactgactcagtttctttgctctaatcggagaactgaaactaaaacactcacagagacaagtgaagatggaggctgccattttgggcctgctacttctaaaattttatgggcctatggttttcttggcccattatgttttttttagagaaaaatatatggggtaagttgaaaaataccccttttaataatcaattaatcaaatttgcctctaattttatatttatttgaaatatacctctttttatatgtattgtacctaaaatatcctgacataagagagtcacatagagagtatcttgaagtgacaggggcgaaattggtacaatgtttaaaaaaagaagtaaaaataatagacttta

SEQ ID NO: 297151 - DNA, 4805 bp, Cannabis indica
tttttttttttttcaaacatattgctctgttattatggcaagaggccaagcaaagaaacttatgttgcttgctttcgttttgttaggtttgaaagagctcgtgtttgtgtatcaaaaatcccatttttttcatttgttttttatgaaagtataaattctatcattttattgtttgggtggtcaatctactttcttttgctattatgtgtatctaattctatggcatggagagagactgtggttagtattaatggatttctggagctgaaatgtgtagaagagaaaaaaggaacaaatttgagaatatttatgtaatgaatgtattttaatgagaaaagattgtgattattgatgattttttgtccatgcagccggcaaagccagagactgtaaccgagcctaagcgtagtaaagttgaaatattcaaagaacaaagtaatttcataagatatcctcttaacgaggagatattaacagatgccccaaatatcaatgaggctgctacacaattgatcaagttccatggaagctatcaacagtataatagagatgaacgtggtcaaaagtcgtactcatttatgcttcgtacgaagaacccttgtgggaaagtcccaaaccaactttacttgaccatggatgatcttgccgatcagtttggaattgggacactaagattaactacgaggcagacatttcagctacacggggttctaaagaaggacctcaagacagtaatgagtagcattattaaaaacatgggctcaactcttggtgcctgtggcgatctcaataggaatgtacttgctccagctgccccacttgttagaaaagattatctctttgcacaacaaacagcggataacattgcagccctgttaactcctcagtctggtttttactatgatgtgtgggtggatggtgagcaattcatgacggtagaacctcctgaagtaaccaaggtccgcaatgataattctcatggaacaaatttccctgattcacccgagcctatctacggaacacagttcttacccaggaaatttaaaattgcagttactgtaccaacagataactctgtggatcttctcacaaatgacattggtgttgttgttgttactgacgataatggggagcctcagggtttcaatttatatgtaagatcatcatgtcttgaccaatgtttttttgattgctctagcttataatgttagtatcttataatttctctcacaggttggtggtggtatgggaagaactcacagggtggaaaccacttttccccaactggcattaccattgggatatgtcccgaaagaggatattttgtatgcagtgaaagctattgttgttacacagagagaaaatggcagaagggatgatcgtagatacagtaggcttaagtatttagtaagctcttgggggattgagaagtttagaagtgctgttgagaaattttatggaaggaaatttgagcctaaccgtgaattgcctgagtgggaatttaaaagctacttaggatggcatgagcaggtttgttcaactcatcttgacttgaagtttatgatttctcatctggaattctatgtttgaaatactactcccgacattgagatttatcatggctcttcatagagtacagctgttaatctgttatagttattattctcacacttcctctttagctgttaatctgtcatagttattattctcacactttctctctagctaactctgttacttcaccatttgtcttatgatatgtttacagggagatggcaatttattttgtggactccatgttgatagtggtcgtgtagcagggaagatgaagaaagcactgagggaggtcattgaaaaatatggtttaagcgtgcggctaacaccaaatcagaacatcatcttgtgtgatattcgaaattcatggaggcgtcccatcactacaatacttgcccaagctggtctgctggtaaattcatcttttttcacttttgcactttattttcccctctttgtgaactaagtagagtattgcatttgattagacgtggtatctatgaatctatagttctatgaatagatcaatagccaacacttctgttgttgtgttatatgctttatttaggagaaaaagaaatattttgtgccactgctgattttggattaatgtcgtgtcatattcattacttacttttggctgtgttcagcatcctagatacgtagatccccttaatgtaactgctatggcatgcccggcaatgcctctttgcccactggcaataactgaagcagagcggggaatccctgacatcctaaagcgtgttcgagcagtttttgagacggtattgccacaatccttcattaatttaagaaataaaaagagaaaaaaagtgtgaatcaatatttaaatgttagtgtgcaaataacatactgccattatatttcaggttggtctaaggtacagtgaatctgtggtcataaggataactggttgtcctaatggttgcgccagaccatacatggccgaacttggactggttggggatggtcccaatagctaccaggtattttgaggacattttctcaaagatgttgtctttttaaggcagaagtattatgaaaccactggacatataataatatcattcttattatgtcttttaacttagtatagatttggcttggaggaacacccaaccaaacctcccttgcaagaaccttcatgaacaaggttaagattcatgaccttgaaaaagttttggagccattgttttatcactggaaacgcaaacgccaatctaaagagtcatttggagcctttgcaaatcgcttggtgagtggtaacataattatctgcaagctctttgtttctacttgtatttctgatctttaaggaaaacttgtctttgtaacttatacctagaatgtggaagtgttcttgtcattggtaagtattagcatgcttggtgatgtgggcttgcttgtttgttttcttcagggatttgaaaaacttcaagaaatggttgacaaatgggaaggtccagtagctgcttcatcacgacataacctgaagctttttgcagacaaggagacatacgaagccatggataaactggcaaaactgcaggataagagcgcgcatcagctagctatagaagtcattcgcgattttgttgcttcccagccaaatgggaaaagtgaatgattggtttgaagttatgttcatgcttagcaaaacacagccaaggcagactaggaaataatacctcttatatgttctgttttagagtttctttctggtttaggtattattttttttgagattgcattttcaagtctctgtctgcctggatttgtaaaataaggctggtctgttttttttgggtatccctatgcaagagtaggtgaatgcgtttcctcatcgtctatgatttttgtaacaagatcagtttttgtccgcatttccatcactgaaaagtgttctaaaaggctaatgtgctaatatgcagaagctattcaagatattttaccaatgattccactggaagtcttatcaagggtttgcatgaactcaaattttgtaggttgtccaacctagaaagtatgcctagactcatggggtatgaccatatttatttgcacttttgttttgaagatcttattgtcgaagagggtagttgttttactttggaagtatagattttttagtgttattttctttaccattacaaaatcgaaccaaatatctcttactctactgttttcaagatcttgatgaagattttatcgcattctattggtaggagggtagttgctcttcgcttcccttgcatttgtgggttttggttgtcctttctttctttcccagaacaggcaagatagcacctttaccaacctaaaaaatgcgtcagatcttgtgacctattgacatataataacaccatgatttcaagggtctccatcgtaatctgtttgacccataggcaggcattacacagtattggataaggtctttttggtactaagcttgtttttgtgcgtatattgcacaaaagccagatgggcattttcaagctttactatgagaattgctaagagacactattggtgcctagtaccctccttgatattatatcgctgttggtgtgttatcttaaattttgtctacttgacgtggcatgttcacaaagtctctttagaaggcataacaaaaccgtcaaggaccaagtgagagaagttaagcaagccgtcaagaagctgcacaattatgtctggtcggccacgtgagtacatagaccggccaggaggagcttgtggtttgagcataagctagtcgactaaaggtgattgtcagaccaagaaagggcctgttcaatcaaggaagcctaatctttgcaaggaaagttgtacaaaagctggccaacacatactaaggttagccaacacttgctaaggttggcagacacttgatgtgcagcccccaggctggcaagcacttgatgtgcaacctacacgctggcaggcacttgatgtccagcctgcagaccctgataggcacatggccgactagaccatagcaagcacatgaccaaccagaccctagtaagcacatggctggccagaccctgtaggcaaatggccggccagactctccaggcgcttgactggccagaccccagcctgcaccaggcaagcctttggtgcacaaccttcatctgtggatagcaagttaagctgtgatttggatttcaacaacccacaaaataggggagaaatattagctattcccctattcttaagggataatt

SEQ ID NO: 297152 - DNA, 2367 bp, Cannabis indica
atcgaaattcagcgatcaatacggatcaaaatccggccactatgcacaaccgctagaacataatcttaacaatctaggagaatcctaacaaaatttataaaataaaaaataaaataatttacattaattaaattattagagatcagatttataccttaatggacgatgagattaaatgattttctccacccaaagcggtagccggagctacaacaaccacctctaagctcagtttaccctaaaaaactaaacaaaaggcaatcaaccctaaggccgcagtgacggacccagaatttttattatgtgggggcttaattgttattaaaaaaaaatttaggtctactttatttaatttatttatttttgtggggttttttttttaatttttttgttgctataattatcaaataaaagaaaaatatttaattttttaaatatatttcttttttcactgggggctcagcccccacaccaacgtgagtgtgtccgtccctgcctaaggatatattttttggtatgaaaatacaaaattaaaaaaaaaaaggtaaaagcggatgaaaacaaaaaaaaaagaaaatggggggaagaaaggggtggttggccaaggattttgtgagtttgagaggaagaaaggccattggttatgttggggcttgagaaaggcgatagctggagagagttatataaacacgcattgcgtcaattattataaaataatcgacgtcatatttttttgattaaaattaaaaaaattaatcaccctatggcgttaattttttttaattaaaatttcatcggttattacaaagtaatcagacactatattttttttcattaaaaataaaaaattattaccctatgactttaataattttgttttgtataaaaatttaattcaggcacactttatgacgtcagttgtttattaattagctaaaaaaatggactctaaaagcttattttgtagaatgcatgtatttaattaattgctctttttttatgcattagcccaaatttatgctttgatatataagttaaagtcgattactatgtataagagatataaaaagacatcaagaatctcattactcaagaaaaagtaaaaattcccttaaagtgcttgtactgatctagcaacgtccgatgctaaatatagtttaattatcttcacagaataatattatatggacattaataacataatatataattaattagctaatatttaatcacccttatttgtttatatataatatgtttcccagatggatatatactttatacagtactcatagtcatatgtataactatatataattaatataacatggaataagaaaatgaggtgttcttaataagagcaacattatagtaatatttaaattagtatagatcaaattgtaactgcgcaagaataatgatgggttgtagggaaggaggagaagatcccttgggagactacaaaatccgtttaatgttccccaaactatgctttgctttttcttcctttcatctctttttcctctatccttaccttaggtctcagctaccccaacccaagtgcataccacatgggtctgcaccttatttactttctatggtctttatttttttttgtttgattattttaaatacactaaaagtgatgaggagagagacatagaaataaggctaatttttagttttgaccccaaactttgacatatactaaattatgcctttgaacttttaagatgagtgaaaatattttatgaattattgagattgttagatttaagaacttttgtctaattttattcaattttactattttagtgattgtttatatactaaactatgctccctaaattttgatatatatcaaatcatgtctctcgaactttaaaatgtattaaatcatgtcctctaaactttcatccatgttagactttttactaaaagtagacaaaagtccttaaatccaacaatcttaatagttgaggtgtattttaaacgactttaaaatttcagggacataatttaatacatgttaaaatttaaacggtaaaattatgggactgagagtaagagcggccttgagaaggaatagagcgtggtcttctcccttctgtgttttaagtcttagatgtagaccgccacatggtgctctcttgttccttttctcttggactttccatcaataaatattcatatctatgtaggttttatcctatattctcataaatttccagaatctctcttttaatttttcagaatagaccaacacacaaactatgcaataatctttgatcaaattttattttttaatgtaattaactcaatatataattgaataaaaatgtaaaaacatgaatgaaaaaaaaaaaa

SEQ ID NO: 297153 - DNA, 1057 bp, Cannabis indica
ttttttttttatttattattttgagggattattctttttactttgatgttatttacttatttatgcttgacttttgggttaaggtaagcgatatgttatggcctcggatattaaaatgggccttctacaattaatacttcagcccagcccagcccagcccagcccatcgaactctagagtcttcatatttctcttcatctattttcattatatatatctatatttatattttcatggtttcaatatacattgatgattataaccatttgagaaaagacaaaaaaacaaaagagtcaagaccgacttggagagcaagcaaatttatatctatcaacacaaagttaagttaaggaaaataacaaaaatgaagttttgagtaattttgcagcaatttttaagtatttagtagtaataaactaaacaaaattgagtgtttatatggcaaaattccctttatctaataagtaaacaaaattatgtctaataattaataattaaaaaataaaattagtacgaggtgatgtcggttgaaagtgaagtgtgtcttgtcttttttgttttgattgttatgtatccaaatcaataacactatcatgcaactaattccccacatgtatatgcatcaattatttaatattacaatttattgcgtagtgttgtaatttgttattacgggccgacgtttttgacacaatatgaaactaacatgagttcggaagatataagtacgattaggcacgaaaaaaatatagatttgagtatgacacgatacgatactataaattagcacaacacgacatgaaaaatgtgttcttaagcacgacacgttacgagaagtacaaaaggcacaacatgtaagcacgcagcctgaaaagcacgacacgcaatagagttcgaaacgcaccacaactccttttaaaaaggattatgcttggcccatctgaaggctaacttgttgtaggtgatattatttgagaaaattacactctataccctttttatattattctcttttatttttaccttctttttaaaatctatcatttttacctctttt

SEQ ID NO: 297154 - DNA, 6158 bp, Cannabis indica
tgagatgttgtatggaaaaaaaatgcagatctcatgttcattgggatgaaacttgagaaaagaaatacctatgtccaaaatcagttcaacggaccaacgaggcagtagagaagatcaaggctagaatgcttgcctcttagagtaggcagaaaagttatgcagatttgaaatatagaaaaatagagttttcagaaaaagatcatgtcttcgtataggtatctccaatgaatggggttaaacattttaagaaaaaaggggaagttatgacctagatttatagggccttttgaaattcttgaaaaattttgattggtagcttaccgtctaggtttgcttccaacattggcaggagtacaaaacgtatttcatttctccatgttaagaaaatacgtcttagatcccacacatattttgagttacaaaaccctatagctctaaccagatttgtcatatgaggagcaactagtgtagatccttgacagaaaggataaaacctccaaaataagaccatagttttggtcaagatactctagagaaataataaggtggaggaagacacctaggaattggagttcgatatgagggctcaatatctagagttattcaggttaaattttgagaacgaaatccttttaacgggggataattgtactaatcgcatagttttattttaagaattaacaaataattagtgcttattatcataagtaggctttcaattattatttttacaatcatggagatatatttgatatctaggtatattaattatgatatatatatataaaaaaaaaaaatcatattttatgcctggtaatggtggaatgcgacgctggtcctatatagtcacttagacaaggtatagtatcttggttctagtggagcaatatagttagacttttagaatgtcagaaatgtctagagttatggttttggaccattttaaccctaagttttaagtttacttcatggtgaagaaaaagggtaaattagtaattctactttagttttgtctttagtgagggagtggactatgtaataaatcctatgtttatttgattaatgttagcctgaattaattaatccattatctcttatgtcactaaacaaaaaaaaaattaaaaaacaaagttacaatccaaacctctttctctctctctcttgagcgaccatagaagcaactaagggaagctcaacattttccaccaatttaagatttgaaatgaattgagcttagaaaattcaagggtttgatagttaaagctaaggaaagtcttttccctttgttttctatagtacaaagtaaggtttcatgcatgaattttaggattttggtttctgtacgaactgattgtttagggtttgttttgctaggttgttttatggttaattaagttaattcatgctggttttgatggcttgggtggaggttaagcatgtgttgagcttttaagctcaaacttaggtcatttatagtgaaatttactacagttgctcgatgataaattttttggttggattaagctatgtatggcttgtttaggtgttttggagctttcaatgtgatttggggttgaattctaggataaatgagattttttgtgttttgcaataaaaaacagcagcccatttttccagaaacggtctactatttttagctgctagagacccaaaagaaaacaaccacccattttatggtattttccctgagaatatcatttattagtgttttctcaatctttagtgtattgtcgtgctatctattgatagggaaacttttagttttgagtcttagttcccaaaaagtgatttagcgtattatttatcagttttacatatgttgtcacttcagggcctataaaccgtcgagaagtagtttccactcaggttgatcggcacagctgaatttagaatcatggtaagattagtataataattacatttatgaatacatgtttagcgtgcatgtcagttgccatcataataacgtattaaggtattggtgaggtatacatagagttgcaatgagataccaatagatatatgttaggcataaaagtagccattaaattagtatatcaaggtatcggtgaggtgtacatagagttgccccaagatgctaatagatatatgctacgctttgtcatacgaacattctagactcagtacgcatggggcacagaataggattacaattgggtgtataggcacctaattataatatggtttatgttatgttatgttttttattttcttactgagtttttcgactcataaatttttttatatgtgtaggtaaaggtaaggttgaacaacagtgagtacgagcagatgaggattgtacatatcggagcagttagacctagagtgttcaatcttcaagataatatgcttcattttgatagtctctaggaatcaacttttgtaactaagcattttgtcaaacaaattataatattgaaaatgggatcccaaattatggaaagtatttatttattcaagtttaaagtttaattaaaaaaattaattattcacgattttttacaaaccctttgtttagcaaaggaatacacggtattaagaaattagggtaacaacctaaattaatagggtgttacaatggcactacaaaatcatgttaaaaaatctgacgaagaagttagaagattgaagaaaatatgtctaatttggcatctatgtttttgttgcagttttgttagatttgtcttttttaaatctctttggcctgagataggacacgaagtgtgcaaatttgtttggcatttctttgatagtggtaacttctcaacagatctacatgctacaactattttcatgatcccaaagatggagaatcctagccatgcaatggaatattggcccattgcttactacactacactgtataagtgcctttcaaagctcctatgcctcaaacttgctttaatcctacctgtaatagtgcatcaaaaccaaggggccttcataaaaaataattaaaaatctcataatataatgatatttcacgacttgattaagcattatggctgcaagaatgcttgtcctagatgtgttataaagatcgactttagtaaaggttatgacaatgtttgttggatgttcctggaggatctatggaaagctcttttctttccctctaggtttattcactggattacgatctatcttaaaaatacttcatactctctttctatgaattgaagaattcaaggcactttcaagaagatgaaaggtctaaggcaggagacccaatttcacctttattttttgtgttagttatggaatactttaccaggaatcttcaaattgtttctcgagaaaagagttcgaattccatctaatgtgtaagagtgttcaaattattagcctttgttttgctgatgacttgaccctcttctgcaaaggtacaagagaagttacaacactgttaaaaattgcctcagatgagttcagtttcatgtcaggcctgcattttaatctatgtctcaaatttactttagaggagtttcagaggaggtcaaagctagcattctaaatgatatataatttgaagagggttgtttcccccttaaataccttagagttcccatgagccctgcaaaatggagatttgtagattatgagataattatcaggacaatcaaactcaagttgcatacctgggaaactaggcatatgacttttgcatggagagtttagttgattcattcaattttggttgggttatgaaattattggatgagcctattttcccttcctcaaagtctgagaaacaaagttgagcatctgagtaggttgtttctttggggttcaaatggaaactggtttatgctccatttgctagctgggaaaaagagtgttgtcccaagtctatggaggaattgggtttaggaaggggttttgattgcaacatggccactttagctaaataaatttgggctttaactaaaaaaacatgatgtgttatgggttaaatggataaacaccatttatctaaaataggaagatttttgggactaccaactaaaacaagattccagttggtatcgtaggaagctttgtaatttgaggaaggtgtttcgaaatgttgatattatggttgtaggtgcttgtgtaaaatttagctcatccaggctttataacaactttcttgtccaaactcgggtgttgcatcattagaatgtttggaataaacttaaccttcctaagcatagattcatgctttggcaggtagtgaacggttagttactcactagagatctccttgttttggttaacttgaacattccctcctttttgtgtcatgtttgtgagctgagaagtttggatgccttaaacttcttggtcacttattaaaaacatagcttgtggcttaaaaatataaaacataaatttaagtgtaaacttcttctattttcatttcattataccaagaggttttacataaagaagaaaattgtactaaaatttacacaaagcttaaaggatttatcaaggcttggtcacctcagcctattggtagtaccgacataagtggtctacattcttggcgtgagggaccctcgatccatccattctcttaagttgaaaagttccttggcccactttttcaagtacttcatatgggccttcccaattggagccgaatacccccactcccggatcttgcaaagctagaaatactctcctcaagatgaggactccaacatcaaatgtacgactcttgactttgaattaaagtgtcagatgatcttgccttggtacattttaagttggacctgtcactgttcttggagttctttgattaagtcaagagaatagtttcaaggagggtcgtaggtgtctcattaatgagaggggatcatggcatccataggaattactgcttcacacccataagccatcgcttatggaatgtgtcctattgaagttctcttcgtgatcctgtaggcccaaagaactcacgaaagttcctctggccaatgagctttacattggagcttcttcttcaaaattgttttcaaaattttctttactgtttccacttgtctgttggcctgcggttgggctatagttgagaaacttttcacgattccatgttgcaccgaagtcagtgaaatgttcgttgtcaaactacttcctgttattggagacaaccttgtatggaagtctatagcaacacacaatgctcttgataacaaagtctaaggccttttttgaggtgacggtattcattagttctgccttaacccacttagtgaaataatcaactgcgactatcgtgtatttgactcctccttttcctgtggggaaggatcctactagatcgatacccttaactgtaaaaggccatgggctacttatgagtgtgatttcagtatgtggtgcatgtggaactttggcatatctctgacattgctcacatttctagacgtactctatataatccttcttcattgtgggcaaaaaatatccctagcaaaggattttctttgacaagttgggtctgaatgtgtgatctctgcaaaatccaccatgaatctcatggattacagtactgattttggttccagcgatgcacctcaaatatggcattgacaatcctcgacgataaagcttcccatccatgatcacgtaattgggagcctgatattggagtttcctagaaaaagccttatctgtgggaagctcccctgaatttaaaaaattgtaaatgggtgccatcaaagagtgtgagttgtcgattatggcatttaccccctggatctcaatgctggtttctctaagtgacaaattgggactactctgtgttggtataatctcagggctgttgcaaatttggtctaacatgtccgcaaaactgaaattttagttccttggaacttggcaaaggtgtaaccttaaaacccttcaaacagctcttaggacatcatgacgtatgcagccattttttcacccttcacctagtactcactaaaaaattgattctccaccaactaggaatcactgtgtactttgctctgttaagctcccacttgcttaaccaattttaagcctgccaacgtggctttgttttctgcttcgtagttggaggcaaaaaaactaaaacgtagagcactctagagttggtgccctta

SEQ ID NO: 297155 - DNA, 6497 bp, Cannabis indica
attattttgaacgaatttataaaaaaaaaaatccatatatttttttgtaatttttgttctaatatatccctaatatttttccattagcttcagttcagttaagcttcagttcttcttcttctcgtctcccttttattttaggtccttcttcccttgtactgggacggagctgcgattcggggaggaggaagaccgcttggcgatacagcaaggggcgacgagcgacgacggtgggctaattgacggagaaggaatcttcaaagtaaagaacggcctttacgactaaggcagcctactcttctaatttcaaagtaaagacccttcgaatctctctctactcgaagtttctacaatggctgaatgcgagaatggcaatcttcatgacattttgcgagagcttccttcccaagctgtaaaggagttgttgtccattggggtttgtatcctattctatacctctttcgcttttcttattttgttttagtgttctgtttatggtttcacatgcgattttgaatgattgagttatgcttttgaacagtcattatgcttattattacttcatcaatagatttgatgtatcaacaatttgttgctctcgagatgaacataaccgcatttggtacattgctgtgttatgattttgaagtaccagtaaattagggtttattagttcttataaggttttgtatagtcattatgcttagtagtttattaccgagtagatttgaaacaccaagttgttggttgactcgagacgatcatagcagcatttggtccattgtttaggttttattgacgactttagggttttatggattcctacaaagctgcttgtaactgcttatgtttcctctggggttctgtacgagaggtattcgtttcttcttttctgtgattggtatgttatcattaggccttttaggtcgacatgttttatcttaatggtcggcttggtagattggtacaaatttttttggtaggttcatatattgctgcttatgtttttgctgcttttttactagtggtatttgttttctctccagttcctgttaaattagggtcatttttcttatctgtttttactatagcggccttggctatctactgacatgtttctttgtaccacaacaatactctttggttttatagctgattcttcttgttattcatcttttctgatgaaggtatgcagccaatgcattttgaggttatttggaattagagaggatctgtatgactgtaattcgttgtcatcttcggttttcagttcagtttttggaaatctatcaggttctgaggagcatgttcaatctggtgttgaagaaaatgaaaactccaacagttctcttatatccaagggacctaaaatcaatcagttgctttgtagtctttgtttgggcatcttgcagttcacttaccgcgatggcaatgagtttgtagtgagaaaggacagtgcttatgaatttgttggctcaattgcagaattggtaaagcaagattatcgtcaaactgatggtttttctcttgaagtgtctgttccaccagttatccaagaaaatgatcgttgtatatggtaatacttgttttgtgttgcattctacttgctcttttattgcaaggcacatgaccatgtttttaaatatccattgaaagtgtttttcgaacatgattttttctttgtttttttactctttattttttaaattatgttatttagctcttaattctgtttataaagctatctgtcattcttttttctctgtctaattattatcaggttatatattaaagaaaaatatggatctgagtcatggtttcaaaggaaatcactttctgattgcatctctgtgaaggatgctttgaaggcttccataatgaaaccacttgaaaaactgcttgtaagttactgtgttagtagctatatggtgtgggggtgtaacttccaagcaaggttacagcaattattatattattaacgtccaatgaatttcctaaagtttcaactcaaacgtattgtaaatttgaagtttttcaggattgcaaatccaatatgagcactctccgtattcgtatgacatacacccaacttaaagcatcaacagcgattttggattttgttgagaaaagccaggttgactgcaaaagaagaaagacaggtatgacaatgattattaaacatttttttaaaacttttttcaataatatgctgaagcatgactatatcaattatttatatgaagtaaaatattttatgtacacatgttgtacaaatatgtactgtatatgactacaaatttgcattaagagactgaatcattaagttggagaatattttgtaatgactttaatttgaaaaaaattatctgcaaaccataagagtttaatttttttttttttacaccaagtgaccttatcgtctctctttgtaaaaaataataatgttattttgccaatttcaattattcatgttttcttgtcaacttccttcattagagaaggaaagagacttctgctactgcccacatttgcattttccgaaatctggtaatgattattatcagtgcatgtgttattgaatgtaacaggttcgtactgccactacatcctgattatgtgcataaaaatttagataggtccaagctaaattcaagtgctttccaaatgattgacagactttgagttttctagttaactgtgtttatgagatgctagtttggttgaaactaatttctagcgtattcccaagatatttatgtatagaaatttatgttcaaattcatttgaataccaactttgtgttaagtgaatctcctttttttatttcatttgattttgcagttgtaagcacacatgatggcttggaaactgttgataatggtgttaaaggttctgattctagtaatgttgcatcagaaatagcaatcctggagacctctcaagatagtcgaatttctaaacacgtcaacatttttcttgaaaaggttaacggtttttgattctctgaacacaattttaaatgagttcttttaatatagacaacaatttttcaaccttttcttagcactattatctatttaattcaatttattttttgacttggtccttaggcctacaaattaaattattggaagataagaaactctagtatgtgtttgagtagggtaggtccccatgagaaattgagttttaaactctactatttttataatgtttgaacatattcctcatgatttattggtgtccttttgtaatattagctccaatcagcaacttgcttttaggatatgttcatcaatatctatgtgattcatgctttttaggctgtgtttcttattttctttactgactttatacagtgtgatgatactaattctgctttagttttcaaaccaggtcagtgaaccctgccaatttgtgctccactgcaacaggattcctatatatgttggtggaagatacctaaaggtttgatatatttttatcttggatgatatttagtgttgcctatagaggattcagtaatgtcatgaaacaaagtcaatcaactaattatgtgctttgttttaatctattcacttgctgtgcaattgaaacttctatgcataatctttccgttctatgtctatattattagtattattatcacttttacgtggaaaacaaaatatcacaaagaaatggggcaatgaaggaaggaaggaagttaatgtgactaatattttatattatgtttgcagtactctagaaatgttagtcaaacacgttggatcattgatgatgaaagaatgggggatgcttctgttgaggtgatatcttcttcgaaatgccatgatgtttcaatgtttttttttgtttttttgttttctctgttatattgctgaacagagttaaacttgatggtctatgcttctctgcaggaattaattggtagcaagattcttcctgtgtgccgaggcgataactacaagtttcatgctgctggcagagaggatattgatgtatgtctacttctttttttaatggaatttctgaagtaaaaagagttctgatgtttgaaagtgcttttcaggttaggatgcttggttcaggtcggcctttcctgattgagattcaaaatgcacgccatgtaccatctgtagaggatgtaaaatccatagaaaaacttattaatcattctgatagtaaattggtaagttcactttatagctgttcttcatttttctatacttgattcattgttgatcagagtattgttaatgtaggttggggtgaaaaatctcaaaacagtagatagtcaagtttggactctgatgcgtgagggagagtcagagaagcaggttctcaaaacttcaccttatggtgcttttatttatttatttattatcattacctatatttttattatttttcgcctggatacctcatacttatcatcaatatttttatttttaatacagaagcaatatgttgcattagtgtggatttctcgaccactcaaggatgaagactttgagtctgtatgttcatttaaggagttggtaagttatttagcttcatctggtttggctctcatctagcttggttcttccatttttgcacattgcattatattgtaaattaatgaaactagtacactttctcctttttttctaaagaattttttgatattgatgattgactgataaaaccttgatatttcaaattcatattgctgcctagttaagacttctcttgaatgaaggtatatttttattaagtttcatgtgttattttgttgaatgtacctagtcttttgtaaatcattttcctcccaagatccaaacagagatagtattcacgcgtattctttcatttttcttctgctccacacagaaggttatgcaaaagaccccaatcagggtacttcatcgccgaagtccactggaacgtgaaaagataatacattggttagttccttttcaattatttagtggaacttcattttattatccatctcttcttgtaatatattatgagattttgcttctatttatatgttgttataggatgaaaatggagaaggttgttgggagttctcaatattttcttttgcatctatgcacccaggtattttttattcttgttttacagctgagtgcaataataagaataagatggaagcgaggagagaatttcaatttaccatatattactatacacaacttttagtgtagtccccctttcttgtattttccctctctgtttcttcacatgttaaattctataggtgccactttgcctttgcttacgtgaagaaaatattacccgaaaattagtgattacaatgtttaaaatttgaaatctaatttatcacttgccataaacaaagacgcaggcaaaagtttaagtcctatggaattcttcttaaaaatgtatagcctaaactatgtttataatatctttgagtgacaggctggcacatatattaaggaatttgtacacggggatcttgggcgtacccatcccaggtaccagaatttattttatcaccttaaactagagacgtgatttgtattttttgtttcagcaattaaaattgaaatctttaaactgattgtttgtgagaatattttatgtaaagggtaaaactgtctgccttttcgttttgtgtttcagcattggatcaattcttggttgtcgggcagagatattacaacttgatgttacagatgtgaaaatggattgctttcttgatgaacaatgttaactctgttgtacaaaacaaaagaagttttagactcctttctaatgagtttttatcctataggaaggagtgaattctaaattatcatcattatgatgattggttcctttagttctttgattactttcctcaattttgatcaatttaactgtgtagattggcagtattttttttttgtcagccatggaaattagtgattttatttaatttatttatttttacttggacaaacggagctcataaatattttaataataataacaataataatttatttttcgaaaaaagataattttaacacaattaatctattttctgatatgtgcaaagagtcattgttgtctttgattgtaatttggtttgtagtcagtgatattgggaattgtgatctacaattctctttcctggtcttaccccagcaaagtatcttctctcttgtatttgtattctttctccagatgaagcccaaaatccttgaaatatattgctctgagtacattattaagtgaaataattgataattgaaatgacatctcagccgtatttgatggcaggtttcacctcttgtttaggccattggcagtgaacgcagtaggatagttgatatgcatgcttagatagatgtttcttacttacttttataggcgaacgattttgtgtccagaagtgtgaatcacggattggaatccgttgtacggcaggtaggtctcacgttagaatagtttatttttttaattatttaatttagttg

SEQ ID NO: 297156 - DNA, 3544 bp, Cannabis indica
ttattaatttttttagttcccatcaatgggtattacccgttccatatatatatatttatatataaattgaaagattttaaatggcccattttacattacaaaagattaggtaatttaaccaccaatccagcttcttatgaacgattaaattcctaaaattttgagtaggaagaacgagaaatgggggtagctgcccagttaaaaagtgaaaagaaaaaacttcaaggcatagcatggtgttcgaacgagacagcaaaaagaccttcaccctcagataggttggccttttggtacaattagatcttttagccacatgtaaataggcaccagcacatagtacatccctgccaaggaccccaacaagaagcgtagaaagaacacaaatggatttactggcttttcttcttcttctactttcggaccaagctgcaataaacaacaaatcttcatcaaaaaaccacaccacttattggtaagagagaaacaaggcacaaggcaccagacttttggaaagaaataaaaatgaattgatttacacacaacctgttttctagtgatgaaagatacaccactattttcttgtgtatatacatacacaagtgactatattattatatattagtattaaacagaaggtaaaacaagccactttgaatatcatggagaagcaaataagatagcataagcctctgtaacgtttccacgaaacaacattggctatgttatttatactaatgatttaacaaggtatggaaagagaatcaatatcattcatagtgtcaattaaggttagtgtttccatgagacatttcatgaacagaggtactaggttagctctaattgctttgtgaaaagaatgagcatgttaatttggagctgcaaacagagaaaatcatgaaacaaaggaattctaatattaacgaataaagcaacgaatacctgaagaggagaatctccggatgcaggtttaacacctgtaacagaacatcccatgatcaaaccatggcggcgaaccccacgataccactttgggccaatccttttcagttgcacatccttaaaacctgccttttggaaccaatcaatatactcttcctcctttggaaagagcatccacacatcagcaaagaagcgagataaccagaatgttggatacacaggaccaatcaagcatgcttttcctccaagtttcaagaccctgtatgcttctttgattccacgctgtgggtctggccaatactcaatactgaagaaaatacaattttgttaacccccagcattagggataccaccacaatggtcagtttctaaacggaaaaagattacacatatctacaatataaatagaatgatattttaactcaagtacatcactacacaaacatgataagggtttgatgataaatttgagagaagatgttatccaaaaagttttgagatgtaccttcctgcagatacatatctatcagcataatcagtacggaagggtaagtcctcagcatccccctcaataatcttgcactccttcaagggctccttctgcttagccttagcaagctgatgaggtgactggtccaaaatggtcacatttttggcatccacatgcttaactatacccaaagtagtgaaaccagtcccaccaccaacatctacgacaatcatattcctgttgttcaaatctgctggctcaagtgcgtcatctctcatgtcctcagtccaatggccagggtttataacatggtcatacacaatcgagagaaacctatagaaccaaaacgcctctttcttgttctgaatgaacctaggttgtgaagctggcctagaagctgaaaggctgcatttgggcacaatggctctggtaccagatttggagattctagtactacaaaccaaacccagcttgggaaaatgtttcccatgaaaatctgaaccccgaaaacccaatccatttggggttattcctcttagcagagtgaggttctcggctccattaagcatcgcagacgccataatttggaaaaacaaagatcacccacaaaaggaaaatggaatatctcaactgggtctctcaatgatttgaagattacgatgaaaacccaatactcgaacttagtggttcttcaaaataaataaatgaaaaaaaaaataaacgatttgtgaatactcaatagcctcagcaggcttaaaatgaaaagtgcgaactttggcttaccagtttgaactttgaagtcggcggtgtatattggcactggcaccacaggatttggccggatgatacgaacagaccaaagatggttgtgagaagtgactaccacaaaccaagtggtcagtgttctgcctacgtttcacaaaatattgtggtggtagcgttgtgctattgctactgctacacgtggtggaatctcatatttttgtacgtttctattgaattaagccaataataatgctacatattattttagtctaggattaggattccttttgagaaatgttctatctctaccactgaaaattagttccttaatcatcgttttagataagggacaccggatttaattgacaaaggggtaattaggagtaacaagttctctctcacgggtggcaaaataggtttcgacgctacacacatacactagacgaattttatgtgttaagattaagaaaattagatgcagataaaaaacgagtcaatacgatttgacacaaaataaaattaattgaattgaatcggatagtaaaatctaacatcaaatatataattggattgaatctggatagacctaaaaacattagatttagtccaataaacaaccctatgtatacccataaaagataaaatttgtattttttttaagctaaacaattaaataataataacaactaaacaataactcaattataaaataaaaataaattaggtaccaacaaattatgtcaactcaaaacaaacttataattaacaacacaaataatcttaaaaattaaaagtaataaccataaacaaataattactaatttttgtattgataaaataagttaattattaaaaaaaaaacttaataacaattaaaattttttggcataacaacactatctacatatgtaaatcaattggacatcaataaatagtgtagataagtccaaagaaacaaaaataaaaaacaacacacaatcttaataaaacaagtaaaactcaccaatggaaaaactatagtgttaatataataagttgatatatggacaatttgtggtggttttcaagttttaatttattttttggaaggttattttggggttatttttaagttttgatgaaatatgttgatatttaatttatttgcatattataacagagttaatgtgtcattcctatatttagttgtttaaacaaaattaaaataaatacttatatatctttttagttaattcccattttctaaactaagtattgtgtcgacaatctaaaatacctaagaataaataaataaataaacataataacaaatcttaatatatatataccatgaaaaattaaatatatgta

SEQ ID NO: 297157 - DNA, 2509 bp, Cannabis indica
ccagctgagaatcactatgaaccaaggctattcaaattaaaaatagtacctcgtcacaaagaagagatgaagaaattgatctctttcactgtgagagagagaagtactttgttgtgaaaataggtgggagatcaatttacctaaaaagacgaaaagaaagaagatttagaagggcaaggcaaaagctgaatagcattaagctcgagctaatgaagatttttgcatatcggtacaattagatttagagtgttcaatcttcgacgcagtaacattttttgtatcgtctttaggccacacttttctaaataattgtaactttaaaatcgggattccgaaatatgtaaagtatttttatatttaagtttaacgtctaattattaaaatttttaaatttcaataaactcattgattcaagcgaatttagcgataaaactataaattcgagcttttaaaaaaggatccaacacccaggttgacctggtttatggcctagcacctagattaacaattaacctgagatctggggcagacttacatgtaggcaaggcgggatagtcgccctccaaaaaaaaatcgagaaaaaaatataatacaatttagttagctacgatatatatttataataaaaaattatatatataaatataatattagctttagtgtaatggttaaattaaattacttatagagtagatgttaatggttcaattcccataaagagcattgttttttttcctttttaagtttacttttgtcccctctgtcttacaaaaaaaaattatgccccctcactttaaatcctgggatgctactttcaattgctcaaatttaaaatcggatgcgaccattgaatccagaatggtcaaaaatagggtagaaaaaccacatcctcaagttcagaagccttgaaagtattaaaaatgagatctcgggagctcgagactaagtacccatggcccaggtgacaaaagccctagtgcgttgggcgattctaatgatgttttgactgtccatctagtttttcacaataacaaatatccataaagtcggagatttttgagtctctcatttttgcaaaacagcaacatctccgtaaacttgtgaccatcttcgcgagaacacagaaaatattaaaattccaataacacgcctaaactagtagggtgttacacaaagctacttatagttaaccaataattaatgagaaaagtgagacaaataataatcaaatctccgagaatacatatcatatactaaaattagttactaatagtaaaaaaattagttacataatattaatatgtaatttttttgaattaatattaatatgtaattaatgttatagcaaaatagaaatattctaatattataataatcttctaatattatttatgataatattaattacacatactctatatatttaatgttaattatcacaaatgttattgaaaacgaatatttaatcaaagttaacataacataaataaaccaaaagtgatcatggtaattaataataataagattagcaatttccaagaccaagagggcaacatttaccgacaatcggtttaaaaggatactctttacaggcttaacaaaactacgtatagtaaatcactaattaataaactaagtgagtcaaataataaaactaaatatccaagaacacataccatatactaaaatcaagtatgtaatggtaaaaaaaattaattactattttatatttggtggctccctaaataaatatttctatatatatcataaatatttacttgacaatcagtttatcaagatactttttatgtattttagacaaaaaaaagcaatgttagagcatggacagaagaagaagagttgttaattacatacttaacaaagctactttagttaactaataattaatgaggaaagtaagccaaataataactaaatctccaagaaaacataccatatactaaaattagtaactaatagtaaaaaaaaagttattagtgtcttattatgatattcttgcacaatgatttttttaatcttgttgtgagaaaaatttagacaacactaaaatcatatgagtattcaaaggaaatgagaatactcagttaaagtcgtgcgagtacttacttagaatagcgagtactcaaattattggctactaaatagacaaattaagagcagaaataaagagaaaacaagagaattatagtggctcaatcagagctcgatttgcttagtccactgttgcaaaaatttccgcttgattttatttgatttagaccactcctttatatagaaagcaggtatcctttaggattacataattgatcaatttaaaactgtttttacattaaagggtaaatactattttagactatttatttaccaattgaaccctttattttgttaaatgacaaaataaaccctttatttttcaaaattgtacaaataggaccctaaactattttttttgtcaaaatatttcataataataatctaatctaaagat

SEQ ID NO: 297158 - DNA, 5778 bp, Cannabis indica
agagagagagagaaattagttatccattcaacaaagatctgtgcatgaactgatatgatattacagcattttggcaaattggttcagatttttcaggtaagagaaatgtcataaacgcatgtcaaagggtaaaagaaaaaatgttagacatccagtagttcagaatgtgaatgatttttatgtgaaatctctgtctgaatcaccacaggtgaaatctcatacatatcataatttatattaaaaccctaggcaagtactagataaattaacactagtagtacaagttagatatatttttccagtccacttacagccatgttgatcaaactaaaacaactatagcaaaaaataggcaatgatcagatttcataaatatcctatataagtcaaagttgcaaaaataagaacttgaaatacgtaaatcatcgaaagaacatgaaaggtataagaaccactaaagtactaaagaaacaaggcaaaaagtactaactcatcagctaatccaaaaagtcaaaaactaagcgataagagttttgtgaaatattctacaatattaatgggtgatatttttgaacttcttgtagacaagaaactacagcaatggctatacccaggagatatttgaacctaaaactatgtgggagcaaacaacaaactgtatgtctgatcatttgagccacttgggtgtactacaaatattgttcttttaagatgctatcagcagaaatgcagtttaagaaggcaaggtgtgcaaaattataaatatccatcaatcaaatgatcataattatggacaaacattttactatttagaaagagtcatcaatgaggtacaacatagagatatagcacaagaatacgaaaatagcccatacctcgatcaatgcatcacgttttttgagttcctcttccaatttcctagttactgtagaagaatccacactctctccagtttctttagaaattgatggaactctagtccctgattcagagctcaatgtagatcgagcttcattgagatgggattcaaggcttttaattttggcctacacagaattttcaaactaagaataatgaaatgatttcagaaattatgtcaaataacagtcataaaccaactactggtccaaatgtccatcagatacccatattcttacctgttgattttagttgcattggaaaaaaatagatatggatgcaattcataaccatcactctttgtaattttaattatgttaatattttggtcaatagctaaatcacattgcaacatatagacaaatagcaacctgtaatgtctggacagttgaatctcgatgttgtatttgcaatttctgctcttgctccaattgtaaaagttgagcaacttgatttcgtagctgggcattttgttctttctcgattttatgcttatctgcaagcatattactctctgactgcatcaagtaacaataacaagagtcatagggctacatagttaatcaaggagaaattaatacaacattcatcatcatacacagttacaccactcaaagtaagaacagaactacaatactgtgagaaactaggaaaatgcttggattgcatgccaatggcaaacaaaattaatatgtaaactctgtttacatgaaaacttgctaaaaaccaaattattattgttcaaaatctcaataattttcgagtacatgagaatatattgaaaatagaacggaatacattcctgaggagattccatgacaaatgaacaaaacatttaattattgttcatgaaatccagttagctctaaaaaatgagcacatgttcaccaattcagagttacttaaaaatacattaccacaccaaaagaatgacaaaatcagaaaaggatatctttgtggacaataataaaatctcattctcttcaagttatacaattaacactaatcgcttcacaactattacgggaaagaacaaccaagtgataactaaaaatagtaaaaaaaaaattaggaagaaaatatgtagtaacagaagtcaatttaaaagtaatacatagagtcacaaacctttaaatccgactgcaatgtttgagaaactttccatgccttctgaacctcattaaagagtaaaatacattgatcattcgcatcctttagtgcatgtttaagacccaaaacttcctgcttcaagtcttggatttccttctccttgtcatataactctttgcgtgcatcatttgcctgcaaaagccatttaaggggtcttcaatcaacagttgatattaataaaaaattaacctatacaaatgaaagtaattcctaattacttcaaaagaatggataattttatgtcagctctaggattaaacataaaacagctatctctattctcaatacatcatcttttcttctctgtactgctacagttttggtaactaagttcatattactgtccctaaagtacagcatttaaaagccaccggccattcccacctagtcaccccagcaaaaactagattgcactcgttggatgcctgctttcaagttcttctacaaagtagaaacaattcaagttaaaagagataaagaaaaaaaaacttactatatctctccatttcttaattgtatcacgatttccaaggcttaggactgcatttcgagctctagcaccgaaattaagtgacgatattgtctccttcaaattcaaagcatttggaaagacattaagcatcatcaaagtttttgaagtcccgcctataggaaagaaatagaacaatgacacatcggatatagtttacctcaaaattcatagaaaatgaaaactagaataacgtatcaaatgtaatgattctccaaaaaaataaatttaaatatatatatatatatatatatatatatgttatttccatcttgatcttgaaaaactcattatgattggtggaatacctagggagtctgcaagcactttagttagcattgaattctcgtaaggaataacatcctttttgaagtcaaagaagccaaaacatcacccaatctacaagaaaaaagttaagtggtaaggtcaatgaacgaatggatagcgagagtgcattgagaaaaagtaagattccggacacagatgttatttatgatttaatgcatcacacaaaaaaaatcaataaatgagtgaaaggacagcttcatgccatccagcatacacaaatgtcataactcaacaacttagttatagtcatatttgccaaaactgcaaatagttctaactacatgaaactgctgacaaatcaaaataaccataatgataaatccatatcgggcaaagagaaaacaattcagctgtcaaaaaaaaaaggttattcataagattttagtaataataacaccaagaggaggctaaaatggtaacgtgtgtgacttgctcttacatagttagagttcaagttcctcaaatattgtagtgtagggttgagcgaagtgtctactttcacaaaatatatactaagtcacaaaccaacaagcatgcaaacaaaaaatccagtaataataataagacaataaaatgataggataatgaaagaaaactgatttagcgaatgcaacatacgctgaaagtgatttcatgacatgcagcaagtccgtcactcgctcaccactttcatcctctgcaatagaaccttcacttccagccaagtcaacaagagacagcttgctatatgagttttctccagtgattaaattgttatagtatatgtgcacagtaagaatcctgtcaaaaaaaaaagaatacacttaataaaacaaaaacaacaataacacagaaactaacatggatcaattttttttaacaataaaatgaaccaaatcttaaaaaattactgtagctttttttatgagtttatacttggaattactgtcataaatgcagctagtatcctatttttcctctctatattggtgggctacccaaaaacgcattcttaagttccattttataaaagcttaatgaacataataaatttcttttaggagttcaatattgagaatgcattatgacaacagatattgagaatgcattataacaacagatattaagaatgtgttatgacagcagatatcttagaatggtacaagattttggtggagaagaaatgaataggtttcatggttattataccacaaaagcagaacatgtgaggtgctagcttagcaataaatgttttttaaatcagttgcgtacattcatataaatatatatatatatatataaaagactagaagccacttttaagaaattacaaagaagtaacgaaacgatataattcatgtatatgtactattgctccacctacagtcatagagatcaatctttcacgagctaaccacagtattggaattcaaattgcctcaagtatttgtgcaatcaaaaaagcccaaataaaaaagaaaaagaaaccacttaaaagaactttagtatgaaaaatacaaaaataataatgatcacttaagatatattttgaggcacataatgttggtcttacaaatgagacacggtgaactttgctacatcattccctcggttctgaaatgcagtttttaggactctagagaagtccaatggattatcaactgtttcttgcacaagttctacaaaagattcaggagatcccaatcgcacctttggtaaggcacctcccaactctgagagcagatccctcatctactacaacattaaaaaatttagcaacaatttgtgatgattccatgctcaaaaattcattaaaaattgaataaaaattatgaataaaaggacctgttcgttgtagagctcagcaactgtaaccgagaatttaaatctagaagtagaagttgaatcagagttggctaaatcaaacagctcctcaaagcaacgagcatataaaccacggtcatgactagatccttcctgaaaattgttaaaaggaaaatatcacatacaatgagatttacatttgtggagaaacatggtcgggtgaattatccatgctataaagaaatatcaatgaacctacaaacatgcttgagacacaagaatataacatataattagaactgtatataagagaacacattaagagtaatagcagtaaaagaaaaatcaatgaaccaattacatacttgaaacacatttcaatcaatttaagcgccaagaatgaaatatcctcaaaacaataatgaagaaaattacaaagcatcttcaaaaatcacttattctagcatagcatctgcttgcatcgactttgtatttgcataaatgtattaaacacaaaaacagataggtcaaaagggatcaattgaaagaatggggtaatttaccatagtatgcgtctttcctgagtacgtttgtccataagcaaatattgaaatgttatatccatccaaagctgattgtaccaatggctgaacatcactgaagagctcagctgcaaatatgtgaataacacaagcacaatatcagagtaaatagaaaagtagtaattcataagaggagaaaaggaaataataataataataatgttagaatattagcagtaaaaattaggagaaattgtatttagtagattcttatatagtctcctaactttgtgtataaatatagttattctatggaatagaatacacaattcaatcaccatattttacatggtaccagagctgattgtgggattgagaatttgaaattagggtttatcacaaatttgggtttttcaattggggttctttttcgaaaacatatttagagggatctcttgttcttgttgc

SEQ ID NO: 297159 - DNA, 4496 bp, Cannabis indica
tgagtagttctattctatgcacctatttatgccttaagggctttgttgctactgttttcacatatgaaaaaaaaaactacaaacttcaacagtgtccacaaaaatataaacatctctatagcagtcataaaaaatcctctagtgcatccaggtacatatggtaaacaccaaaaaaatcaaatggtcacttacctgacagataacaatgctgtctttaaatgttgccgaattttcttcctccgtaatgaattaatattctcttggcattttttcaagtatttcattgataccaatattcatcctttttcaacatcgactgtttaatacagcatcagttagtaaacacttatacacatctctcaagaattgagtaacagcaacttcaagataattttctataagtttagtaggagttatttaaatttagaatatttgaggggaagaaagaggtcccaacctcattgagatgaatatgaccaactagacctgcattcacttcacacccaccagagggatcctggttcctatatctgtgaatcaaagaaaattggaattaggagaagatggctaagccaaatagaagtcacgtaacatatctgtctatgaaaatatctaatcaacacaccaaatagatattatggagaaagaatataccgtaccaaagaacaagaaactattaaagaatgagcacaattagaaggttgaactgagaaaccctgatgaacaatattatataatcttatattctgtaactttgcttaaacatctacttcttgtagtggtacttaatgacaaataatcatttccaaaggacaaacgacggtgcatcctgtccaagggtcaaatgcagcaaaaatacaaaaaacaaaatagggagctgcagaatttgggcaacggaagaattggcaaagggaagcacagtggtgtcccattaagcttctcccacaaaatgttatgagaaagcaacatctccagaagaaaaaaaaataaaaacaaaaggtggtgtactaattaaaacccaggacaatttttttttaatttccaaattaacagcaatatttctagtattattgatccaagatcaaaataaaagggtgaaatattgacatataaaaaaaaacaaaaaaacataggcatcgaggagtacttaaaaatcaagatccaaagaatggatatttcaaccctctatgggaaatacaggagcaatgattatggttttggattctagaaggaattattgagagcctgtagttaacaggtttatttcaagatgagttaataggcttaagcagcatacttggggagatgttgcaattgcgggagacttcaacttagtaaaatgaacacaagaaaaatttaacaggaatgccaacacaagtataaagctttttgatgctttaatgagaactatttgcaattatacatggaagataaaagagtgatttttttccccaaatgaaacaacacgtattattatagcgcggaggttaagcaaaggagaagtggtattaagacatatgaatgaagagattcaataacatgtataagaacttataaatggagaacataactgtgtaggagataaagaaaaaataaccagttgaaggaaaatgtctaacatactcaatcatgaactccactgcagtatctttgaggctgacttttcccagttgattcttcaccagataagcagcattttcttggcagtaatttctcccacaatagcagtcattcaaatacaagattacacgacgatcagtaggctcatttccaaaactgaccttacacagcagtatttcctgaagaaaaggtatgaaaaacagaagttacaccttacaccaaacaccaacgtttaataatgttcccaacaatcaaggcagacagcaagacagaataaaacaagggaaaacagacatagaaaatcctttcttctatcaacccccgagcttgtaacttattatttgcataggcagaacatattggaggcctaacatgctcattcatagcaaaaataaaataacaactatatgtgtatgcacaataaataatcacattaacttctttctgcaaacacaaatatagccaaaaaggatcaactaccttcatcatctcccatgagttattgctacttggactggaatcgagaactgctttataagcaggatttgacatggcagttgcagctaacacaccaacaggttcaccagcaggatataaattttgagcctttgttccatattcaaattgaatgattgagttactacaaacattcctaacagtgccatcataacatatgacaacatctcgaagaatagccattaaattcttgaacaaagttccaggttctgttaatcctcttgatgaccgaacaagtatttctctagtagatattgaatggaccatctcttcatatggatctaaaccatagaaaaaacagctcctaataaggccatgctctgcagaagggtaatcaacgtttggaggatatatcctactatatagatcggaaacatcctcgaacaaagtcttggagtagaattttcccctgtcagacatctgcactcctaaaaacccaatttgttgaacaactttgttaactgcagaatcgctcttggtgtcgatcaaatctccaagagctgacgaattcagaaaaaagttcgtgacagaagctttgatagaccgaatttcattctccaaattcaactccaccagctcattatactttgatctaaggtggaacagcagaggagaaatagcctgaatatccttctggatatttgtaatggcctccaaagaaatggaaaaatcttccaaccccacactaaaaccatgttcaaaaatgttctccatcagcaaaggctgtacagaattgaagaacttcaaaacctcttcagaacctttcttaaagaaaatcgaggtcacaatgtcactaatgactgaagagattacatctctgttgaaatccaagattagtatttcacttcctttaaccaagaatctgtcccctgagcaatcaaatgaagcaggtaaagcagattgtagaacttgcaatgcagtccaatgtgggtccaaaaaaggagccttcttccaaagagcaggttgtggcaaagaagatgaggaaaacatggccaattgttgtgctgataccttgtccataaaatatgtctcaaacaacatcttcaatgacagcaatgagtcactggccaactgcaagataaggttgccactatgtgagctaagaagctgcttctctacagaaaaaagctccacaacttctgctcttgctgcaagagactggggatagaacaagtgaatacaatctccgtcaaaatcagcactcaatggtccacaaataagagggtttatctttactatatgatcatcatgaacatatactttcagtgcttgaagcgagtgcttatgtgtagtaggaggccggttgatgaaaactatatccccatccattattcttctatgtacaacctgaccagttcttaggaaagtatgccccttagatccctccttcaaggaaaatctagttgaaccatctataaaggttaagcacaagttattatctacaagattttgtaaataattaatgttgtgatcattaaccctctcttcgaaagttattcctttggcgatatcataagggataccaacctcgttgacctctttataagcatcaccagttattacagttctagaggagaagcctgaaccctttctgataaacaaggtcctcatcttttctagccatactttggttgaagagctcttggcttctttgttgacaccaaaacgctcatcaatgccacgggacgccttcacagtaccccgagcttgaagatactgatcaactgctatctgcaactcattggcttcaacttcagtggattcaaagttcggtatacttcttgaacttttaatgatttccacttgccttagaaccttttttagcatcgccattgaaggatcctagaaagaaagaatgtacaggaatgaaaagttaattaaaaagggtagagaaatgggtctacaattagaatcagctggccaatttagttatattgcaattgtcgtaccgttgacattatagtgatgccatcagaaatttctggtaccgataaacagtttggtggaacaggtaagaacttgaggatgtagccagattgagggaaaaagtgtttgctctcaagcttctttattgtttcactaggaagtctcttgattatttcgagtacctgttagtaattacgaacaattaaaaaaaaggtataactaaagaacaccactgcactccagcacaagcataagcacaaagtcaaaaactgttacaatcaacaaaacaaagacatacatcatatcatttatatttccattagcatgtatgcaagataaaattttacttcaaatacaagaaaaaaaagagtcaacattattatttagaaaataaaatggaaaacaaatatatgtatagatacatatatatttat

SEQ ID NO: 297160 - DNA, 3509 bp, Cannabis indica
ttttttttaacaacagtcgctaaaattttgaaccgtccccaatacaaatttttgtagtagtgattagatgttaattgttattagtttttggaaaaccaaaaccaccactagtccactggaaattaaactgtgaatatataatttaacaccaacatcccaatccccattcttgtctttaatttcataataagtagtaaacatactatcacaatccgtacaataatattactatgaaaattataccttattatacatccaggcttagaaaaaatagtacattacaatattgataaagtagtacagtatactattcattcaattaaatgttttcaaataatactagtgtaggtatatgtctatatcagaaaacctaggggtgggaatggcggctaaaggagtttgtttcttaagaactaacccaaacttgtctaagaattcaaccttagtaccaacaggcaatttccagtcaaagcaatgcatgaaagaagccaataaatgcatcaccatcttctctcctaaagaaattccagcgcatattcttctccctgatccaaatggaagatagttgaaattttgatgacctgaaaagttataatcaatgtctccttggattttatctccacagaacctctcaggtaaaaactccaatgaattgttccaaacattaggatccctttgcatggaccaaacgtttagaaaaatagtagctcctttgggtatagtatagccaccaacaatagcagattggcttgacttacgaggtactaaaaagggtactggtggatgtaaacgtaaagtctccttaaggacagcattcaagtaggttagttttgataaatgagagtcttctacattgttgttcagcccaacaacttgtttgagttcctcttgaattttattcaataccactggtttatttaatatctccgccattgcccattcaactgtggttgttgtagtgtctgttgctgccaagaaagtgtcctatatatttaacacaacattatatgagccaatgatactattattattagtcctatttagaaatactataatcacgtttaagtatacatatatatatgtaccgtaagcaaggctttgatttcagttatggtaataggagtttcgctagtttgatcctcatgaagctccataagatactgcaaaaagtccttccttgtgaacgccttgggcactggatcattcaaagtattctttcgtttagctatggctttatcaaacacggcttcaaacatttgaaaaatctttgttgactcccttgccattccttgtatatcgaaccacttaagcactgggaaaacatcagagatattaaatttcccatttatcaaaacgagatcctcaaccgccttcttaaactgaccgatatcaatagcaacgtcatctccttctaaggaagcaccaatcgtcatgtttatgacagtatccattgtagtttgaaacgctaacctcccaatatcaactggggtgtttatgttttcgaagaggtacctgatggattttctcacctctccccttctcacaccgtacataatatcaattttggtattgcttgacatctcacgaatgaagatttttcggagattcttccattctgggccatatgatgcaaaagcaatgtcatggccagcatatgtggtgattgaggaacaaatactaagattgcggttggcaaacactatgtcttgttcgcgaacaacttggccaatgagttgtggtgaagtaatgaccacgcatagtttggttcccatccaaaacttgaaaattggaccgtacaccttggccaaagctgagtagtcatggtgtatgtttgaacttaggaaaggaaggtatccgactagtggaaggccgtgaggtcctggtggcagtggtggcttggacgataagtacttctttcttgtccaactaaaccatatcaaggcaaaagctgccaaagcgaaaagaatgagaatgttataaaggtcataaccataatatttctggttggtgaacatagttttttactagctagtgtagtatgagtatactcgctatatagatggtatctagctataatacggtttacatatataatatatatgtagtgtatgtatatgtggggttatatgtagaatagttggaacttgaaagcgatatttatagagtgaagtatgtgacttttcttcagttggattacggatcattatatgtggttcatatataccggcaaaattattttcttgaaattttgggtttgagctaaagtgagctgttctttgatttttctttgtttacttttcatttaggtggggtttggttggaaaaaatgaaaatgtaggaatagaaatgggaataaaaatagaaatggagtgatataaaatttaaaatgcataaaaaaattgataaaaatatcattaaattttttcttttgttatatttgaatgatttttatttcctttttaatatggaatggtcattccatcaaaatggtaaaaagaatattccattgaaatttcaatattttaaaatgcaagcaaacaaatgaatgaaataaaaattattgtctttccattctattttattacctccaaccaaaagttttagtgtttggctcttgctagaataagcaactatactttgaaaaattccaagttctaatggccttatattccttgttgtatcttgcgttagacattgatgtgtgataactgattgttgtttttttatttatttgtttctttcttaagtgaaattatagttcatgcatagcgttcttgtagagaaaagatggatgcttatgaacgtaattgatatttctacctatctcctatccaatcgagcaattacagtcaccacttgacttttaagccgtgccatatatgtggagcattgctattaggcagcagtgtgcctaacaccttatcgacatatcatgttgcgattgactagcgatactttctaaaagctattacattaaactatgtgggatagtaggacccgattagttggaccaataggacacataggagggtgctaggcaccactggtaccctttaacttttctcatatatataatattcaattatttataataccggtggtcaaagtcatactttgactaatgtttataaatgatcttttaatttaagcaaatcttcactttttaaaaaaaattaaaaaaatagccaaatacaataaattagttaataaaaattataaaaatatatttatcacatattttttttaaaaaaaatctataataataaaattaagttatataatttttttagtattgcatattattatattgtaacaaaaatgaataaatatattagatcattaaatatatacaacagtatttgatatatcgtattactgaaaatgaatataccgtagtaataaaattatataccacaaataaattataacaatattaaattaatactcaatatatatatcatgctaacaaaattatatatataactattaaaatatgtatacataccaaa

SEQ ID NO: 297161 - DNA, 16399 bp, Cannabis indica
aaaaataaagcttgataatcttgatctcatttaaagatcagagtcctttctctctactttcaccataactacggctttgttaactattaggcttgttatgcagacaattaaagaagtaccatgctcttcctctcctcttttaagtttatatgataatgaacacatgattatgctctatgattcagaataagatacttcatattaaatgctttaagacaatttatttgataccatacatgataacattcattagctgtagtcataattatattatagttcgaatctaatagtaatctcctttaatgaactcattcaatcgtttaagttccccactttgctgttgcaccactgctcggacaacatccttgatagagatcatgccaaccaacctaccatcgattactggaacatgcctaatttgtttctctgcatgcattttaaagaaagagtactgtgatattgacaagaatttcgattgcattttatgcatcaataatgaattaagattaattacctgtcataatctgcatggcttcaaaaatgtttgtgttagatttcactgtaattaatttgctctgttgaattcaaaattcgaggccaagcttattattatagggatataaaaataaacgttttctagaagaaaaagaacaagaaaaaatgaagtaacctcatcagtcattatttctcctactcttgtatgtattggagatcttccttctaaaactattttccttagataatctgtgtgagttatgcatagatacatgacacaaagttaggtgagtcaaactcaaagacaagcatatcgttgacttgggaaaatgcaaaacaaaaatttcccaaaagaaaaaaaaatgcagagatgtttacacctctttctgtaatgatcccagcaacatgttgtacgtgtcccggctttagtacaactaaagatccgatgttgtttcgagccatctgtaattaggataaaccctttttcacatataattaattaacacattattataaaggaagacaaaatatgaaatatttgttaattagttttaacctacatttttaacggcatcattgactatgtcgtctgaatggcaacagagccaagagcctgtattttctccacctttggccatgagtacctctgccaccgttacattttctaatcctttctcttgtacggataaagaccaaccaaaacgggaaaatatcttctctattttggtcctgtctctcccatgtgatgaatgctctaatattgcagctttcaccatttgctggcatgaattcacagctttcacaattctttgcatctttttttctgttatgataaaaacatgttctctaataaatacaacatatacttaaagaagaagagaagaagaaagtttataggaaacagatcagtagacaatagacaaaccttaaatattttttttttaagtttattgaaaatactgagtacagagtaaatgtacggaccagtaaccacatataatccttcctccatattacatgaagcagcagaatctttatcttaatctctttacttgcgaatgtcatttagattaattcgtttcttgaatgagtgaatcaagagaacctttctttttaattagataagttttaggtcttaattttgtcaagaaaccaccttaacgtgccaaatatggaaaactagcttccttatttgatcaactttcttttcttattatataagtttgattaatcttaataagcgttatgatggggcatcgaatttttatcttatcaaataacagaagtttgtcacattctacttctagatttcaaccacacgagtcaatgcccaagaaagaataatgacaaggctaagatagattttaattaaataaatattcttaatatctttccatgtataacaaaaaggctacgggtttaaaaagatgtaagctgacagatgtatacagcaaagtgatagaaaatggaatatggagagcaccacagacgagatgctagtctcccaaatgaagtaaaatctgtctgaacataaaataatctaatatttctttgtcccttgaaagagaagagaagaaaggtatagaataaaagtctttaacgccaaaatgttttaatccccaaaaagtttctgaagtataagttttcggttgtatggcgctatatatgtgtatacgtgcgagcacacttgaatcgatatacaaaatgtgacaaaaataatcatccaattccatcacaattatccatggcagaacgaagacaaccattccgctttcgactcccatggtctcagcgctctacagagcaacaaacacaaagctctcgtcctacatccgtttcacgacgtgcttctagaccagctgggagagccccttcacagccccctccttctcagtctcaaccaccttctaaagctgaagctcaaccatcatcagcatccccatctccttctcctgcaactgcaatcaatgagtctccaaaagaaacaccatctaaaccatctgtaaaacctccaacaccatctggtgcagccactaagtcacctaaagaaacaccatcaatcccaactctcaaaccccaaacatcttctactccaagtcccaaatttaaaacaccatctcgtgcagccactgaatctccaaaagtaacatcttctaccgcaaaaggtaaacgccaaatctcatctcatacagccactgaatccacaaaagaaacacactctcctcgaacaaccaaacctcaaaccccatctcatgcatccactgaatcctcaaaaaaaacattttctaacccaacattcaaacctcaaatgccatctcgtccagctatcaaaccaccaaaagaaatatcttctgccccaacgggtaaatctcaaaccccatcacgtgtagccactgaatctccaaaagtaacatactcagctccaacaagcaaacctcaaaccccatcacgtgtagccactgaatctccaaaagtaacatactcaactccaacaagcaaacctcaaaccccatctcgtgcaaccaccgactccccaaaagaaacaacttctgccccaacaaccaaacctcaatcaccatctagcttagtcattaccaccaaaagaaacatcttctgtccccacagacaaacctctatcaccacctagtacagtcatcaaaccaccaaaagaaacatcttcccccaacaagtaaacctcaaaccccatcacgtgtagctactgaaaccccaaaagtaacatactatgccccaacaagccaacctcaaaccccatctcatgcaaccactgattccccaaaagtcaaacctcaaacaccatctcgtccaaccattgaatccttaaatgaaacttcatttttcccaacaatcaaaaatcaaacaccatctcaagcaactactgaatctccagaagaaacacaatcttttccaactaccaaaccccaaacatcttctgccccaacaagcaaacctcaaacatcatctccagtagctactgagttctcgaaagaaacaccatttgtgccaatttccaaatcccaaacaccaactcctttagcaaatgaatcacaaaaagaaacaccatcatctcaaaattccaaactccaaacaccatctcagttcgccaccgagtccccaaaagagaatcaatctcttcaattcaccaagtccacatcagccactcctcaatcaacttcttcaccctcgacaaatatagctgtaaaacccccatcaccaacaagcactgccaccaactctacaaaagtaacacaactgcccacaactggtaaaactcaatccccgtctagtataaccagtgaatccccagaagccatttccctgccaacttcttcaacacctacaaatgcaattgttaagcctcggtcaccatctcttgcaacaattgaggcctcaaaagctacttcccagtcaacctcttcaccatctgttgaaactgttgtagctaaaccatcatctccatctgttgtagtagggaaatcccaagtcagttccaagcctacctcaccacctcaagtaagaccccatagaggtttaacatctgtgttgtcgtcgccatctagtacaaccagtgaatcctcggaagtcagtgccctgccaacttcaacacctgcaaatgcaattgttaaagctcaatcaccatcttttgcaacaatggaggcctcaaaagctacttcttccccatttgctgaaattgatgtaactaaaccaccatctccatctcttgcagtaggaaaatcacaaatcagttccaagcctacctcaccacctcaagtaagaccccatggtggtttaacctctgtgttatcgtcaccttcaaaaagagactccaagtcaggggcaacatcaccttcacaatctcgtgtgacttttgagtctcaactagagttgggaaggtcatttcaatctcagtcccctacttctcaacatgcttggatggataatctgggggtttcttctccaattagcaaagctactcaacaaaaagcaaaggatgacattgtatctcaatctccgtcttcgcctgagaaacctcaagttagagctcaggttcaatcatcaaatcatgagcaagaactagagaaagaagtagcttttatggtgtcattgcgaggggctgaatcaaaagagaaaatcacatctgaaactaaaaggataaaaacctctcaagatgctcttgctgcaagggagctaaaagaagttccaatgcctttggaaacaaccatgtcactctctgaagaagctaacaaggtagatgtcccaccccagaagtcagatttgaagctccaacccgaattagagaaacataatgttacatttcaagcactagaagggcaacaaaaacgagaagtttctgacagaacgaagactatagccaccaccacttatattggtaatgatgccgaaattgctaaatcatcgcatccgatacgtggaaatacaaacaattcttttcaaaagcctgttttgaccatagaggaagaagtttctctacacaagaatatcatagaagacatttccaagcttgttaaaaaactcaccactagaacccaagtggatgaaaagcctgttattgtcgttaccttaactggtgaaaacaaaggagcggcaatgcacatgagctctgaatcaacaaaaaaggaagaatcaattcacattcatcggagttacaagactaacttagagaagagccctaaaaatgaaaacaccactgatggagaaacaagctcgggagagaggcatatagaccgaatgataagagaagcccattcaccaaaagcttatgtcaatagcaatgcacagagcgttaacaactccattgtattcaatgcttcaatcgaagaaaagaatccgggtgttcaattgacctactctcagtacacaactgacgaggtcaagcagttgaaattgtaactcaaaatccacccaaacctgcaaggttgagtttacaatgacccctagacgacaatgccttaaaaactctttatggaaccaagcaactcaagcccaaaaaatccaaaagagcgttgacacgattgctgctgctacaaatttgggagaaaaaaaacagaaaagagttctgttcaagactcatttgttgatagtgttcttatagtctaaaacaataaaatgatacaataaattcttacaacaggagtaagatcgataatgatcacaataactggttgaaagatcgcatggttcttatctagcctttgcttcttatattataagaaaaatatgccacccattacgcacttgtcttttaaaacctgattttaataaactaagtaagataccaaaaactagaccgcacgtaatctttcctattatcatcgtttcgagcaagaattaaaaataaaataaaaaagaaaagaaatataacagggtagagctcaatagaggctacataaagtgaagcttagaattgctaaagtaaggttacatacatacatactctaagcgaaaactctgagcctctttagtgcaaataaataaatggtaaacttacatcacactttcatatcagataagacaatatattataaactagtgccagaccaactaagattcttgtgctcgtgatcaagggcaaaagcctaaagtgcttagtttcaaaagatatttacagtttagtttctagatgaccagtatgtaatggtcattcgcaggcaggtttcgtgtcaaagctacttaggcagattgaaaaggcttggaaagcagaaagagggtaccgatagtccattgtgaatatgtctttcccaatctttccaaattgcagtatcaccttttcctgctcagctgctgaaacattttggcaaggctcagcagctgccaccaactggaaattcttcactgatgccaccgtaactcgtcccttgaaattaaggcaccagcattgcaactgctcgtgccatcttggagctttatttttcaaaataagaggatcccttgtgcactgaaccaagtccatagagtctgtgagattactggagctcaactcaacaagtggcttctttgcgtttgaaactgacaatggggatgaaaaacattgctcttcaaggccatttgtgaattccgttggagtcggggcaactcccccttcttgtactgaagaaatggggattgaatgcatggtgcactgcattctccttgggcctcttgtacgcagaacattaagctcgtatgatatagtggcaacattgtaattagcagcaggtacccttggagatacctgctttgaatgaattcttctccgcgatctacaatttgtttggatcacagggtcacatggaggctgactatcgtaaatggtgaactttgtgcccaaaaaattagatctgttaaaattatacaattcatgatgagaaaaccgaacaaaacagaaaaattgtaataccctgcgtataatcccaccttagttttccaatgtaactactgcttgttcgagagaagtcatctgcagccagggatatcacaaattctgtacttgttgcccgtctgatttttcttgccgccaacagcagtttgctcatatcgccagccaaagctgtagattaattatcagaccattacttatattcagaaccaaaagctatgtcatactagataatgcccacgattcccgtagattttagtaaaattattaacacactatgaagatagtgaaaagctccactaattagatccacaagcaaggccatacttagatcaagatgtaactaccactttcatgaatcaagggcagaagaagccatttcaccagattttaactataactttctttagtggtgaaagaacacaaattgacaatagagaatgagcgccattcacccctaaactagtaataaaccaatcacaagaatcctctaaagctcttaccaggagttaaaccaagatacagtcgaaatgttgaagtcgctctttccctcttaataaagcactgaatcggagaatctcttggccccggctgataattttgaataatcacataaaagaaaagaaaaatcacaaattagcatgtgggtaaaatagaatcaaaacaatcttatattaccacgagaagaaaaatacctgcttgagtgagatgggaaaagtaagccacccggactgctcaggagttttgacgacttctttagtaatttccctccacgacctgcaaacagaggcacaagcaaccacatccctccgagcaggccaggtggtctcactggattctacgcgttggattatgtcaagaagcaactcaggtggcaagttcgcccaccggccctgctgaaccaatgcagaacaagtccaagacgatgaaaccgttgacgaagacccttcaggggcaatgtgtgacttactcctccgatgattaagctttcccattatccttcttcttgatatgttgccaatgccttctttcatctctctgagctcgcgaactaagcttttgaatgacatgctgattaaactagcactctcgtatcactacacaaataagaccaaatttcacgaggtttgaaatggataaaaaactttggaagtttttgtagatctatttatggaatccgaagatgatccaaagggtattcaaatataagtttacattgagtatcagagtttcttgctttcaggtgttgatgcataaaacctcacaaaagcaactcaatctgcgcacacacaaaaaaaaaatgaaactttaatagatcagcagcaaatgaaattacatttaataacaaaacgatgcaatgcttaactgtttacgtacacaccccaatgacaagcctaaaaaaacaaaccccagaacaagatcaattaatgcttacaacttcaaaatgaaagctacgggataattagagaatcggggatcaactaccaaatatattaacattgcaacatctcccaccactaaaagaaaaaaaaaaaaaagaagaagaaaagcgtagattgcttgatttacttcaaactaatcaagaaagagattcatgtaccgagcaaggaggcaaacgcgttggatttctgaacaattccaatgaaagagcttttttcgaagaaatcgtgaagcggaattagagaatcttttcaggttaccaatgtctcgaacgaggtaaaaaaaaaactaagagagagagagagaatgaagggctgtgggccgaagaagaggaagaagaaactagaaaatggcgaacatggattagtggttgtaaactgtaatataaaaggggaaacccaggacctgacccaggcaaccggcaacggagcccacctctcgtagccacgactgtgacaatcacagacagaggcacggccagtctcccacaaccacacaacccaccctcttctccttcttcttctctttctccttctcggatcccaattcctcatattctgctttttttctaatcctatttaataattaaatgacaaatttattataattaaattaataattaataattattccttctcttttctctctgagtataactattttaatttttttaaaaaagaaaaattacttttttaattttaatttatacaacttgcgtgtgtatagctaagacactaatttggtgtgcctttttcttttttttttatctctttctttcttttcaaattcggaccattttgatttttgccagccagatacaatgtggaccttgtcgtttcgtctttgtttccacgctcttgtctctccgtttcactaaattgttcaaatcactcggcccattctgtcgtttctcacataactatttcttttttctctaattttttaattaaaaaaaaagaaaagaaaagaaaagaaagctttatttatttatctataataatgggtattaattttctcatttaacacaattaatagcatgacctagtccattttgacatgactggttaacgaagtgtattgaatttcttattattgaaattattagagaactaaatttttgacaataacaggaaaaaattaatgaagagaaaaaaagtagaattttttgttttgagactatcaataatggtggaagcattttggtctctgaagaacaaaaattgagacagcaagtcattgtaattgtggccttacttagctatgatgaactggtaatgaatatttcttacaaggtaagacaatataatgaaatgaattatagtaaccaaaaacaaataaataagatacattatttttagttttggtaaatattagttgtattattcagtcagataaattatttggcagtggccgaccaccgaatgaaaaatgatacattttggttgagaaaactgatgaccatagattattatatatcatcatttttgatgtaaatgcattatgtaattaaaacaccataatagtagactactagtctattggtgtaacatttagccataaatctaatttttatgaaatttagttttctcgtgggcaacatcatcatgagaaataaaatataaatggtctcattcatcttttttttttttacctttttagtatagattaaaataaaggggacataaagtgtgtgtgtttttgtaaggctatactagattctgtgctacacccattacttttcttttcttcttattattactactgttagaaggttgctaagctttgaagcaaataagttggtcaaatgattacatcaacaactcaagggatatatattacatttaaaatgtaaataataataataataataataaaagttacaagttacaacactgctagacatcatatttaagtgggtgaaagctgtaaataaggctaaatattaatctagattattattttattttattttatttttatcttggtgaaaattataaataaagctaaatattaagctgaaaaagtttctctatcgataaatagtatgccaataccttaaatattgagaaattacaaaaattgaggttcccgaaaccacaccatctagtgaacttgattccctaaacggtggaccgctttttggggttattcctgaaaaaatggttcaccatttcttaaaaaaatgatagaccgttttttttttaataaaaaataaacctaattccaagttcaattctatccaaatcacacgcaacactccaaaacacctgataacatccaagtaaacatattttagccagaaaatacaacattaaatctcagaactaaaagatgtcattgtagagaaagctttgaattccaaaactcaaacttgctatactctcaccacaataaccaaaaccaactccaatcaataaaaaacaacttaaaaccacttcacaatcagacctcgaactaacccaaaccctaacagaattacagtagcaaaaccaagtaacaaaatcaagcttaaaacttagaaacaatgaagatggaggatggggctttatcttgatttatcaaacaatttcccttcaaacttgttgcaattacttaagaattagaactgaaatgggtctgattcctttggtttctagagaggccaagaaagaggaacggataagggtaaaaaggtttgattttttatttttttctaactctaattaatcaaactgatcttaataattgttttttatcttataatatcagccaataaattaaggtattatctaaaaaaatccactaaacttacttaataatcaacttaagacaaactgaccaaaatacccctttctttcctcttaagaaacataaatgtcttgggataaaatgataaaaaattattaccccgcataaactcaatattctaaatgtccaataatcttgccccgctaaacaaatagtgttaaaccataactatgtgactctattggcaaaatcatcacatttctattgttactgggtataaatcactaaaatatcaaaattcatacgtattataaattatacacctagaatttaataaaatcttcagaattgagaaattataatttaaatgcccatttcttaaatagggcccacaacactatatataattaatgataattatctattaatccatattctaagtatacagtcattacaactttggtgcggggcaatcaacctaactcttctaagattggttgtggtgaccaaccttccaccttcaacattgacgaaggcattcccatatacgaggcctcccttgccaccaagaagtcagtaggactaggaggtgtaatattgcctgaaagataaaaaaaaaaaaaaattacattagcaaaccattttttgagtgcggaaagaatttcaaagaaaaggaaaatggtgaagcttacccgtaaccaagaagtcaagtggcagtgtatgaaatcccttcaaaggaaagttggacttaaagaaccagtagtcccgacagtctgaaatatgcttcacactactggatgggcaaaccatcttggagcgcctctccagcttgtagaactcaatcttagatcttttcttctgcatgggctatgacctcacactgtaaaagtatagtatatcctctagttacggaaactccattttttgatctatgcaaaggatgtactatccgactagcagcttgtacgactgcagaatgagctggaagggagcaatccccattaatgcttcgaagtttgcaaagtaacatcacagcaggtgatgcactccgcatacgatgtacgcctagctccaggtgctgaatccgtccgcgaacgcagcaggtgactcccttggagtgaaagcctattccagcaaaggctcagaatgtggcaaactcctcgttacttggaatatcacttcaacatctcgtagttgcaaaaaattttggggatctggtccatatcccactaggaagcattatataatacttcaggagctacctccttgaatttctcctcattcggtaccccgtccggagcaacgtccttaattttctcttcgatcagctccaccacttcaaggtcgaagacgtttgacataatgattaattagagagaaagcaaaagaaaaaccaagtagttaaatactcgcactaagggaaatattaggggaacgggagagtctcccctaaaattacttgtataggtccccaatggacccatcatatggaagcaaaggccccacataactttgctcctagacaattagattgggaacacaagaatgaattgatggttcccaatgcttcatttgatatcgtaagggttccaaacagaggaatgtaaattcaaacaaactccatggtattctgaactcaacttgcacaaaaaatgaacatcaaacaatgccatagtaacgaccctgaggaacctaagtcatactcgctatctcctatagcccacatgaaaattgtcgcctaaatcatcaacaaaatatatatctatcctaccaagaatttctagaattttgagaagggtaaaagcacttactggatgatgacaaaagatatgaaggaggcaagaatttcggtggcaattcgccaacagaaacctcctcaagacggtaaaccctagcctgaagctcacaatcctaagcgagtagtctgtcgatctctacttggagatccaacagcctcgatggatctagaagagaagctatcaaatttggtggtgatgctcctaaattttctcttgcgtaaatccaaagaagaaggttaaggcaatcgtcgaacaaattgacattcaccagaagcaaaatttgatttttttctctcagaaaatttaaactcagaatatgaaatgggtaggtaaaattgatgaactgtgttttctcacttcatttataagaaaagggtgacaattcatgtgcctcctcgatcaacaactcaggtggcctcttaaaaaacacaaaaataatctaaccgtcagagaacagaagggtcaacctttaatgcgtaacaatagaatcaagtcattttcaaattagaacgttcactttgatacaagtgctgacatgactcagccatcaacacactaccttaagcctcatgcgccttccccacacacaaaaaatttcacaaaccaagaaactagtgccatgtatgctctgcaaactgtaatccaaaggtccgtagtcgttcacggccaaagaatacaaaattcaaaaaggtcactcctttgttgaatttttcacgtgtccatgaccatttagagagaaaaccgcaagcctctgcaactctttagtcctaaaatcttggggggaaaattttatccgtgtttctggaaggagagacgtggcattccctacacacgattaatcgtctaaggcctggttagaagccctaacaagactactggcccaatctatacggaaggatgggcctcattccttcctgaggcctaggatacttatatccaagaccatatctctttgaatccagaagagtatcctgctcgaatacggagaagtcgatgggaccctttggatgagcatctgtaatataactaaaaagggcagttgaagaggcatcccggaatcctagtccaggacgtggtggcccactaacacaaaattctaatgaatcagtggattgtcccttgtgtcagagcctaaggatgcacgtcctaccaaaaggaaacctcccttttgttcgacggccatggttctgacactacagtacacaagagctgcgcaacaagccatctgttaaatatcgtgtggtccccaagcgtatggatcacctccgccccatgagccaggcctcgatacatgggcccaaagttaacgtatcacgtatttaccccattagtgggctaggcttacatgcaaatcctagcaggtcacggatatacccgaacttggattctagcttataaatactacgtcataccctcatgcaaagggttgattattcattgtgtaaacactatagcaagaagttagggttcttaaggttgtaaaaagctccattgtaatacatcaaggctatttagctaaatacgattgactcttggactacagttcattagcacctgaaccacgtaaaaatttacatctctacttttgattacgtgagttaatttcttaactcttattaaaaccagtttctgaaaatctcggtaaacagtatcatatgtattagatctttaaattactattttcttacgttaaatattaattttatatataattttttaaaatatatatataaatatatacagatcagattgaattagttacttttacatatcaatcaatattcaatccgcacaagtacagatatctacactttgcgaattagattgggtatttaatgaacacccctatgtatagggagtccaacttatcaattgatcaaggaggaaatttgattgtatacccaatttattttacttgtttcaatttttacctttatttttatatcctttaaaatatacccacttttataaatgttattcctattataccctttaagtttatataaattatgtgttagacttaagtggagggtaaaaatttactgggcaaattagttacaaaagtgggtacatttgaatgataatataataattaatagatagatcaaaaaagaggtattcctcaactttttccttgatcaagtgtagtgaagtgatgtacacattttccttatgagatgggccctaaggggacctgcccttaatagggtgatgattcctcgtctaaatgggtaacaaggatctatcttttgtccccgattattaaaacgggaggggggacagagatgacacttcgtgtcctaacaggaaggaggggcccttgacccctctccccaaatattttttcttcaaatttttagttataattttgtaattttttttttctgtattgttattaaaaatttagtttttggcgtcttaattttttttttgtttttgcaatttagccccttacaaacattttctacctccgtccttgctcgggatccatttactattttagttatttttttatatataatttataatttatatttgtatttaatacattagtgttatttttataaatttttaagtttgtattttaaataataattaatatattgaataataaataatgtctatattttaatttttataatataaactttacttttgtattaagtgatattttggtttccaccctattctcaatgaaaattatatagtggcaagatgaagattaaaatcttaaaaaagaaatcggagacgagaggagaggagaggagcactccctgctaattctacccttgcattccctttttagttttatatatagttattaataatttggttagggccacgtacaactttattttaatggaattagtatttgtgatataattcaatggaactaaaccaaatatccaatccaaatatgtattgagagaattttgattttgacgcctcttcattcctaatgttcgccaaaggccaaagacaaatggctagaagatgagccaacatgaatggaccaattaatggttttctttttcttttttgttgttctggtgcacgtggatgctgctttctaggttatcccaactacatgacactccaacccacaattcaaaaccctatttattattacatcacaaatattcaaagttattaatggatattattattggtttaaatcttatatagtttaagttaagtagtatttttatctttttgaaccttaatatgtattaaattatgctacttaaaaatttttaatgtcattaaaaatatctcttaaactattaaaattattgaatttaagaatttttatctaattttagtaaaaaatgtctaatataaattaaagtttaaggatcataatttattgcacattaaagtttgagagcatgatttagtaaatattaaaatttaaatagcatgatttagtacataaacaatcaataaaataataaaattgaataaaattaaacaaaattttttaaatttattaatctcaataatctaagaaatttttttaaagattaaaaaaatttaaagaaaa

SEQ ID NO: 297162 - DNA, 4398 bp, Cannabis indica
gagaggaaagagttagcttttcttaatttttcttattttggataaaaatgaataaattaaatggttttctaatttaattaaaactacattcaaattaataaaacttatctgaagctcactaaaggacaaagacctaaatggttaaaaagaccattttgcccccccccccaataaaaccaaaaagcttctaagtcacttaggggtattttggtcatttcaaaatcttgaataactcccaacatgcccaatgtctaactatatggccctgctactactaaataccaaaatgtgattctattggccaaacgtcgcgttctaatgttgtcgggcacaaaacatgcaaaaacataaaatttcatgtatgacataaataatacatcctgaaaaccaaaatttttgatggtactggattgtaccaaccggaagtctagttggatagttttggggaaaatcaattttgtattttggcaataacttttcacccatatgtctattttggatgtttaatatatggttagaaagcttgtaaaaagttagacaacatggtacatgatttagagccaaattatttgttttattttagggtgctctcaccatgtagttcagtataaaaactcttggttttatatatgagtattagagagtttattagaatagacacttactagtttatcgctaatgtgacttagggcctccaatcgtcgagaaattttctactcagtttgaccaacacacctagattcataattaaagtaagaatagtattcagatgcccatgtttagtatacatgtatattatatttccttgtagctagcatgtctgagataatggtatggtgtacatagagttgcatcaggatattgatatctaatatggttggcaatgaagaaaagtatgaattaacgctacaaacattagtgtgactagagtactaagtgcagtttggtattatggctaattagttaccaacgttcgagactcaaacatatacacattggatgcagtttaatagacttatggtaattgagtgtatcatgcttttcttactgatcctgttgactcacaaatatgtttttatgtgtaggtaaaggtatggcctaggctgaaccacaatgagagctgggcttgatgaagattgtacatatccagacgtctagacatggagggttgcaatcttcgacacacttctagcttagttttgaatatgtcattagatgacacttttgattaatatgtaaattatgtttttttatatatagattttgggatcccgaatagtaaatattttataaataggttgtatgtttagtgaagttttaattattataaaaaaatttattaaatacacttttatgttaaaactctttgattagcaaaggttagcacgataattaagaaaataccataacgtgccttagttggtagggcattacactgctacttgatgttggtcagggaactaacctccatgttaaaatctttagcaaacacaaatttcttactgaacatggaatgcaaatctctcctgttctgtacagaactggtgggcaatctcttgcaccactctttaacaaatttagttaaagtgagagggaaagacaaacatcttatgccatcattgacatgcaccatcgtcttcaatcttttataccgggataggtgatccctgaggtttatcgaatcttcatacaattccatttgaggaatgtgaaagtgctctgacaatagggcatcaaaaatccttttaatgcatggctctgggtcttcatcatctgaatcggacacagtaccacttttcttgcagaccaatcactttgttattttggttaaggcaactatttgatccttcagccttttggtgttgtcttccaaaaattcacgtccacgaattcagtcatttatattatttatgaggtatcctccgtgaggcttggctttctcacatcttactttttcccttttagcattcaagcggttcgtgaggttcattgttgacatgttgtctttttgatttaagtcccctatttaaatgctcttgttaacataatcattgaggtaatttttttttggtcagctctacttcgtagatcgagtggacggtctagccctgagactcgagcggtcctatctttacgcaagagtaggttgaccgtattcctattgttctgtggaacattttgcacagcccttggtggatagttcttcctttaggacttaaccattttggcttttctcttgttgtttactggattaaagggtctagcccaggatggttaaactttcccactagtgtgggtattttagcattgaggttcccctttgctaccatgttttgtagctgtataagggtttcttaaatctggtgggtagcttcttcttgatctgatattttcctttgttgatcaaagaccacatgtcttagcctcaccacctcgggttcatcctcatagtaatcctctttctggtgtttgtcataatctttgtcataaccctcctttttattttcattaaggccttccctattgtcctcttcgaagggattttcatcaacatgtttttctagctattgccctttcaaggcggaccactaaccacctctgatgtttcaccattcctcatgacattttctagaacatttgcaagtggggttcagtttatatcatcagcaacatcatcttcgcgatcttaatgagcgtggggtttaagcatattatttctggttgcaattattgttgtagatgacaatagtggataatacttttcttagctcttaataaaatcaccaaaatatttattgagatttttagaaaccaaattaataaaaggttaagctaagaaaagataactttaaagtaaggaagataaattttttacgtggttggatcgttaatgagagccttagtccacgagtcagtattattgaagctctttagctatgaaatattttatacaagttttctttgtcaaatttcaatataggctaacaggatttttgggtaattctagacccgttagggtgttacacatggaaataagccatttgatggggtaaaatacatttttatattgacattaggtctggtaggtgaggcccagtttgagagatagttgtcatctatagggatagtaccatttgatggcgaaaggtgggcatgcgtcgcctatggtgtgcagtaaatgttaggatagtggacgtttaacaaacagtatgtaactttttgtactgtgcgcttttcccaggtctgacgtagaggaaaaatccctgattttgttggatttgatgtgagaagggtgccacgtaaggtagcacccagacgcctattcaaatgcccgatctggattaccctgtgagggcatccaaatttgttccaataagtctttccttctctgaacgagttgccctcggaacaaaaaagattcggccttagatccggagctgtggttggacactgttgtgggctgacccactgacttatttgggcctgtgaatgggcctgtcttggttgacttttgggggatgaaaagtacacgtgacacttatacgaacacacagataacacatacaataataaatacatataccattcaccaaaagattatactaacaataataattaaaaagtatattactaaatatatatatactatgctaactaaattatttatcacgattaatatatatatttatactatggtaaaaaaaaaaataaaaaacaaaattggaaaaaaataaaaagaaactaactaaatattatttaaataaatattacatctcacaattaaaatatataaaagtaataattaaatatatgtagcatgacagtaaaattatatacatacattaaaacatatttatatatatatatgaatatactaacaaatacaatattacacataacaaaataaatgttaaatatcatctaaaaataataattaatacattatacaataaaaaataaatatatattatacaccaaaatatatataaaccaacaacttataaaaaatttaaaaaatcaacctaactttaaaataaaataattttaacaaaactaatataaatatatcatgatatttaagtaatataattttaattcttaagaatattatatatataaattgaaaaatggaaaagtgagaaatataaaaaatttattacacaaatgtgatcctaattccaaaagttgataaccttaagaaggtttctcaatttagaccaatctctctctgcaatgtgattttcatggttatctccaaaatcctggctaacagaatccggtcgttgcttcccagactgatatgccccactcaagtggcttttgtgtcgggtcgtagcattaatgacaataatgttttggtccagaaaatcattcactctttcaaacgcaagaagggta

SEQ ID NO: 297163 - DNA, 3385 bp, Cannabis indica
ccccgttgcaataaaaagacaatggctcggattatataaaaataaataaccactactcttaacaagcagcagaagccagatacaaaaatgcattcgtgacacctagtaattatcggaaaaatatataattataattcagaaaacaaaagaaaacaatatatttaaacctgtagaagttttgatcataacataccagaaactcaatggtaacttggtacacaagttcatctaggtcgccagaagttcggacctgaaacacatacaatgttcttaagcctgtaagatctcgtagagattagctattacaataaacatacaacatcagattccagatccaatctcaatacaaaaaaagtaatcccctaaaacaaacaatataaagaatatatttatatatatacagacctggacctgcaacaggtattggcccttctcgaggtggtctgtaaggcatggaatgtctatgattcattgaccgtggaggaaatctccatccttggttaggttcagatgggggaccaacaaaaggagcaggtccataagatttcccttttccaggatactgatgacctaaggccaggaaaacaaaatataaatatctacacatagtacagtatcaaacaagctcaagttgaaaaaacatcacgtcttactgctaatgtaacagaaagcttaccagaaaaagaatgtggaggcaccctccagttgtcatgaagctcatgtggagcttgctttattctctcatgattattgtaaaagttctcacgatcccaactctgtgcaaagtggtatctattggagtaagagtgaggtggggtagcctcccgccgaggcttgaagtgttgttcaccactgacataagaaaactgatttgatggcggggggtgaggaggccgtaaagggtagcccttgctatgataattatggccaggaaaagaatcagctatctgcctctgaggatctctacaatcagaagtatgatagtgcactgaatcaggtattggttgattaattattggagcacttgactgctgagtaactggctggaccatggtttcctgcatattctgcgattaaaaccagcaatttgtaactgagcttcattctgattacatcaaaacctcactcttagcaacaacagaaaacataataaagcaataaactttaaaattataggccaatgaacaaaaatatacatcatgatagagctttgatgagtccatgccatttgcgtacggatcaggcaccacacatgactgggcaatagatggaaggggtgggggtgggggtgggggaggaggaggaggaggaggaggtgatgatggaagtggaggagatgaaggtggcacgtcctgaggtagtggaggagcaaatgtcagtgaaaaatgctgttcaaactggtcttgtgaattctgtgtggcaactactccagtagcacaagaagatgaattcaattctgtttcacaaggagccacatcctccatttcaagctccccgtcaacatcttccaaaatatgccgatgcttctccaaggcagatgtcgtctcatggtcactacatgcttcaggactacgctcgggcgtgacagcctcaaaacttcccccatcagaatcacttccttcaccttcatctttcagcatgctaggcatacaaaatcctggaagctgaaaacttgaattgctgcagcaatgcaacaaagagaatgaaaaaatgaatttctgtagacctgtatcaaaatctacaatcatacaaacaacgcagaaacactaacatcaaagtaatacaaaccttccatattcatcaacaagcatcccctccatttctctaagaggatcatccaaagacctctctgttctcattgagcgcctagagaatggaccagacgtagaaccaggaccatggtaatccagttctcgcatatgacgacgaattactgaatcgggaagaatttttctttccaaccaaagcctcagaacctataacaaagacagaacagaccagaatcaaaaccatataactttgaagtacaccacatgtgatcaaaaccaaaggatgaagcaaatgaggataagatatcttaaatcagttgtcagagaaaaaaaaaataaaaaacaacccttctcttgccttaagacactgcctacgattttcatgcgcagagtttccaggaggggcagcagctactaataaacgtggaagcattgcttgaaatgcagaagggtacaagccaccaacatcgcctattcaaacataccatgcacaatacaaataagttttatatcgtgtaaataaagtcataatctaacattcaagaaagcaaataaaatacctttcatgcatcgagagcactgtgcaatagaatccacaaggaagaacaagtcgacccgtcggtgtaagcttgactcagtttccaaacaacgtaaaagtatgtcaacagcctgattcataaaatttacacattaaattttatgctaaacgtgtttatctctacgacagagaaacctctactatttataagcatcagccctcaatgtattatcgataagatcattgttgttgattatattttgaattaaacataatgaaaaaaaaagactagaacatgtctgtaccttggaagagacaccaagtttagcacagtccatagcgacacgtgttgctcgaccaatgctctcctttgttcgtgtcagtgttccaagcattccctcaaaggatgccagagcagcatttgactcggcatacttgccaacagattttggtctctgagttaccattgactcgtacttttcttctccatcaacaattggaggatgcgaagttatcttatggcgtaaatgtacatctggactacagctgctattattttgaagaaaacaactatgatctgatgtggatacatggccaagcgaagcattgggtgaagatgcctggggaagagagctattattttgaagaaaacaactatgatcagatgtagatacatggccaagtgaagcattgggtggagatgcctgggaaagagaatcaaccccatctgttggggatggatttaattggttgactaagccatcatctaaatcattatttggaaaagacatagaactcaagtcttttggattaacagcatccattactacctcagacctaatttataataaaacaggaacgagtttcattaatcaattatatgaaatagaacaggaaaagagaaacgataagaattcacaaaatagtacaaactagatttttaaattaagcatctgcgataaataaaatataacacataaagcgagatggagaaagaaagaggagtaaaagataaatacattccaaaggataataagaaacctaataattctggaaacaaaaatgataatgaaaaaaa

SEQ ID NO: 297164 - DNA, 4662 bp, Cannabis indica
taaaaaaaaaaaaaatctatgttgaaaatctgaaattctcgactaaaacattgttccaagttttttattattattattattgttattgttataagaactagctgtaaaaaacattagtattcaatacaaatttggagcacatagcatgcagaggttttataaaacgacatatatatataatacatattaataaattttgtagatccatatatttgcaccaaataatattggaaaaaaaaatcatatatgggtttcaatgaaatgactcaacatgtatctacgtacgccagtacggtcagctcattaattcctggaatcgatgataattaattacttcgtttaacaataataaacttattatttactctttatttttatgtacataaatagcaaaaattgttatgaataaacgaatcgccacttttgtaaactacaaatctgaatagacaatacaaaatagtactataaataaacaaaagaaaaaaatatataattttagaattagatatatatatatataaaatgaaatctgctgttccttcctttcaaaactcactcaattaaaataattactgttttgaattttagattttttgactacgaaggaagtttctcatatagagatccttaatttcttcattatgaatgataggaccactctttcattgagcaaaagaattaaggcattatatgataatgtgtatatatagagatatatcttaaatgaaaaagatggaaagtatatgatgatgatgatggatgagtagccttttgtttttgctaacttttgaatttattttgggcagacatgcatgatatctataatgatccacagatacaaaaaccatagtgtattatatatataatatatataacacttttagtatagtatggagacagaaactgcaagtacttgggaaagagtgaagaagcttcccaccatagggaaccaaacaaggtcttcaacatttacagtccttgtcacagtcgactctgaaagtactacacctttctttttctctttctttctttcttgccttttttcctctttcatgaattgtcaattacaattaagcttggtttttctcccaatgcattcctttgattgctagctaggatatatagccatgacgctaataatttacaagtaagtcaaatcaacccacagagaagaacaaaataaaatcgtgatttattcaagtgtatgaaatgacaaataataataccacacattccttcaacacattttgagagcactaagtaattaagaaattaaataattatttgttaccttactcttattaatttggtaggtgtgaccaaaaaaaaaaaacacatcttgtgggtttatgggttcctcccacgagattgaagttccaacaatgtgtggactagttatacaatatcttaccggatagttcttcaaaaaaaaattaaataattaaaggtcttctccaaatattatattgtatatgtgtataaaagaatatatgaaagctgtttttcacatttaaaattattcaaaaaaaataaaaataaataacaattaaaaatctagtaaactatatatacccttcctctaaaagtgccttctattgcaataacatgagtgataatgatattcaaagagtacttcatgcttggggcttccaataacatgatctacctttcaagtacttaggaataacaattagtccaaagagaattttagcagctgattgtagtatcttagttgaaaaaatggtggctatgataagaacttggagtacccgaaaattatcttttgctgggagaatagttctcatcaactcagtgttgatggctattcattcatattggtgtcaagtcatgatattgcccaaaaaaattgtgcatgaaattgaatccatctgtcgtagttttttgtagaatggaagtcatacatttacaggttcagtagccgtgacctgcagttctatatgtcttttcgaatcggcaagaggattgggatttaagagcatcttggattggaatttagcgactatgtttaaatatgtttgtgccattgcaaaaaaaaaaacaatttgtgggtgaagtgggtgcataatgtgtacatcaaggaggaaaattggtggtcctataagaccactccaacagccagctggtattggcgtaagatggtcgccattaaagacaaagcgacgggaatttttgatgtatctcaggtgctgaatgacaggtacaaagtggcggatggttttcaagctattcggcctatctcttgcaaagttgaatggaatttaattgcttggagccgattaaacatacccaagcatagtttcattttttggctctctatgatcaatagaatcaagacaaaagacaggttgcagcagtatagagaagttgagaattctaaatgttttctctgtaatattgaggaagaagtcgagccacatctcttctttgattgtcctttctccttggactgtttgaagaagatcaaatcatggctgaattggagaatgtatagctgccacttttctcaacagaattgtaaggtggataaggaaggttaaaataaacaaggttaagaaatcgatttttgttgttgtcatagtagtccttgtatacgaaatatagcgtacaagaaatgcaattttgtggcaaaattcctatacaaatatagagaatgtagctgccaaagtcaaaaaatatagtgaaaaaaagaattacatgtacatggccaaaaaaaaaagcaaactaattgtaaagaaagaaatggtttgataccttgtaaaagttttctagatatttagattcttctcattcgaagaatgctgttaatttatacaaaaagtttttgagtaatgaaacatacttgattcaataataaaaaaaaaaactatataaacccaactaaaaaaaataatcaaaattaaagttataattatttaattagtcaaaacacaaagtgtggtataatgattggcaatttccctaccttaaataatttacattttcatgtattcatgtaaaggtgtaaatggtatgtattggcagtactatactagtgactcgatctaataattatagttagggtcgaccaaagtgtaattatcgtttaatttttaaatgagaattagtagataattagggcttaattttaaaattacgcttttaattattatttatgcaattgtggagatatatttgaattctatgtgtgttaattatgttacatgaaaaattttatgtttttcttattttatgtccggtaacaatggaatgcgacatatggcttatagagtcactttttggtatgatttagtactttagaaatagtgaggcaatacaagtagacaattggaatgtcgggtgtatttgaggttaaggttttggaccataatacccttaagttttacggttacttcttagtgaagtaaaagatattaacgtcattttaattttagtttttatttgtggaataagttagattttagtagtatttcctattttgtcttttatgagttagtaatatgctgaatattaattagatgattaaagaaaaaaaatctagattaacatcaaaaactttctttctcttgaaactatatctctctctgcctctcctacaactagcaaagaattaaacttttgattcacaatttctaagtgttttagtaagagttctatagggatttcaagatttaacccaaggtaagctcactcactctcgtctctttgattatctcatgaattaagctaggtttgttagttatttttgggaattcaggttctgtatgatgtattgatgttagaaagtgattttttatgttggtttaaaattatttgagatgttttaaacatgaattgttacttgcagttgagtttggacaaagtttgagctttagagctcaaactttgctctttaatggtgatttctgttttatagggtcatacttgtgtttattacttgaaatatattcattgtggcttaattaggtcaactgaaagatttgactcgatttgggatagaattaagttgatggtgagatttttagggtttcctacaaggaaccagtcaactagttcaggggatcctgtagaaccagttaactgtttccccaggatgaaccctaagaactggttttccattttgggaacttagtttattgcttctagcagttttagaaccctagtttttcacgctttagcgatacttatggtattgtcatggtatccatcgatagagaaatttttatttttgattttaggtccctaaaaaagtaatttagcgtgtcacttatcagccttatgaatgttgtaatttagggggatgtatttgggattacatgtttagcgtgattacatgttgaaagggggctatattattacttgaaatatgcatatgtgattacatgttcagcgtgtatgtctatgaatgtctgttagataacatattgaaatagcagtatcagtatacatagagttatattggataacgatgaatgtatatttggcataagtacatattgatgttatcacatcgacacgattaaagtaccaagtacatgttgatattatggttaatagtactgtcatatgaacgttctagactcagtacacataggacgtcagataggattatgattgggtgtatggtgttggaaattattttac

SEQ ID NO: 297165 - DNA, 1724 bp, Cannabis indica
tagggcataaaacccaacaccacgactgttgggcagtccacctcttgctgtaggattgtagtacgatccattgttgttattgaaggggggactacctgagccacgtcttggaccattattaaaacctggtggtgcagttggggcatggtaaggtgtacgaccgtagttgttgggtccaggatatctggtttgggacaaatttgcataagcttttgaaatgtcgagacttttggcatttttctctattcgaaccaactgtgccattaatagagattccacctctgcaactgtgtaggtttcttttcttgtggtgatcgatgtgacgaagacatcatattcaggtggtagtccattgaatatagcctctatatgatcttcagtagttttagcatggccaatggtggcaatattacgatagaatcagccccgaaattagcatacttttgttacgatggtaatatggatgtaaacatatcaatagagccatctattttcttgagtgaaaaaattgtgatacttgagaggaaggtcatggatgaccactatgatggctatgatgcagtctggtttactaatatgttgaattttctttcgaatctcaattgctctttgaatatcgtaaacttgcatgttcgaacatctgaagtacttctatttgttttttatttgattttgtggccttttatcaatgttgtattattgatctatttactgtctttgaagtaatgtgtttatatgtttgcatgaaggctctcatttggccagaaaagctgaaaagggtatgtcgttctccattgctcaattggaagcatctcaaagttattactaaatgtagtaatcctgaaagaaaatcagatttaaaggactcgttgatgtggatttcatcttctttagagacattgtctattaacaaaaagcagatattttagttgccttaatttattgtaactgctgattattataagtttaagaatgactgtgttttattagttttagaaaatggtagtgtagtcctttatgagattgtgtttttttttaagctttgtactgatgatgaacttgactactttgtataataagaatgagatatttctaccttttgttgtgaactagttgaaatcgttctgcttattaataccattgtggatgttttttttttaactgttgcaaattctttcaagtctacaaacttgacatcacaacacattccctttactcctccctcaacaaaggagttaaataagatgggagtctacaaattcttgcttctgtaaggtacttcttatgattatgaattgtgctgagatccttcctcctctgcttagcccttgtgtagtgagatatcttgttattgttaatatcatgacaaagtttctttctttgtaaacatatgttcattcaatcagctgtaataatagcttatgacagcaaatttattgattttgggattaagtaattgaaactctcttgtgacttttctgtaagcaagtagaattttgttgactcaaaaggtttgtggcataatatatacattgaaatgtgcatcttgatgaatggaaacttcaaactttgctgatataaggtatgccaattatattatttcaaggctgcattatgaccaaaaatgttagaagcttgcaaattattgaaattgaggtggcgtttgattgagaggaatgaaaatattggaatgggaatggcaataggaataggaatggaatgga

SEQ ID NO: 297166 - DNA, 2138 bp, Cannabis indica
ggcataaaacccaacatatatctattctcagtcaatgtcacttagttgatcataaatcaatttgatatgaatcatgacttgattaagcttttagctaattatgttatttaatgtctttgacttgttcattactagcttaatatacagactagtctatactaacatcttagaaactcggtattataattgagtgggagtattaatcatagatattgacatctatagcttctatgttagaagtaaaataatggctttgagctttgttaaaaaagtaaatgataaagagatcattttagtaatgatatcagtttactaaaattcatttacaaggaaccgagtgtttaaggataaaatataatagagggataaagtgggataaagtatggcctggcaaatatcagtggaaaaaatgtataaagctgggcaacatcctaggtgccactgtcagtaattaagatagaaatagtattggttcgattagaagggacactgagatatgcaagctgactgtaccccagaacctaggtgtcatcatagattaaaatggatgtgccatcaccaactttcttcctaagtcctaacaagagaagctccttacccaatgaaatactagtctagactagcaaaggatgatgacccttaccagtagccaggaacgtagagtggggaaatagcgagccttaagtaaaggagccaccaattattgaagagattggatgaggcgccaggcttgcttagctagcatagcttggttaaaagctttcatggaccgaaatccaaggccaccatggaacttggatttgcaaatagatgttctacccagtgagttttcttgtttgttcagttccaccccgccagaagttagcaattagtgactctaatttatagtgaaagtagaaagaaagtttgaaacaagttatagaatagggcagaatggcttgaacttggtttaagtaagatttccttaccttctttctaaaagaaagtggagttccacttgttaaaatgaatccaaacacgatcatagaggcaattgaaggcctctttttaggagcgcctaaaagattgagggacacccatgtatttttctattactgcgcgaatagggacattaagaatattggtgatagacatttttgtatcctcatctgtgttgagggagaaacagagagaggatttggcacaattggtttgttggccagatgccaggctatatatagtaatttagtaattctttaatagcaaaatttgcaataggttaaccatcactaaaaagaaaattgttgtcggtaaagaaaaggtgatagatagtgggattagtgcgagcgatcttgaggctaagtgcatgcttcctgggaacacactgatccatcacttggataatgagggagaaaaaaccctcaaaatagagaagaaaaaggtatggagaaagtggatttccctaaagagtacctcgagtggagagaatattcccttgaacttgattattaaccaagaaggaaaaagatgttgtggaaacacaagtcatgataagatcaatgaaacattcaggaaaagcatacctttccatcactttttgaagaaaagaccactcaactgtgtcaaaagctttggccatatcaagtttaagagccacccagccatctcgatgttaggctatttttagcctacattttgggtcattttttatagttattttccatctttattattatatttggaatagaattactcttgctttctatggtttcgggtttcacacttcgaatatatcaattaattgaatttcagaaaacaacaatctatagaatagagaaaattctgaaagaaaataaagctgaaacttcaagccttaatttgactattttatgatccgattttggaaaaagtcaaaacatagaagttttagatttgtttttcttctttccaacgcatcttgaatcaactcatttgaagtttgtatgtgaaagttatgcatattttactgaaatatgctgaagctgtcaaatttgtttcaatagtcgcgaccaacattttccatggtcgcgactaggaggccaggcattgagcttatttttgtattttgcctattgtaacaccctaactaccttaggcatattacgtgatttttaaacgta

SEQ ID NO: 297167 - DNA, 2220 bp, Cannabis indica
agatcctggtaaaataattcccaacagaaagaactccacaattaagtgagcttgacttggggtaatttcaagatgggtgacctcttgggaagtcttcccaagaagtgtgcaagtgaagacaaagcacgctagaaacagtcgtgttggtttgtagggtcagtcgtcattccaagaagcaactaacgtgacatactcatgtataagagccatcattctgtgggtgtaagggctcaatggaggcttgaagcggggacgttacagtggttgtataacagtttgcactcagacttcatgctcacttccgactcccatgagtacttctccaggagccaactcccttggattactaagagattgcaatgaaaaccaaacacaatcagtggcttcagaatatattattcaagatgaacaatcatctttcactaaacaagattctaaaactagtaaatcaaatttacctttctttttgtctttcaattcggccaaatacttaggataatttcttttccaatgaccatccactccataatgaaagcaagttccttttaatgccttctttttgaagttctttgcagctttgttcttcttagagagcttgttggcattcttcttcgtcccttttcttgctctttccacgacgatacttcttcttccaattgccattcaaagaaaaagctttagctctagcaacatttgcttcctcaactttggcaaaacttttgttcaaagatttaaaagttcacaattaaacaacacgaatagatgagcatgactccaagtcacggggagtaaaaactatatggttatttactgtatatctatcaaaagtttttgtttgtttggaaaggagagtaattttgtttttaacggcaaaactattgaaagtcactatagaattatacttatatctcttttaagtttgaaccattagttattatgatgtgacacaattaggaggtgacacccaacttatcctacttactacctttactaccttaaatgctaacatttttttttgaaaggaaaatgttcattatatagaaaatttagacctctcggtcattacataatctgtttttaaaaatggcggaggtagaaagttgaccaaaccggttgtaggtaaacacccacttaattatgttatgggtcataaaattataaattctagaaatactacgaaataaacaactaacaaaagaggacatgactctattacaactagggtccacctagtgatagaattgaccattagcttaaagtcactctccatactaataaatgctaacataatcatgtattttttagtaattttagtagttgctgctaaaaatgatcaagtttctacatgttacaatttgttatgctgcaaatatttgtaaattataacaggccttaacgacgaaaacaggtaagaaacgacaatataacatctcctaattcccaaattcccaatcagtcaatcacccttgttaatgctctataggcattcaatactttgtgacgcagcgcatcggagcgtttacttaagaaaaggaaacgagtcaaaaagaagagagagagagagagacagaaaagcacatgtgccatgagtaccgtaccgttggtgtcaatgttggtgggtatcatatcatcactacaatatgattactagacagtagacaaaaacattacccagcgtaattctgacgcaccatcatccacatccttcaccaccctacctccctccacttctagggtttaccataactactgcgacgccattgcagtagagatcgaaatatatatatttattttttcttttttatttatcatcgacacagcctctctctctcctagacagagccgagcgagagattgggggtttagggttttgaggaagccacatggcatcctcggctcaatccctccgttatggtgcctccgcctccgctggaggacctactggaaccagctctgatgcgcttagtcgaattcttgctgacctctgcacccgcggcaaccccaaggtaattgcgctgttgatgaattaatagttctttctgctttgtggttatgtttaatgaaatgctgacttctggaggaataattagtcatgttttggtcaattcatgcttaatttcttttgttcggaattattctgcttaatgaaatgttgatttctggaggaaaaaagtcacattgtagtcaattcaagcttagtttttcttcagttttcacctg

SEQ ID NO: 297168 - DNA, 2757 bp, Cannabis indica
tacttcataaaaggtttatctttcagatacttagccttaagaactctgcaacaaagagattggttctcactaagcattctccaaccctagttagccaaaaaagtctagttcatatctgtggttttgcgaaaccccaacccccaagagattttgggagacacacactatcccatgccttcaaatacaacccaccattacctctttcacattcccaccagaagtctctggccaatgtatgcatccactttcgatgccatatgcttagataacttggtcgtttgtatagtataaactgaaagtgctaaccccacagatttgatcaaagtagccctgcccgctttagagagagttttaactttctacccttgaagtttagtcactaggttatcgatcacaaagttaaaatccgcatcattttatttagatcgaaaaagcggtaagcctagagaattgatgttacccaccaaacctttaatctccaaaatatctttaattcccctcttcataccctcacttgtattattgctgaagaaaatagaggtcttgagtttatccacactttgaccagaccagttacaaaatttctcaaggtactcccagaacccctttgcctccgaaatggtagctttacccaccagtataaggtcatccacaaagagaggtgggataaccgggggccattcctgctcaagctgatacccttaataactcttttatctaaagacatctctagaagatgggacaaaatttctgccgcccagataaaaagatacgggaaagtgaatccccttagtttgacaccacactaggaaacgatttttcatacaggctcttcgttgagacaaatgttcagggaagtcgagaagatgcactgagaaacccaattacgaaatctattcggagccttgaaactttggagcacatgatcaataaaccaccaactaagcttatcataggccttaacaaaatcaattttaattgcaaaaaggccttattttcctagctttcttctttttaaatgagtgaataatctcctggattagtacattgttatcttgaatactccttataggaataaaagctacttgcataggacatatgattctaagaaggataggccaaattctatttgcaatgatttttgaaatcaccttataaaccacattgcaaagagagataagtctaaactgaaaaaccatttttggattcaggacttttggaattaaaaccgcatttggtagcattgatacccttatacatacgaccagacataaagaagtcctccatagcttcacaaaattcccttcctacaatatcccaataatgcttgaaaaagagcaccgacataccgtacggacacagaacctttaaactgctctagaatatatatatatatatatatatatatatatattggtaccaaactttatattgcagacggaagaagatgacatattaatgtgacaaaattcatgcatatcagataacattttgttggcaaacatattaaagttgatgcacaataaagttgctacataaattgtattaattacatttttcggccatagatatagcaaacatgacaaatcatgtgtatgcatattacagacatatgtctatatattcataaaattgtagtttaaacacaaaagaaagaaattaacatcaatgtctaaagttatgacttttacaattaccttgatgagattaaattaaatagggcaattataagaaaaagaaactgattaaaaataagacttgaattaatcaaattggagtacgtagtagaaaattattgtgtatggaaatggaattggtggaaattaattaaagctaaataaataaagaagttatcgaatgggaaacagctgtcgaccatggacagtccacaggttgactcttgttgacacatagtaaacttccactattttttttctcttctttctctaattcaacaattaatattaataataaaataaattccactattgcatctcttcttatataattattaaaagtatatatacgtaataacctggagacattccattataatttctacattaattaaaaacataagggcttgtttcttttctttttatataattattaatttacatgtacgactcttattattgttgttgttgtctaaaataatattaacaatgaataagaccatatgacaatgacaaccacacaaattttatatatataatataaataaataaatgatattgattgatataaatatttgtgtggtctggtaatgcttatttaccacaatcacaagataattaaaccatatcttcaagattatttaatggagaaatatgatcagaaatcatgcaagaaaaccctatcaactttttggactttaacaaaaacagaatagcttattggttactaaaacttcaacccaaataatgtcgatctctctctctctagtggtatcaaagaggaatcattcgatgcattttaaacattataaataatactcaaaatggaattgtatcctcacagaagtaacatgtacaacttctgtttggggtggggtccacatttatatatactattatagtagtgattgttactttaataaaactaacacacatgcataacaaacactacaacaaaaaagttcatcatcaagaaccaccagggcccgaccctaagcatagacgagttaagtcagtacttaaagttcacactttttgacgagcccaaaataaaaaataaaaattttattaggcttttatt

SEQ ID NO: 297169 - DNA, 4416 bp, Cannabis indica
ttactttttaaaaataaataaaaaatagtgattaattgacagcataatccacaggattgaagttgagaaaggactcatcgtcacaaatcactcattattggtacgtctaatggtgtatcttccatttcaaatttgcttttgatttgatttctatttgtttcgtgggaatagaaacgaaactttgattaatcaaatgagaaaaaagtacaaagtaaaaggaatatgctaatctcatagatgataacttgaacctgaaagcagcaaaacgacaaacaaaatgcaggtaagaaaacagcagagttgcaagagattagaccattctctacttctaagttaataatccctcaaatcctttgaatttgtaaacccaagctgccacccagaaatttgactttccccatttttttttcttctgtcataattctgctatttgtttccaaccacacagcccaaaagagggccattattgttgttgttcacaatgatgaggcacggctatcccctttcagcttccatgccaacaactggatacgaagttgtggcataaactaggatgtgctaagttccttgagtagcttagctcacagttttaaccctagagaacattccatgaataaataagtattaagtattgatttagcattccaggaaagtaatgctgaatctttctttcttctactttatttatttttgttgagaattctaacatttgttctcatctgcaactgggactttctaggtcactttcaatggatcttttgatcatatgaatattgatgctactaggtggtctttcttcactcgtagaaatttattgtaaaaagttatattcattccatgaagtttgaaaatgttaaaattactttttatctgacgttaaattttaaaattgtttttttttgttacattaaacattaatttgatggcagcgtccaaaatttggagatcattgagccattccattcttcattgttgggcacaagcaataagaaaagaagtttgttccacatgcttaagactacaaaaacaattggagggtacttatatatgatgtttgatacatgtcttaacattgttttcctaatattgtttcttagctcctggcattacatcagattttgagcaagggatatgtgatcaaattggggttttggtttttccgccttgacagaaattggcattttgtattttgtattgaagttatagttcattatgtagagcatgcttagcattggtactaatttttcttcaggactagactacttcgtgccaaccttttgcagcctttaaaagatattgaaactatcaacgcacgtctagattgcctggttagtgttgaatatggcatttgaaaattctcctattgtgctacaaaaggtcacagatgagttaaataaaaactcttgttagtccatctcttatgaacttattactttctagaaaagtagtattttaagatgatcaagataatagagtagattgcaattagttcaatttctgtagctacaaaagacttgcaagttgcaactagtcttcaagaagtctgaactatctactagaatataaaatgtagtatttgtccatttcttcctgacattaactttttaggaaaatagttttttaagaggaaaacaatatgtttccaagttcaatcgctgtaactgcataagtcttattataaatccaggtgtaggctctaaataaggttttaaaagctggcaattgtccacttaagtcataatattgcaccttaagtttaatctagcaattccttcaaaaaaaaaaataataatctagcacggtgttttaacaattttgctggttttcttaaaagttgaagtttggtggagaagatgaggcacatttacttaaaaaagggtccaagaatggaactgtaggatacaacatgcacatcctcacttttgcccatgctattttcttttaaactgctgatgatggctttttcatgacacaataaacaggatgaaacctacgaaagcttgtttttaaatcataacagctgttttcaatatatgatgtaggatgaactgacaagcaacgaacagcttttctttggactctctcaggttctacgtaaattcccaaaagagactggtaagacacaggatgtatgtaactgttttgaaagtttgccttcttttcacatatctataggtaacttttttaagttcatctttcagataaggtactttgtcacttctgcttcaagccaaagaaagttacaaacgaagtctcaggtgttgatttttcaagaaagagccaaattttaatatcaagtgtaattcttctgaaaactgctctggatgccttgcctttgctctcgaaggtaagtattaaattaatatttctacactcgttcacacacagatccaaaaatcccaagactaaaagatgttaagaactattagtttcttcttaactttttaggtacttaaggatgccaagagttttcttctcgcaaatatctacaagtctgtctgtgaaaatgagaaatacgctctgatcagaaagaggtagattcactgagctgctgttgttgagtcctttaattttgtgctcatacaatgttctactaattgggacttcatatgtgtttctttattatttcacttctacggtgaaaattataggcctgaatattcttggtgtagtgtgaggacagtaacagaacttgctcattcaaatgtagaaggattcagtgtagtttagctaattttagctctaacgatcagccgcgctcccctcttttactacataaatgttttataatatatatgcacattaaacacttctttttgccaatataaactttccgaaaatatgttaaactcaattgtcgtcgttttcttttcttcctttaactgttatcctcttacgaggacatatatttaacaagcattatgttcgggtaaacagaagctcatttgtgatgtgaaacattttcctgatgagagagttaatcagcaagctgtttaaacatttttcttcaattttcaataccattacttgatttaatatttgatgcttcggctagcctcaaatattagccaaccacctgggtgcatggatcaaatttgcattatgatttgatgagcacacagaacccatgaggcccaacactatattttaactcaattgtcgttaattacagttgtgttctttagaagaaatttgctaacttccagttctgtatctaaataagttttgcatttgatgtccccttagaccagtcttatctgtttcagactatgaacatcactgattaaccagagaagcttttctgtttcaggatcggagaggtgatcgatgaagatgtgttgcatgcacgggttccttttgtagctcgcacgcagcaatgttttgcagtcaaggctggaattgatggatttttggatatcgccaggagatcattttgtgatactagtgaaggttctttgacatgtttgatcttgaccattattttctttttcttttatctgctttcagttttcttataccctggatgatgttaatccaaattaaagctagttgataataaattgacagctattcataaccttgctaacaagtaccgtcaagatttcaaattgcccaatttaaaactcccatttaacagtagacatgggttctactttagcattccacagaaagatattcaaggaaaacttcccagccaattcattcaggttacaacaaattttctcacctactatattaattaatatctcatgagtaatttattgctaatgttttggtcggctttttaaacattatctctcaggttgtgaaacatgggaataatatacgttgctcaactctagagcttgcttctgtaagtatctaattggagctttcctagcagtagtcatttatgaatttattgtcagcgtatcaatcaaatctaatgcttttttctaatcaatgagccttaataaaaccatttaacaaaaatggagtggaggaccttaatagctgtcacagcctacaagaaaaatttagtcaaatcatttacagggttaactaactaattcgaatgaacagcactggtgaatttgatctgtagcctgattctgtgaagtccctcttttcatttttgtgaagccttggatcaccattctctatgttattccatctctgcaaaatgaagaatcgatcttatgaaacaaacatttagttatggtaacatttttacaatggtttggttttcagtgtttctcgataagttcacttcaacagtagatctctctcttattctctataaacaaaaataagaataactgtttggtgtttagttgtgactttcagacattatatggtattcctgatgtgttacaaggtccattgttcttttatgtatttttaagagcatgatgtatattaaccaacaaaacacta

SEQ ID NO: 297170 - DNA, 5578 bp, Cannabis indica
aagttcatatttagggtgttaagcaacatacttgtgagtagatctaagatcctggtaaaataatttccaataggatccacctatctaaaatcgttgttcaatggtggaacaaagttacttctattcttgctcctcgtgttgatgatgtcctgtgcatttccacttattctaggacctaatttgtcaaaaataggacatagaatgacctattctctaatattttagggaggagcatcaccttgttcactggccagaggctggccgagtggtggtatttttgtcttagaaatacctggttgtcccccaacaccaccttatgctagggaatggctactcccaccataagatctgttcggcaggatttgactatcatcaggtagggcaaggtttatcctcgtgcttgatggacttgggtggactgcttgtccattgtcaacttggctatggatccttcttgatctgccgatgagccttccttgttaaggatctcttattagatcctagcctcttccagaagttctttcattgaactttcttatcaagttactagcctttctgttaaggcggtctagctccacctgataggcctaaaggatggcttcctggtcgtccatccacctcaagaattcatgtctctattgagcaaaagcatcacaaccaacaacatgcggttctttagcttgggtgacctagctcatggcttctttaagcctggccagtttgatgtccattcccaagtccatatgaggctcaccgacagcctgtttgttgattcttggccctgtttctccttcataatactagtgaccaatcctaatttagctttgtagaggttgttccgtgtggacaagaccttctgttcgaggtgctattgggggatcagttctgtgcagtaaaggtggatcactaggattcaccgtgtcagtaggatcaatgagatttgtggtatcagctggagttttaagattttctggattaacagtatgtgtttgatttgttgcgccacctgtggtgaaaggaacttgaaggttaggatcatccatcataggatcatgaggaagacttgaggaagtggaggtagttgttctcctaattacatccatgattattagttggaatgataaataatgctctcaatgaaagcaaaaatattgaccttagatttggtcaactgacagcggaaccttatttatgattaccaatcaccacatgtaaataataaaagcaaataaagaaattaacacaacaaattatagaggttcgaccccttatttagtgggtaatgacttactcccattttttttgtattgatttgagagataataccacatagactacaagattctaccttgtaatttttggtatggctctatgaatgttacaatgttgagaatgatgtatgacaaattctgaacaagtgagaaacaaattaagtgtctagggctcacatgtgagagagagaatgagagtgttctagggttttttggaacttaaaacttagatccttttccatttagcctaatgctctttatatagtttagagcttacaaaagatctattttcaaataggttaatatcccttaaaaataggagatattactctttttaacatatatttaagctataaaaataactagttaataatcctaagagataggtagatatttttgggttgaaaccctatattcgtggtttgttggaatggtttcacagttgagaacaagttttgatccgtccagggtgagggctggagaaatatcaattgtttgggcttctttttatcactattcatatgtgcttgccagcacatagtgtcccttggatggccagggtgatgtccagccataccctctttgttggtcattttcctgtaactttgtcatgactgagtatttggatccctcattaatagatatgttatgcatggtgatttagcttatttagtgacacactgtattccatgtggtccttagccccttgcccacgtggacatgccacataatgtgggcaaaaattaggataacacttgcaacactatcaccagtgaacccacacaggttaaccatgcatggttttaaccttccctcttccaaacccattttccttaatgtttctttgtagataatataaatataactctcgttatcaacaacaactcttctaactctcttatcaacgagctgaaccgtaatcactaggggatctgtatacagaaactatacatttaatgcatcttcatcattaaagataatgggcagttcttcgggcttggctcattttaggagttttggagcaaaggttgattcttgatttttcacttcatttatatatcttttttgagctttattattgtttcttgcgaggtgtggccctccaaaaataattaagatgtcctcgccctcaactagggaaggttttaatccttggttgttctggttattaggcagctcatttccttaatttcctatatattgtctcaaatatctttgagaaatgagattttcaatcttatcttttaactggtggaattactcagtggtatgtcccatatctcgatggaaacgataatagttgttggcgtttcacttatttattacatgcctcattagatcaagtctccaaagtacaacctgattttcatttgtgagatagatgttttcatgagttttatttaatttcgtatacatcgagtataatagaatatatttctcgtgcttcttttgctttttcttgtcctttgacaaatctcttgactcgtcttttctttttgcatttgagccattgtggttcgaatttcctgctttggttgttatagtactcgttgttactgtactagtgttgggtttgtcgctcgagctaaatttgagtaatttcattttgcttcgtgcctcctccttacgcacgaagatttatgctctttcattaaattcattgatgtttctaacagagcgaccttgcaaaatcatcccatagtgtacctcacggttgataagtcagttcttattccagcttgaagagctgtcaactatatgctatcatttagctttctaactttggctactgctgtactaaaaagactcatctaagcctttaaagattctccttgttgctgtttgatattagtcagcgaggatgcctctggcttcctgtgccttgtagcctggaattgcttcttgaaatccttagatagttgttcccaggatgttgtagaatggttggtgaatttatcaaacaaactgcttgctgcttttgttagagaagttggaatcaaaatgcaacacaagttgtttgaaacattacttgctcgcattatgttgttaaaattattcaggtgagccacagggttagttggcccatcatactgtgtgacgtgctggtttttaaaaccctaagggaattaggaattcaaaatatcaggatggaagggctctatctctttgtttgaattgtatcctgatagttacccatattctccgtcttggtattgcctgaacttgtcatttaattgtattacccttaactgaattagatccatgggttgttgcttaacttatagttctctactagatttctgatttaatcgatcacgaagatctagagcattttgactcaaatgctcatgcatggctagttgtctatggtttagatgctcacataaatcacggtgcacaccttccatttctttggtcataattgcttactgaccttgttcctaaataactttcagattgataactttaagagtcactgatactctcttgatcatctcggtaatatcgtcatgaaccctccccatcttgtgctcgcctttcacgtgtatgggttttagtcgatctactttacctgtgagtcattgaccttgatccactaggatctgtacttgaccctgtctcttgtggttcctttcgcccctacttaggtaggtgtatgcgttgtctctgttgttgtgatttggcctttgcggtgtctaggtggtcgacctgatctaggacgaatccctacacttctcgcattgtgttgagaaaattcttgatttattcaaaataaaataaataagtacatggatttattcgtctcgctggtcccatcaattggtagttattactcgtatctcaccattgtctacatgatggtgagtttgagtatttttatcaattgtaattctcgagacgagtcatctaaatgcatttattgattcataatttgagttggttcatattactgctcaaaatattggtataacaatttgccttataattttgtagtttgaaaaaaaattacttacaataatgaggagaggtacttacgatcattgcaacatcagtggttaacaaaattgacacaatatttgtactagttagctttaagacttagactttaaattttagctaaatatttattttgtgttctaaattttattattcttagacttttaagtacttatcacgttgtaaattcttactttgtcaatataattaagctgtatttttattttaaattaagtatttattattataattaatttattcaacatataattatgtatgataattaaaattaaaaataatattcaacataaaataaataagtacaaagtgaaaagaaaaattgcaacctttggttatataataactgaagacataaattccccatatcttcggttattatgtaataaccgaagatgtagggcctcccccattcaatttttgagaattagctccacttatgtctttgattatttggtaataatcggagacataatttccttttacaatcttcggtatttttagaaattacgtctttgcttcaaacgatttgggtagcgaatatatttacaaactgaagatgaacaggaataataactgaaaataataaagatcttagtgattgttgttaatgagtttttttttagtgtaaattacaatcaacaaataacttaaaaaaaaaccatgttataaggcaaaaatatattaattataaactttttgtcaagacttttagtcttggacattttactcatgacataagtaagaatcactcaacactaattcgatcaccaaaaaaaatccattttaatatttcctttttcttattttagttgttattataaatacaatcagtttaagaattgtccttgtttacagtagtcaaagttagctgctatgagaatctctacatatgttaatcacatatttctctgaaatatactgcatctgaagaaacataagccacacaatagatttttattttttttttgcaagacacacaaatgatttatatatatatatatatatatatatatatatttatatggacaatgctgtttccaaagaggacaacaataagaactaatcaaaacacagatagtcatgttctcagattcttggcatgctcaaattgccgcccatatactttagaaaaataataacactatcaaataaaactcacgtttgaaaattaaaaagtttttcttataaatatttagataaatgctaaagcgtattaatagtactaaatatttttttatgtgtgatatattattggtcaactaaatattgagtttatatagtttaatata

SEQ ID NO: 297171 - DNA, 2689 bp, Cannabis indica
ttagaaattaatttctaaactttattttaatgcactcctatctcattctcattcacaatatttaaaaaaattattagtttaaaatattcaatatatatacaatgcataaaaaccatacaatataattacaatatttgtatacatacatatacaatgcaatacatatatacaattacaagatatgtatacatacaatacatattcaataaaatataaaatacatatatatatacattagtaaagtttagattcttataattaaaaaagaaaaaactctctctgcttaggattccacaattccgattaccatcggggccatggcaggtcatgggcgaccaagacaagggacaactcaggggttaagtgagagaagactgttcaggcaaaactcaagtcgacggcgaagaaaaagaagaaaagaggaccatattcaagcttagatgctcgagttatgaagataatggacgaagtcttaggagttgagccaatcgacttctcagatgaggaatcaaatgcagacctattttaagctccaatgtctcctcgtgagtctttgaaatccatacaacagcaagaggacatcagtagggatttcactttcttcttgaattctaatcgccaatgctctcaggcagttctaaagggtagctctccatttcctcctgtgttaaggtctgatcttgtgaagaaaaacctagctagtgcttttaatttgaatgaacaagggagtaaggtgaaaatacatatggaggacattgaggaggaagtttcctcctggactccatcaattgtgtgttatgtacttggggctaacccacctttatcaattttggatggctttgttagaagaatttggggagacaaggttcataaggtagggatgctagcttatggcattttcttaatccgatttcagtcaattgaattcagggatgaagtcttgtctggtggctacattttctttaatagctatcatcaatgaaggcatggaatccaatgtgaattttaagaaggaggatataagtatagtgccaatttgggtttagttagaagatcttgaactcaagtactggggtgataaatctttgcttaaaatcataggacatgtggggaatttagtgatggtggattcaatcacaaaattaagggaaaacttgcttttcctagggtgctaattgaagtattgctcgtgcaagatttccttgaagaaatctggtttgaaaatgaatttggagtgaatataccagtttctgtcaagtatgaatggaagccaattaagtgtgagcactattttggcttgggacataacacaatagaatgcagaaagaaaactggtaaggaggttgaatgggcagttaaagatagtaaagctataggtttgaacattgagatagggggaaaagccaaccattattgatgtagatggatttaaaccagctggtaaagtatggaaggttaaaggcaaaggacctgagcctaaaacttccattgcaaacgctttctaggtgctaacagagacctcgacaacaggtaatacaagtaatagtggtgatggtcaagatgaaatacttgatgctgtagttccagttcagcaaagcgaattgacagcaaaaatgcttcttgaaaatggtgaatactggaggagggggaggacctactctatccaatggataaaattgttagttggaacgtctgagggattaataaccagcagaaacaagcactggttaagcaatttattgctcatcaaaaagttagtttagttggtctcctcgagatgagagttaaggctcctaaattaggggccttgtatacaagattttttgatggatggtgttttaccacgaatattgcttggcatctagggggaggattgttttagcatggaatccaactagctacaatgtcaagttatggaattcgaaggctgagaatgtagatagagttgttaatgcagttaaagagtcggttaaacaaagatcaaattttgtttggccaaaaaaagttaaagtagaagatatagagtggtttttaactttgtaagcgttgttaatactgtatagattacagtctgaggtcctaatatgtgggatgctctttgcttgtaaattggtatattggagtaatgaaactaactgattcataaaagaaaagtttagattcttatcttattattgaaactcggccatcaatactgaccaaaatccagccactatgcacaaccacaagaacacaatcttaacaatatgggaaaactctaaaagaattttcaaaataaaaaataaagtaatttacaaaattattagatattagatttataccttaatggacgttgagattcaccaatttgtccaccaaaagtggcagtcggagctacaaccaccacctttaagctcagtttaccttaaaaaaatcaaacaaaagacaatcatactttagggatatatttttgggtgtgaaaaatataatatttataaattaaaggtaaaaatgggtgaaaatgaagaaatggggggggggggggaagaaaagggtggttgggcgagggtttcgtgagtttgagaggaagaaggattgctggttattttgaaatttgaggaagatgatagctggagagggcttataaagacatatggcatctgttattataaaataaccgatgccatatgtatgttgttggaaattattt

SEQ ID NO: 297172 - DNA, 2412 bp, Cannabis indica
caccatcgtacgatacaacaagaaacacagtcgatcctgcattttcaaaacaaataaaaggtaacttagggaaaaaataccaaaaaaaaaaatataaaaaaaaaataaccaaaaaaaggagcaaaaatttaacatattcgaaaaacctattgacattccaacgatatcccatcgataagagctgtcaggatctcgagtggcaacatcatcgacagagtgtcgacatgacatcgacaccatgtcgaaaatttgtggaattttgtcatatcaacaaactatcgacacactctcgatatcatatcgacaatgcacattgcatgtcatacatgtgtacaattagacatttaatgctaattaatttttcccacctttctaacttctattctatctgttgaggctatcgacaagctatcaatataacatcgatatactatcgataatgtttagcctcaattatacttatccacttattatcgacaacctatcgacaatgtatcgacattttatgattcgtcaagccaacacataaataaactcaaaacttctatcttttttagtaataacacgagtgaaggaatgaagagaggtattaaagaaatcttgggaattgatattattggaaacattaactatttagggctcccactttttaaatctcggttaaaagatgcagattttaactttgatatgcgtaatcttgtgtccaagctccaaggttggaaagttaaaactttttctaaagttgttccagctactatgattaaatcagttgggcttaccctcacagtgtacactatgcaaactacgaaattttccaagagattggcatccaaagttgatagcatggttagggacttttggtggggttgtgagaaggggaatcgaggaatttacttgaaatcatgggatacgttgtgcctccctaaatcgtgtgggagccttgattttagaaaattgttggagatgaaccaagccttcctggctaaatggggatggcttctaatcaatgaaaaccaattgctttgtggcagggtccttaagaccaagtatctcaaggaaagccatttcatgaattgctcttacaagagttcagactcttagttctggaaaaatattgttaaagacaaaacaattttgaagaaaggtttctgtaagttgatcactgatggtaaagatacaaatatttgggaagatccatgggtgatccacggtaaaaagttatgtccaacccacgtggctaatcgtcccaatggcctcaattgggttgtggacctgcttttagatactggagactaggatctcataaagctctactccctctttgacgttgagacagttcataatatttagaagggggtaagcctagtggtcaaggcgaagatcggtgggcttggaccaagaaacattctggaaccttctctaccaattcctcctacttggtccaagctttagattgagctcttccctgtgatgtggctccttccctgtgaaataaattgtagaattataaggtgttggagcgccataaagttctttagtagatcatcctttccaatgttcttccaatttgttctcttctagcaagagaatgtaaattgataacacttccagccccttatgaggaaactatggaacatctcttcttccattacaactttacttttcacttgtggagatcttcccctgagacattatgctggttattgagtcaggtggccatgtttgggatcaggtcaatttcgtagggggctaaagttgaagggtgctaatgttaatgaggtgttcctctacgcttcgattgaggtagaaataatttggcgtgcccgtaacgataaggaacacaacaataacttgaatagtatcaaatattatattgactctatcactcattgttatacaaattatgactactgtttattccccctcctcctactagtgtttctctcctttggtccttaccctcggacgactggatcaagattaactgtgatgttagagttggaagtggagcaatgtgtgaagcggcgttggctagagatcacttgggaactactttttgggttgctacaaagaggctaaatttctctattccccttattggtgaagctgcaacttgtcttctagccctggagacgacaacctctctgaaataccattttgtgttgatcaagagtgagtatgaaaaaatcatcaaaactctgagggggtacatgtgtgttaagtagtcaaaaatgcatatttattagtgtaaaaatacaaaataaaattaattctatataatattttcatgaaattaatgtaatatatttttatttgaaaatattgtagtgttgagttaattttgtaagaaaatagcattttatgacacaaataagagaaagaaataaataaaaaaaagaaattaagaaaatg

SEQ ID NO: 297173 - DNA, 2586 bp, Cannabis indica
tagtattatataaaaatatgatatataatccaattcaatataatacaatacaatacaatacgacttaatacgacgttccaaacgagccctaaaagattgtacaatcataattaacggaatacgaacggtctatatgtatatatatttatatatatttttggtgaggagaatactaaaagttggaaattcaagctagctgcaggattagggaatatgaagagatccactagtaacttttaaacatttacatattactgcctctaaaaatatttcaacctctcattttgttacaaatttactatattgcagcctatgcttgtgctaagtactccatacataacaaggtaaagctctctctcactctctctctctctctctctctctctctatacataacatatcatattatgttttcagattcatgcagttcttttgatatagaagacatagtgtgtttatatatacgattttatgttttagaaattatacatttaatttgaaatatcgatctcaaaatttctcttctttgaattcaatatataaaaaaaaaatttatacaggccaaaaagtgagaagagaagtatatataaatggagtggaatagagaagagggtattaaagctaaagagatagcagaaaagaagttgatagcaaatgacataatgggtgcaaagaaatttgcattaaaggctcaaactttatatcccaatcttgaaggtatctctaaattgatattaacaattgaggtttacatttgtgctgagaacaaaataaatggagtagtcacagattggtatggaatacttggtgtggatcccaaagcagatgatgacactattagaaaacaatataggaagcttgctctaatgcttcatccagataagaacaattccattggtgctgatgatgctttcaagcttattttagaagcatggaatttgttgtctaataaagaacagagagatgcttatgacaaagagagaaataaggcaaaaatgagtagtcatgatgatcaaaatgttcatagtaaaaaaaatcatgaggcttcatcatcaaaaccggcagaagcggcggccggaacaactacaaagccaaagccacctgaaaacagtaccagtggagcaggtcatgaagatcatcatcatcatagtcactcatcatcaaatccatacacgttttggacagtgtgccattggtgtaagatggaaattgagtattttagatgttatgttgattgtaatatgttatgctttaattgtcttaagcaatttcttgcagttgaaatcgttggccatatgtaacaactctaatagtactatgttttacatatgttttttaatttggtggttactaatttttgggtatgcaacaagaagtgactgaatttatatttagtacagacaggactagaataatagtctcgaatattgatttttagatgaagtttttttgattctcttacaaagctatcaaccaatgtatgttttgcatagagttcttcaagcaatcaaacttgatatgcataaatcatataatcgcatggagtgggaatttttgcataaaattcttcaagtaaactcacatataattaaattgatccaatctaataataatcgatcgattcaattataatcgacagacaaacattaaatatttaattgttatattttttaatatcaaattaaatcagatggggtatttaaaaatttaaaacatatgtaatggaactaattagaattttatgtttgttatataaaaatatatattttatatgaaaattaaaattaaaattatattttttttattggatgaatccaatctaataaatattgaattttatatgctaatgatgcacaagtttctgagttggtgaaattgtatcaatctctatgaacggtagtctggccaattatgcagtaaagcgaaatcaagtattcttttctctgcaaacatggatcaatctaggaagaaaagtctactagatttgttgaaagttcaacagatgagtggagactggagaggaatgaaaataagaataaaaatagaataatataaaatttaaaatgcatacaaaaattaattacaaaattaagaaattgatcccaaaacaaactaattgaagaggttaaaagatctatgtaggcttcgtgcgtcgaaaacaatttaaaaattaactttaatttcaaagagtattcttgggtccaaagggatttttttccagaattttttttaaaattttatgaatcatcttatcgttcatgaacaaaataaatctatagcattatataaatgtattaatgcaaagagattcgaaaaacacatacttaaaaatttgaaaataaaaccgtgaaccaaaagtttttcaaataaaactttaatgtattatgttagtttgaaaaaactaacataaatttagtatacattaatgtattaatgtattaatgtatttgaaaataaaaagtttttacaaataaaaccgtgaaccaaaatttcccgtatctttatatattaaaagtgatttaactgcattttttggttttaacagaatatacttaaaaaaaaatcatcttagccacatatctctct

SEQ ID NO: 297174 - DNA, 1289 bp, Cannabis indica
tctctctctctctatctcacatcccaaccgcccaccctcaccaccaccttcgacctccgaccctcacctccacatctgaccccaagtccgatagtcggaccatggggtccgattggtcggaccaatcggaccccatagtccgaccatcggacctatatgtacttattgaatattatgtacttattgaacttattgaatattaatatgtacttcatgaactaggaagtgggctgggctgggctgggctgggccaggtcatcatactttgggcctcatagttaagaatattcattagagcactacatatagtccatgagttgagatatatatcatatatatagtttccttgtacgtatatgtatacaccatactgtacttggttgtaagttaataatgtctggctcgacaaacattctctccgccaaaattcacatcaaactcaggacacaactctctatatataaataatatatatcatggatattcatttcttaataatttttgtagctattgtttcttttaatcttctcaaaaatatctcgaccgtacaaaaacaactgcaataaaaaaaccacctacaatatatatatttataccttgttttgtagctacctgtttatttttattttattttattttatgattatatatatcgatggagttgagacaaaatattatggcatgttttggtcccccttaattagctagctacctattctctattttttatgatcacttcattttgaacacgtctactcttatagtgatcatcctctcaatttatatatatatttatatgcaggcctcttgtggttcagtcatgttcctttcaatatatatatagctagcactcagaaaatataggggaccaatattgtatttgactttaggtttattatatattagctacctagctagggtttattgcatgcatggggggttaacttttatatatgcacatattatgtatataatgtatgcattataaatgaattatcagataaattgtgtctttttcttatccaatatggatccaaaacagatggtctctctgcactaattcgcatgcaacttcatttgccaatccatctaactctctctctctcatttatatatactgtataataggaataattacataagacaccatttttttttgtaaaatatttacatttttacgttcaaagaatgtttcttttacatttttacggtttttcaaaaaataacacgaaaacaacataaaattaacaagaaaacaacataaaaataacatgaaaataacaacaaaa

SEQ ID NO: 297175 - DNA, 8321 bp, Cannabis indica
gaagaagaagaagaaaatgtgaagaagaagaaggaaatgtgaagaagaagaagaaagaaaataactctgaccctaaaacaaaggaacccacgaagaccacgaaaaaaaaggaaagacaaatgtttagtgtattttgaaaaatggtcactgtgagtacatcaatcatcaattgttgtccatttttaaaaaataattattttaaaataaaataccaacctattaccattttttctaccctaactacccatactttaaccccaacccttaaatcatgtcccaatttaatccaacagctactgtacaatcaaaaattatattctctcaattggcataacgggacaaaatcaccatcctaaatttataatggtaaaagagtctacaaatatcatcttaaaaaaaaaaaaaaatactacaaatatcaccgcattaaacagacatataaatttgatctatatttcacaataaatattacgatttttttggtatatatttttaagggttagctggctttggccaaaatcaaggtgctgtgattgacgccatgcttgaaaaccacttcccggctttacaaaataccatttaattttctctttttaacctctaatttttcatattgttactcttcaatctttaactagttttatatccaaatacagttcaccactagggtttcttattccattggattggaacataccaactttgtccctcgcccttattttatattttgcttctgaatcacggaattggaggcttttcttgagctggtaagtttcattgtatgatcaattgggaattaggctcgatgatgaatttgactttgtttgttttctggacaattttatatttttttactatgaataactttgactcatgcattattcttacttttgtagtattctagggtttaattgaactgatcaattgctgcctttcagtcgtatccaattttgattaattatgttgattttcggtgttaattgtatggtcaacggttcaatttcgacatgtgtaattgaatttttatccgatcaggacatggagtgaagggctgattgttgttgttttaaattcctcactaacattgtttaattttttttatgggaaatttttatttgagttcgacattaggatttgtttttaaaaaatagttttttttttcttgaactttttattgcataacatacatatttatgtggtgacatttttgtccttttcttttctttgctacgatgctgttagagtttagtatttttctgctggaaggaaagaataatcaagcaaattctgggtatttttctttcgtgaccatgtctgaaagtgtttgtatgtggaaatctgttattaacagttgcttttgacgttcagacaggtcttcaacaggctcggctcattatttactagtatcaactgtggctggagtagcatatccctattaatagtcgttgacaagtgtctttagagattaatatctgattattgtgagatcagaatatagtgagcagcttctcaattttctgaagctgctaaatttctggttggtgttggtgttatatgagtgaaaatgcacttgaagcgaaagcaagccttgctgttttcattgttcgtcgttgtttttcttggttttgcgaaagcagagtctgaacatgaaattgcacagaagttgatatcagctcctcacaagaatgtacgaagtaacgttattgatggtgtgggaactgagagttctttcagattggacgaaacaagtagtggtggagtgggtgagaggattagtggaagtagcaaagtttcgatctcaactgttgctttgttcacattggctatggcagctgccactggtttaggtgcagtaccttttttctttgtagagcttgatccacaatgggccggattatgcaatggaatggctgctggtgtgatgttggcagcaagctttgatctcattcaagaaggacaagaacacggtgctggcaattgggttgtgattgggattttagccgggggaattttcatttggctttgtaagcaggtgattacttttgttctttatggagttcacccttccttgcattattatttttgttgttaaaatacagtgtcgagattatattattctagtgtcgtgttaagaaacttgaattgatatgtatacacacacatattgtatttacctttaatctttatctctatttcagtttcttgagcaatacggtgaagtaagcatgttagatataaaaggcgcagatgcaacaaaggttgttcttgtcattgggataatgactcttcattcatttggtgagggctctggtgttggagtttcatttgctggcaacaagggtttctctcaaggccttctggtaactctggctattgcagtgcacaacataccagaaggattagctgttagtatggtgcttgcagcaaggggagtgtctccgcagaatgccatgttatggagtgtaatcacatcactgcctcaggtattgtcttgtaaattgatcacaattctcagctttgtgaagggaaatcccatattagtacattggtcttttttcttcaaattattgatgccttcaattatttagttattattttgaagaaaacttcaagtacttcgtagaatacaataaatacataaaacagagtggctcttaggaagatgttaaacggatgaattgttgtaggaatgaacaaaaattgattgaagaaccacatgttcttttattgggattttggtctagtctatatgatggccttgttaattgttatttgcttgaaaattactagaatggacctctgttgtcttctggtatgcttaaggtctatttgtgtagcacaaccctatgattaacagaacaggcagacacacacacacacacacacacactgacacacacatatttgtgtagctcagtcctatgattaacggaacaggcagacatgacacagacacaaacacatcctctttcatcataatcaagacacaaactaaatgatttacaaagcaagtttctcgtcaaaacacatctggagactgcctttattttacacatttagttatcttacataggaggaaaatcttcatgaaataattaatgatcatgttttgataattacttttctggtctcttcataatattatcccttgtaatactttttccttgcagccacttgtagcagttcctgcattcatgtgtgcagatgcattcaacaagtttctgcctttctgtacaggctttgctgccggatgtatgatctggatggttgttgctgaggtacttcctgatgcattcaaggtaataaacctcacatagttgtgttgatttcctgttactagaataattgatgatgaccaagtcaagtgctagaaggatttatagaacatgaaaaaagagtgaaattgagaatgtttcgaaaactctatgtttgatgtttgtggtaatttgtgtcagtttttatttgagtccttttctcttgtagcttttaatttctaggcatgtaatgtcaatttcttctcacatttggcttgtaggctgcctctccatcgcaggttgcctcagcagctactctctctgttgcatttatggaagctcttagcactatgtttcaaagttttacccatgactacaagtgagtgtcttggatgtttatgttgtctcagatgtagcaactctgttatattatttggataatgtggtttattgcctgttgtgagagagagttatcatttaccatgtgctacagctgagtatcaagctgtgtttcataaaaagattatttgttgagatatctgatgtgtgttccatatccattattcttcattagctgaaatgaaacttgaactttttgcattttaacaatataaaattagtatcttccaaccagatcaatgacaagttttctatgtcttattaatgcaacctgtatttcctattaatttggatgataccttataatctctttttttaaggatggcttgtttttctttttactgaaacttgaattttctacaaaatgcagctcagaggatgcttctggtttctttgtttcactactttttggtcttgggccattgcttggtggaattgttctggtttctttttctttggcttttcgcttgcagcatgctcttctcatgggtgcagcatctggcattgccttcgtccttggtgcttggcgaccactgcagctacttttttctgcaaagatgggagctatacctcttgtgtttttgcttgcagcaggtgctattttcgttcatggtgtaagctctaatattcttgggcttgctagtcggaaaaaatcatcagtgaatgacttgccaacagcaaatggtttccaagtgagcattcacactcttcaatcgttcttatcatgtggtgcagttgcccttcatgctttagctgaagggcttgcacttggtgtagctgcaccaaaagcttatgggcttggtcggcatatggtccttccagtctctttacacggtcttcctcgaggagcagctgttgcaagttgcatttttggtgctactgacagctggcaagcatcccttgcagctgctgccctaattggtttcatgggtccagtgtctgcaattggagcaatacttgcaggaatcgactatagtggtttagaccatgtgatggtgtttgcttgtggagggctactaccatgtttcggaaatataatcaagagagctgcaagattggactcgaggaaatctgtctgtggcctcattataggactggggtttgccaccttgtgtttgacgtgcaccaaattagtttgcttgcatacaccttactgcaattctgcaccagaggctgttagatgagattgattgtgtgagggttgtgtaaactaatagttggttgtcactggagctgttgttgggggtacaagtttgggacacctgttgaagccttttttcaaagagaattagtaaacagaagtgaacggagaagattttctttaaatcagtatgtcatcctatactttgagagacaagccaagcttttctacacccacaaaaggcttcagcatttcatatattgattattgtattaatattattattattgatttttgaacaatagaggtgatacaaatctccttgtaggcaaccattcttgccgtgagtcatgtacttaaatttatcactagaaagcaaggtggttgtgattatacctctaaataatcgaccgtagttgacactgacttttttcttttgtgtatctgttcataactgcctatataatctgggccatgtatcactcaagttttatgtcaaatcatagttataaataagactaagcctttagaccagcgagtgttggacaaaatatactcaaaataataaatgttaggctaggtgtcacaacgtacatgcatgtgttaggtcagcatacctaccccctgtttttttttttgaaaaagatacctactccctgtttggagatggaaatttcataaaagcatatttaaaaaggggacttataaagaagtccctcacaataatttgaggtgttggatcccttaaatcagaagaaaatttaaaatctttgtcacgtggccatgaattcatgaccttctactacaagtttttcaactactacaatattttatgaaaaagaaattatttttaaattgattttttttctatttgtattacaataaattttcaaggggtgaaacttcttgttgttccgtacctccaaaggggagggtgcaccaccataatcagagtcaggaatgtagcattccactactcgtagggagagagaaaattacggagatattaaaatttcatatcaaatttgtttttaatattagcaaaaaaaaaaaaaaaaaaaaaagaaaaataagagcgcagaagagttttgtttgcaagttgcaaatgtacgggacatgtcacataagaacaagtattcatggacacaatttgttgttaccactgtaaattgctgctttataaatcttacagaaaaacatgaacacggggtccatatgttattattagccacaaagcttaattctcagattcaacaaacatgtcaagcctccaaacaagttcacagtgctttataaacaacaaaaaaaactattagttattacaaaagtaaaaaaaaaaaaactgcagccacggaagcccaatttttacttgttcaaagtcgactgattaatgctctgcaagccctcactctcttccaccaatttttccttctcagccgcagatccaatctctttggtcgccgttttctcaccctcaacgctttgagatcctgttgccctcgccaaaacgacaaacgacattccacccaggacattgttcaagcacctcaggaccaccaccgatgacttgaacagcagtggaggaagccctttgtccagcacaaactctattccgttcagggtttggtaccttagattgctgctgacgcccatgtggatcgcccaggtcatggcgttcagtaaagtcggcggcgccttgttcggtgtctcgaaagtcggatccatagctttcctcattttcatcagaccatttgatatggcagttccgacgagacctgcggcgaatccgaccgtagcaaacacggttcctttgtagacgaaggttcctagccggttcaccaagctgtaagcgcccggttcgaacatgtggctacttgggcaattggcgaaaatggcagggagactagatgaggaagatcccagggttggagctaggagatacatgagagtgaaattaagaatcgaaccgacgacgagggtcgagaatacgaaatctagctcgttgagaccaaaatttgggcgggaagccatgtcgccgaggacgcacgagctgacgcccacaacttcttccattaaaaccttgaaagggaattgtggatcggcagcaactctcgatctccacccgttcaggaaaagccctattggaccaaatgacgacgatttgtcttcgtgggcaccatcgcccccactccatcttccactatctcccccaccaccggaacttccatgtccaactccgctaccgccatttcctccagcgaatgaaatctcaagcttttcatgggatagagtctgaagaagcggtcgagaatcggaagaagtgatcgggaaagatactgaagtcggagtagtattggagatgcgaaggtggtcggaaccgttgcgatggtgattcgatagaggagaatagcgaaggagatgggcagtagccgccatggtttcttgcaaagcttctcttttttttattttctttattatttatgtatacgagaattgttaggtgagtatcagagcagcggcaaaaaggtatctaaaagtaaccctaataatcgttaattagtttattaataaaaactctgttgcatatttttgttaaaaagaaaaaaaagattgagaaagtgggatgacaagtggcatgtgaatttggacagaattgtgggagaggtggtagtaaataaatggtgaccagtgaccagcaaatcactagcatgtttggagtcttgaataagaggtttggattcgactgttttattctatattatgtttggtgtatttctttttcttttcttttttttttttttaagtttggaagaattagatagtataatccaattaattaaattagtcccataaggatggatggattatcttaactgtaagtgagaaaaataatcttgctgtaaaatgtaattttaaagtgataaaaaaaattgatgttgtgatgtggtaggtttgtaaaaaaaaacagctcgtttcatttaaagggaaacatggcagaatacagaaggcaaatgaaagtagagctcaaaaaagaaaggatctaaagcagaactcaaaaaagaaaagaacgaacacttaaataggagctttgaaagcgagaaacaagaaagcgcacaaaggagcataagagaatcaatccatgtggactaattagaacaggcgaaaagagaaaaagttaacaatccttaacgcttataaataggagtctccctcattcgaaaaaggagatgaattcttgctcacgtcagactagtcaaaactttgtcagagtacattcgcaagaacactttgaggctttgagcacgaggagcaaaagacccaaacaaaattaagtgaattgagtgagaaattgtgcaaattgatagagattgtatttttattacactgaacttaggtgtaaagaatttacagtcataatacaatttgttgttgtgtctaatttttgctatcaacattaacccatacaaaagaatgaagttaaaatagttccatttttttttttttttaattttctaatatgtatatac

SEQ ID NO: 297176 - DNA, 2340 bp, Cannabis indica
aaatatacaaaataattaattttatttatattattttaatatcttataaatatatcttattcaaagttatagtattaatagtgacaacgaggtaattaaaaaagtagtatttattgtaggctaaaatttagctcatactatcttttgttcaaaatttggcacaatttttaatttgggctacatttggaacacattagagttaagttttagcaaaatattctaaaaaatagcaatacaccatatttatatctttctataaaagatactcttagttatttatgtatatatgattcaatatttaattacacttataacaattgacaagtaaaaaagtaattagtacatttagcatttctcataatattatgctgactttgattaagtggtgacggtggccttgaattgtaattaatgattacttactttactttgacgtgccttcctcaccaaaaggaagttgggtttgggtctacacacaagaaaaaaaaaattatcccacatattaggtttagattactttagtgttattctaattagttgtaatataagttactattgtagattttttgtaaaattataaaaaatatatattttaaaatgtaaaaaaaaaataagcatcaatttcatctaatattattctcctaataatatttttttattagtacaactaattataaattaaatgctaaaaaaatgtctttaattaggcggctttttagttatgttttctcagaacttaatggactacgtggacccaattccaatccactaatttaagcaagggataaactaaagtggacagtgctttttctttttttgatggtctaaaaaccactctcaattactttcaattccagagagagaacaaacggaatcaatggcagctcccgttaaggtgtacggaccacccatgtccacggcagtgtccagggttctggcctgtctcattgagaaagatgttgactttcagctcatttcactcaacatgtccaaaggcgaacacaagaaacctgaatacctcaagatccaggtacgtaccatatacatattattactcatttttatgcataatactttcgtattccatctttcattttccttttctacgttacagcctttcggccaagttccagcttttcaagatgagagcatttcactcttcggtcaatacttttttctctgtaaccttttcctcatttttttttctctgtttcaaaattagttcatgatctgggttggggctttctttttttctttctgtgtttaattcagaatccagatccatatgccgctacatatgcgagaagcatggagataaagggaacaaggagttgtacggaacaaacccattagctaaagcctcgatagatcagtggttagaagcggaagctcaaagctttaacccaccgagctcaactctggtgtttcagcttgcgttcgcccctttgatgaagatcaaacaaaacccttctgcgatcaaggagaacgaagataagttggctaaggttctacaggtttacgataagagactcggggagagtcgtttcttgggtggggatgaattttctctggctgatctttctcacttgccaaacacccaatacttaatcagcgcggctaaggataagatggaggacctttttacttccaacgacaatgtgggcagatggtgggctgagatttcaagtagagactcgtggaaggaggtggttcggatgcagaacaacactcccaattgattcccttctcttctcctttctcattcaaaaccttcgtcgttttcaaattttattctcctttcaataaatttttatgtgtaccgtaacagtattccaaggtttaaaacattactttcttttttttttgttgacaatgaacaatttcaaggtttaaaacattataattattattatgcagattttatgtgtacgaggactaatgtaccagatctatcagaattctacagttaaatgtgtgcgaaaatattaatagaatgaatgaccttttagaagtacgagttgcaaccaaaaaaaaaaaaaatgctaaggcacctccacttcataaaaagaaaaggattaaaacattattattgtgtggattttattatatgccttaatcatcatttaaaaggttctttatataatagtattgtagtattttttttaggaggattagaagggatttgaattgggaaatttcatattttggccctaataaaatactccatatcaaaatttagactccttaattttttgaacaaattgatttcactaatttaaaaaagttcctaaaatacccctaaaataaaattttcactctctctctgactttccctctctc

SEQ ID NO: 297177 - DNA, 1344 bp, Cannabis indica
attttgagctaatgtgtgaggacatgaatgaataaattaatttcatgctcaatgacaatatcaacaaatttttgatattctatatccttcttaagtgatttaatggattcctcaaactaattttcaaaaaaataaaaaaaaaaaaaaaaaaaagactttgctttagatttggtttcaagtgggaaaaactatgtgtacttgttgaagtcatccacaaaatatatgtaatatttgtaactggtattagacactatgggggatggcccccaaagatcagtgtggataagttctaaaaccttggaagcacgatttgaagacaacttaaaaggaagaacatgagatttcccaaattgacaagcattataaaacttaatattttcaatgctggaaagggatacattttgagaagctaggagttattttaacattctaacagaggggtgactagtcttctatgctatgcatcattcttggaaataatagactcatcatgacttgattgagttacattttcttttgacaaagtagaaacagaagtaaaactttgtggctgtttaggaattgatggtgaggattgacacgagggatttgaaactgatcttgttgttggagtggctagctgatataatccatcactaagcctcccttggagcaccattttctttgtggttttgttccgaatgattgtgacattgagtcctctcacatatttttgtttcctggtgaaatctgttggcactagatcaccagcaaatttggacagccgatcaaactccagagtgtactcggccacagacattttcccctgagtcagttttacaaagtcctctatatgtgaggttctcatagcgatgttataaaatttttcctcaaacagactcttgaactcttcataagtcatcacactgacctcacgagtctgcctcactatatcccaccagacgcgggcatgatcttgtaacataaaagttgcataatttactctctctgttcccatcacacgcatattgtcaaggatacgggtgattgtactcatccactgctcagctttaattatgtcagtacctcccaaaaaagttggaggttgcagcttcacaaaccgctcaaacaccgagtctctatgcgccaacataaacccctagttacccaccactagcacaggtgctggtggtaacacttgctcagcaggggcagccggtgtcggttgccttagccgacacaattcttcctcttgaagaagtatgatacctcgcatttcttgaaacatctgctgccagtcagcaggcggattagcattgccaacccccgcattattccccagattctacggaggcgcaggcggtg

SEQ ID NO: 297178 - DNA, 2464 bp, Cannabis indica
agtttacaatccacgggtcaatttcacaaaggtcaattgtgtaaccaacgaagttgaccgaaaaaaaaagtcctttttgtggttgtatattttttcttgattatttttaaaccaaatatttgtttatgggttataaacataggacatcaccacttgaatattttgtaaaagtctttatagctttgagtattttgtatttaattgtttcttaatattgcatctttttcaacaggtccaattctccttgaggactaccatctagtggagaaactagcaaactttgatagagagcgcatcccagaacgtgtggtccatgcaaggggagctagtgcaaagggattctttgaaaccacccatgatatttcaaaacttacctgtgccgattttcttcgaggtcctggagtgcagacacctataattgctcgtttctccactgttatccatgagcgcggtagccccgaaaccttaagggatcctcgaggttttgctgtgaagttttacactagagaggtgaggattgtactatttttttctttctctcatattgaatagccaaacatgtcttaaaattggaactcatcataatgtgtgtaaggctgtttcttatggtagctcaaggtggttcttgtgctttaaatataacgagcttaatcttgtgtagctctcacataatgtctttacatagcttattcttacctattgattaaggttttatatttccttgttcatgtgatgactccattatttgacacagggtaattttgatctcgttggaaataattttcctgtcttttttatccgagatggaatgaaattcccagacatggttcatgctttgaaacccaaccctaaatctcacatccaggagaattggagggtccttgactttttctctcatcatcctgaaagtttgcacatgttcacctttctatttgatgatataggtattccacaagattacaggcatatggatggctccggtgttaacacctatactcttatcaacaaggttgggaaagctcactatgtgaaatttcactggagacccacttgtggagtcaagtctttgttggaagatgaagctattaaggttggagggtctaaccatagtcatgctacccaagatctgtatgattcaattgttgctggaaactaccccgagtggaaacttttcatccaaataattgatcctaatcatgaggacaaatatgaatttgacccacttgatgtaacaaaaacttggcctgaggatattgtacccttgcaaccagttgggcgcatggtcctaaacaaaaacattgataatttctttgcggagaacgaacaacttgccttttgcccaggcattgttgtacctggtgtctactattccgatgacaagttgcttcaaactcgtatcttctcctactccgacactcagaggcatcgtcttggaccaaactatcttcagctccctgttaacgcccccaagtgtgctcatcacaacaatcatcatgagggtttcatgaatattatgcatagagacgaggaggtacttgatttgcttcctctatgttgtgtatatatgtatagcttgtttaatttccttacacacttctttgacatctaatggccattggtgtgatactttcaggtcaattactttccttcaagatatgatcatattggtcatgctgagaggtaccctacccctgctgccatctacactggaaagcgagaaagggtcagtatatatttgtaataaattattcatgtatttttcccctttgtatttgatagtaaagtaactatccttgaaagtccatttattttagcacaaattttaacatatttgctttaaggaatgtaattgccttcttttttgccataatgtgtttatttatattgcgagcctagtgcattattcaaaaggagaacaacttcaagcaacctggagaaagataccgatcctttacaccagataggtacttatcctcctatattcgttgcaaaggataattaatgtttctcatattattgtagccactatcttgacttgttttctcaccatgatgttttcagaaaagaacgattcatcacacgatggattgatgcattatctgacccgcgtgtcactcatgaaattcgcagcatttggatctcatactggtctcaggttagtccaaatttttatcttttctttatctaagatatattaatttgaatagaacatgatgttatagtgggtgataaagattctaatattatttattaatttgaataaaatatgggtttgtttgtaggcggacaagtctcttggtcagaagctagcgtctcgactcaatgtgaggccaagcctttgagaatgaatgaggccattgctctaatatttatataattactagttgaggtctccgtgcttcgcacgtgaatcttaatttaaatatttttttaaaaattgtaacatgttgattcttgttttgat

SEQ ID NO: 297179 - DNA, 1204 bp, Cannabis indica
ttaaataaataaaattaaattaactagaaaaaaaaatattattataaatttggcgtcggttgttaggggtctatggcgtcggttatatgggtctatggcgtcggttatatactatagaccgatgccatatgtaccctatgacattggttactataaaataactgacgccacagggtaccatttgttgggattttacgccctaaacaaaacccattacaatacaatctaatttgttatcaatagaagattagaaatcatttatgtttacatgtagttttcatgtttttggtttaatgtgaacaaaatctgttaagtccagaacatatagttattcacaattacagtgatgtcaatacagtggaatgtaattgtgattatatgcttcaaaagataatgtccatgattcaaaaaattatctgatcaaacaaaaaaagctcttttcctgaattttctctccgtacaacctgcgtgcagattggggctatggctaaaacaaggcaaaattttaggggaaggtgaacgttgatgcaaggaatctgaggaagacaaagaaggaaggtccttcatcttcgggtgatgtgaagaagactaagcggattgaggaggtacttgaagttgagcctatggcattctcagaggaggacgacgataactctgctccaagatctgtggaactggatcaggaggacttgttccgaccgccattaacgcctaggtcgtctctgcaacagatcaagctgcaggaggaaattcaagccgactttgagttctttttatcaacaaacgagaggtgtgcagatttgaacattcaaggtaacccgactattcctcttgtattatgttctggcactgtgattagaaatctggagaattcttttaagaatgaaaaggctgttaaggctaaggttaagatcaccacagaggatatagaagatgagattgaattttggagaccctctattgtgtgttatgtgttaggagcatatcctccattgtctgtaattgaaggatttatacgcatggtctggaaaggagaggtagacagagtgggaatgcttacatatggtgtcttcttggttcggtttgattctatacaaactagagatagaatttggaatgggggatatgtgtttttcaaagagaccattgataatgaaggcttgggaccctgacactaattcaactaagtgaaatgagtactcca

SEQ ID NO: 297180 - DNA, 1766 bp, Cannabis indica
agactataaattaccttagtaaacctgcaattgcatagaaattaatattaggaagataatcatactaggccataatcaatagaaataattgaaatcgaaaccctagtttttattaactgtcaatttttttaaataattgcttcttactagttccttatttttaattatttcttaattttcattcaaccaaatagaagtaaaggtttaattttaacgtacttaactgcactccctgtgggatcgacctcactcctgatgaatttactacttgaaacgatacgtacacttccgtgtacaaaatatcgcaacacatggggcactataacatttatcaatagcgatggaggagtccatcgctaagaactcctaaatctatcgccattggctattagcggcaggaatctgccgctcataattgtatgctaataacagttattagcggcggagttcgtgtctatcgctaataactattaatagcggcagacattagcggtgggcacccaccactaatagtgtatgtcagtttcgttaatcgagaatgatgttgggagttattattgaacttgtctttcttcccattaccttactggttttcgttatttgaccttttaccactctaacccgaactaatgttgttatgagagttctaattctattgaacggatgtattagcgaaagtggtgtgcggttggctctttttctgaccaactgtatctacacgccaaataacttcttcaagctttataaactcatttgctcaatctaaaaactctcctattgatcttacagtaagcctcttaatgtctttctataattcttccagatgttcaattcctcctaggatggcggccaacctcccttctatggttaatcctttcatgtttatggcatcaatcataaatctactaacgtaagccctcaaaggctctcctaatacttgctttacttcaaccaggtcttctaagtgagatgagagttgcctagaaaaggagaactatgtgtgaaattccaccatgaaggaattccacgagttaaatttttctagagctaacttgaagtaccactactggaagacctccgtcaaggtagctggaaagattttacactgtacatcaccctttgctgcccaagtacatttgcatttcaatgtacttgatgtgggacagaggatcttcattgcgcgtgtacattttctatgttggcattttgaacttgtgcagcagatcaaagggcgttaattttttatgagaagggtgatcccctagtacgatcaagtttaaggtttgtgagttttgggccagtcaggcttcgtacagggctcttaagcttatatatttgggcttgcaacactagatcaacttgacctgcatgttgaccgacttgtatcacttgtggatcccttagaacattaccgggcacatagttatttacattggttggctaaatattgggagggatgtatcgtccatcatgtccccttctacgattaagatcatctctcaaatcatgtacggggcctaatctgttaaagactaattcacctggaggcctccttgtctggctgttatcagtaattgattggtttagtatattcgtctgagatccgattgaaagattttttaggcctaatgatactttattttttaaaaatatcaattttttctatttttaatatattttttaggctgcctaaaatgtgaaataaactaatttaacatgttgattttttttttggagaagaacagatcacgattgggtttgggact

SEQ ID NO: 297181 - DNA, 1336 bp, Cannabis indica
aaaaagaatttaataaaattaaactgcagaataaaatcctaatttgttgctccatcaacagcaagctagatccatttagaataataatttaatttttatgtatgccaattagaatatatatgtttttcttttttaaaaacagaaaatgtttgttaggatgcatttgaataattcttttataccaagatattttgctcaaccaccaaagaggttaattcaacaaaattaccttttatttaatggtcactatgttgtcgttgttacttgccgttacaattttatttaaatttttttttcttattttaccaaaaatttaattgagaagtttccgattcagatttgtaaggagactttaccagaaaccaaatcaaacattagggagccaaaaatctacgtttctggtggggacaacgttgaatttataaataaagttttgtgaatattgactttttcgaaattccaacatatattagacgtttaaagtgaaattgttgaccaactttcgattcccctaaaaatgtaatttaactaatttttgctattatagcttacagcataggatgagattacaaccgttggatgagtcttttctgatccaacggctaaattgccctcgtatggttgactttgagtattaaattatgtttgggaaactggacataacgtgagttagtaactacacagtgcacaacaacacgtggtgttgaacaggcttttaaataaaaacaacaataaaagcacgtgaagtttaataatttttattttttaaaaagggagttgaatatttttcttttgtaatataatgaacaattgaaggattaggtaacaattggatgctataataaatttccgagccaaatcttcaactgggtacaacatctaacagctagcttacagtattagggtattaatatttgggaattataattaagttctgagtcaagtcaataactagggtacaacatcaaacaactagcttattgtttagaattttaaaactcgaatgctataataattatttttgagtcaaatacataaattataaactagggtacgaaatcaaagaactagttaatactactatggaattaaaacttggtttttattagagttgtagaagtgggttgtccccgttgacatagcatataataaacaaaaatgttattctttttgaactgactccacaagaggaagctaaagagaaattataagtatcactaattagtattatctatatctttatatattaaaaagtacttatctaacggcaattcttgtttaacgattctttttttatttagcctcacgattaatttaacagactgttaacgttaaa

SEQ ID NO: 297182 - DNA, 2465 bp, Cannabis indica
ttttaattttaatttttattatatatatttctatatataaaggtaaattgatgaattaatgttatttattttatctggttgattgagagagaaataaattaaattaatgaggattattattaattaattccattatttaaaagtggactcagagatgacctgcacatattattgtaagagcagggacactctggttgatttttcaatgttcaatatttgaattgactctcttgcatgttggttgcaacttgagctcaaaacagtgtacaaccaataatataattacaatacatggtaaaggaagtccactgttaacatatttatataaatatcaattacaattcaatatatagatagaaacaaaattgtgatcaattgctcctttcaactagtactactagtgaggaataataatatatgaaccacacaaaattgtagtgggtatccaaaactttttgcccatactcaaacttcccaaccttaattagacccacacaaacataacaattccacttttttccttttgtctttattatcaagctactattataatattattcttcctatttttgaacaagtaactttgacgtgaagcttcatgaaatcaaatacatgaaaactactttgctatagtttatgactgcgcacgtcagagttgtcaattacctaaataagtataaggtatatatatatatatacacctctatatatgaaaagaaaaactcactaaccttttctaaatttggtgtctttgaaattgactttactattttttttttaatttgttaaggaccggtgtcgagagatactcccatagatttaaatttcattagtaaagaaaaccccattaatttgctaaacaaaggctgatgatcaccgatttccaagttctgaaaaatgttaaaatacactagtactatttaacaccacgtacgagtgctttatcgttattgatgttaaaaatatttaattttatataatttaatttaataattattacaaaatatcgataattatttataaaagtgtcacctttaaatgatactaagagcatctccaataacaaatggtgctaaaccaaaaattaatattgatgccaaaacttgacattgatgtcatactcatatttctaataaaattaatacaaataatatattaaataataatgtatgtgctataattattataaaaaaactgttacttttagtaatttttttttgatgaatcagaaatttcattactccaaaacaaacaattacatcctaagagcaacaataaggcctccatgtatactgtacaatatatatctgtgtatggctaaaaacaattttacaagctttcaatccaacatttatcctttgttgtagcttttttttcgaagacacaactaaatctgtttttgactaataatctgatctattgcatcaaaagagtggctgtttgctggttcccattccacagtctttcattttgagcagtccacaacatgtaaaccagagctgctacagccgtgcatagcacctaatttctggttattgaatgtcttcccttctcaattttcttcgagatttccagggctaccgatttaatgttccagtgtagtcatttcttcaccaactcgagcacttcctgtgagaaaggacatgagaaaaaatatgctctgctgtttcatcagcttgtaaacagaacaaacaagctgcattgccaataatattgtgcttgtgcaacctatcttcggttttcactctgtcttgtgacttttagtgaatttttagtcacaacataaattttttgtgaatgtgacttttagtcacaataaaaaattatttatgactaaaacatagcatttagatacaagttgtcactaatttagttatagcaacaacaagtattgtgactaaaaatacatttagtcacaacaaattataccatttttgtgattaatacctttagttacggactttttagtcacaacataggaataataatttataattagtcacaacttttttacttttagttacaaattttgtcgtgactaaaactaatttgttgtaataaataataaatttataaagtacttattattgggagtattttaaaaaataagagcataaataaaataaaatataatattttaaatggtgtgaagaattttattacatttaaaaagtactactacattggtgacttataggattgctcttatattatataatatgtttaatagaaagattgaagatggcatggcagttaagtttgactatatatcaccaactccttaagaccagttccattttatatagcagatacatagaataccttataatgtacgcacatggcaaaatttacaaaaaccaacaatttcaatttatataataaacaaagagaaaccttttaatttacttctcattttcaattacgaggtgttccttgttatggtcatatatatatatatatcataa

SEQ ID NO: 297183 - DNA, 2175 bp, Cannabis indica
tacatatcaaaatttgagggacataatttagtagatatctaagtttggggagtatgatttagtacataaaccatcactgaaacagtaaaattgaatgaaattagacaaaagtccttaaatctaacaatctcaatagttcagggggaatttttaacgaccaaaaaagttcagggggcatgatttggtatatgtcaaagttcggaggaaaaaaaatactaattaacctttattttttagtccaatgaatagaataagactattcgttgagctatgtaaagctggtgaattattaagtttatgaactaaactttgacaatcagtgtcgagttaaatattgttgaaaccgaaagtaaatttgagacatagcatttcgaattgcaagagctttcacgattttcgggataataatgccaggcacgttccaagcggatgaaacaagtatatcactattagaatttcgaatcactatgcctaggccccaaattgcaactaccgaatcgataaatgcgtccaagttcgctttgaccaacccacagggagggggaacccaacgagagaccacgatatccaaattcaactgcttcacctcgaagttggttgaagcggctttggcattgtcagctttgtaagcgaggagataatcggtcgcccaaggaccaacaagttccaatggcaagagcttttgttcataaactttcttgtttcttcggtaccaaattatccaccaagtggtgaggattgattcaatttcgtagagaggaagatcttgaataaaaatacaaataacattatgaatgtcactcacaaaagcaactggatcaccaaggttgaaagagcaaagcttccgaacttgtccaagttggctacatccctaaagagcatgatgagttgtttccaaatcaatagaatacattgggtagatcttatcattaaggagaccatgtcgttgaggattaatcatagtagggatcaaactagaggataatctccaagaaaaactttttaccttaggaggtatattaagtttccaaagcacttgccatcaagatataccagacgaagaagtgttggattcagttacttgaagaatagccagccaataaccacttttcactgaataaaacctgttgacgcgattttttgtcaacttaatctaagaagataataaattaaaaaataaattcaacaaatgaagagataaaaataataaatgaacatcagatatttttacatggttttgtagttaaaatctacatactctgcgagtcaatattatttatgagttttgattatgcttacaatttcgtaaaatttcagtaaatcctaattatgtttaaaaaatttaccttaggaggtatattaaatttaccaaagcacttgccaccaagaaataccagacaaagaagcgatggattcaattacttgaagaatagctagcccataaccatttttcattgattaaaatttattgacgctatttttcgtcaatttaatctaagaagataattatttaaagaataaatttaagaaatgaagaaataaaaataataaatgaacatcagatatttttatgtagttttgtagtcaaaatctacatactttacgagtcaacattatttctgaattttggttgtatttacaatttggcagagtgtcagtaaatcataattgtccacccccctccaaacatatgatcccttcttttttggagacacttccccaaaactcttgttatgaaagtagaagccttttaaacacgagcaacaagagagttaggaaaattgtagagacgccctatctctaagagcatctctaatgttgtaccatttcactaaattagtgtataatcttcacattattttactctaatggcacactgaattgtgcaccaaattctatactattagtagttggtttttggtgttaaatatttcttttggcattttaacccttatcttaatttattttaagaaataattttacattttagtcctcaaataaaaatttatcacagaaatgaacattaatttacttaaaacactaacatttgaaaaatgcaaaataataataacaaaaataatattaatattaaattaaataaaattaacataacactaaattattaaactaaaaagaacaatataaataaaaataaacattaagtaaaataataat

SEQ ID NO: 297184 - DNA, 2299 bp, Cannabis indica
cattggtctacatttgtttaattaaaagctaagctaggagtactagtagcagctataggagtgtcttgatgtatgagaaacagcttgccacatcttttagccgtcccaatctccattctccgagaatgatcctgtataatacaagcagtggggttaaagaaaatgtggtatggtgtatgatcaacctgtgagggagagaaggttgatatgaaacttaggaatgaatagcacattatgaatagtgagatttttgttaatgcaaacagtaccaatattggacacaggaatctgttgtccattacgcagcagaacatgtttagggaatgttgtgttctgaaatgaagtaaagcataaagaattggaacacatatggtgagtggcaccactatcaataatccattgaaatgaattgtcagagaaagtgttaccagccatgcttgcagcaggatcaattcgaggagcagattgagttaattgttggctcagtagggaaattaactgctggcattgagaagaaaggtctgcagccgagggtgcttgaagaggatcattgaggttgctgctggaagcatgatgtgcttgagccttgcctttatcacccttttttttgtcaccatatcctggtggaaacccatggataaagaaacatttatccactaaatggcttggtttgccacagtgagaacaagagggcctaggtttcttgtttcttggtggattggtgggtgttggacggacagaggaggcaaggggtgggttgtcggatgaaccgagagtgcgttaacgttcttcttgaacaaccatggcaaacacatgagagagatgtggtatgggttcattgagtaatatttgggcacgcacagaggcataggatccattaagccctgtcaaaaactgaagtacctgatttttattataaaaatcaagaaaggctttcatggcaccacaagtacaggttgtattaggttgaaactctttcagctcatcccaaagggatttcagtttggtgaaatacgaggtgacggaccgatcaccttgttgcaaccgagtgagttgcgtttgaagttgaaagattcgagggacatttccttcattgaatctttcagctaggtcatgccacatatcagtggcaacatcaaagtacattatactttgagctatatcagtagagacggaattgaccaaccaggacatcaccatattgttacaacaaagccaagaagggagaagagagttaccagattcgggtcgtggaagagactcgtcaatgaaggcgagcttgttcttggcagccaacgccatggttatcccgcgcttccaagattggtaattgataccatgaagaacagtcgaaaccagaacaaggcctgggtggtcgtctgaactgaggaagaaggggcttgaggcatccttattggcatgttgatcaagaatgggatgggttcgcctttcaggagcaagggtattctctgttcttggagagtgttcttcgtgggtttcattgttgatttggggtcgaactctggaggtggtgcgtcgagaagcagtcatgggagctgctgtttgtgcggaattaacatcaaatggattttctgatcaaagatttgcaggtggaggtggaagaacctcatcctgtgatctcgtagagggccttgccattgaaatgggaagggtaacgtctgataccatatgagaatttcagagataaaatcagaggagaagaatatctcttattgattaataatgctgaaaaagaggccttacataggcaatgttacaatgaccaaaaaaggcccaacaacttgggaaataacagaataaccaaccatagaaatcaattataaaaactacctaactaattctaatacttagtcacccaatttaatattttcttcatttatcctaatttccatgaaattacgactatggattttttttttaaaaaaaaaaaaaataacattcaatattctaaatgacatgctattatctttaagttttctcacttgcattttgttttaatttttctttagaatttgaagagcaatggaaaaatcaaatctgttaggaaaataaaagtgaagaaaatggacttgtatcatatttacatgtgattcatcttgattattataacttagttaaagaactttaactgatggcaaactgtgtaatattgtaataatctatatatttatataatttttttgttagagtatgtgtagtggtgctctttatttgtaatgttacaacttctctaatttgtgatttttttaagttaattactatttctatatttttttca

SEQ ID NO: 297185 - DNA, 4068 bp, Cannabis indica
catacatattacttgaaatagtgtgagtgcaaattgggtagatacacattaaatctaattccctaacttagtgatattcctttcctttgtgtaagcatatcaactaactcaacaataacaacatatagaaagaaacacataacttttaagttttgtttgttttctttttgtacaaacttgatcatcatgagcttgtgaaagagatgtcattgcctactaacttacttgtaataaatactcatttcgtgttgtcttcttcggtaggattggtagagacgtcgaatccaggcggtatgaaaacaatatcatcccactgtgatgtagagctctcctgcaatgaagtttttttcactcgaaactgttactttacgaagaagatagtatacacgggcggaacaagctcgtgttccctctcaacattgtatcgtaaacgataattatatggcgaatattcaagtgcaaattactattttgagttgaagaaaaaaatattctgtcctgaggtatggaattatactaagttttattttgaagaagatcaaatagatagaaaattcgaaactcgaaagaactaaaataccttcattccctttattacatcttcaagaacagcaacctgtaacagagaccaaaagaaaaaagcatgaaaaaaaaaacgaaaaaaaatcatgctttggaactgtaaatgagaacaactagaatattacatacctcaactgctcctggtttgaacccgggatttaacttaccctgctcgcgagaagctcttatcatcgatttttccaaatcctcctacaaagaaaaaagaaaaaccccacaactgtgatgacgcgggaaaagtaattggatgcatatgtaagaaggtgagatactaaactaacctttctgaaaaatgcagggtgatagctcttattttggcttcgtagaattaagctcctcgactgttcaaatgtttcgagagttcaaaacattagtttacgaaattcatgaaagaaataagatgcaatggatgaagcggaatgtctgggaatcgaatcacaacatacaacaagacaatcaggcttaagtgaaccaaaacaacaccgacgatcaggcttaactgcctacaagatttgtccacatagaaccttaaaagtaaatgtacaaatgggaagaggatagcccctatccctcaataacaaaaatatgaaaatgaaagcataaccatcgagctaaacatttaaaacccgaagcttttttttttagttaaagaaaactgtaaatccttaaactctcgacacaaaaactgtgtttcccacatacatgacatttccagcttcttgtcataaaagaaatcttattcagatgatagtcatcaccacacagcaatattagtactatcatcatactttaacctgaaggctttttcaatcattaccgcctaaacatcttcaaggaaagaccgatgcagtatcttatagttcatcataacagaataccctgttttccaaagtttaatctctatgattcattgtgagctatgatctaaatgtgtggtaatttgcatcgagaaaacaaaaccgagtgtactgtagatagagaagaaagacaagaacctggaaaactggaaccccagggaagccatcatcagaaatgccagccttttctctctcctgaaaaaataagaaacattgattattaggcataatgtatacatcaatggcaattaactaccaatttaagattgaaaaaggttgatttgtcttttgaagggttctaaatggcaatcatgcatgaatagtaaacaaaaagaatgtaagggtagttaaaagacttgaattgtactcaaattgaaaaaatccaaaaactaatgaaacggagatggagttaacgacgttgatccaatgaatcatatcatcgatgatgaccacataggatgtagatatcacacaccaaatccttatgtctcattatagttaacggagatggagttaaggtctctcggtgataaatcaaactgagtttaactaaacaaatcctagtgattgaatgattctaccaatataagtcttctgtcatataagcctacaattgggtcagatgtaaaacaacaacacgaaaactgaaaagatatttgagataacgattcaaaatcttttatagccttattagttgaaaatatctgtccctttttctatatcttggtgaagagaaggcaaaacaaaagctcagtttacatccttacttatgaaaacaacttcactaaggctagcaatttgtgtatttgtgtcgtgttttggatcaacacaatacaattatacttaacacgaacacaatatgattaaataacgtgtcataaaatgcaagcgcaaacacgatactgttattataggtaaacccgtgacacaattaacacgatatcaaaacatgtcatatgcaggtcatgttaagttagattaatacattatgtcattttcaagctgtgttatcgtgtcatgaccagtattgccactcttaaacttcacacttctatagtacatttcaacaaattcaaaccatgtaaagattaaagaacaaacaatgaaatagcttatcatcccaataaaaggcctcaccataagtgcattcttaacttgagaagtctcaggaatcaacctaaacgaaacaccatcaactttgagctgaaaaacctgccaaaaccacacacacaatcaaaaacattcttcacaaaccttttccctctaaccaaacaactcaaagttactagacaaagagtgataatattttattatccaagagttttaatatcttaaatattcatcggtagtgaaataagttttatgattaaatattcttgttttatgaattttaaatcgttatgttgtccaaatttctctaaaataatatagtaagaaaaaagttaaattaaaacttctctattattctttctcaattctgaccaatccattaaattgtacaatatatataatggaatatcacccttatgttacctgatgttatatatacacaatataacatatgataccttattcaaagcaacaggcacaactttggacccattcctcattccaggatccaaactctcaatctgcccaagaagagcctcagcatcctctttcttgaaacaaaacaacccaagagacttcccagaagaagtccccgaaaccaacacaaactcatcagccgaattgctaagagcatagacaggaatcccagctaaccgctcctcaatggcctcaatagacattccagctcgcggtggcggaggccggcgagggcgagaattggattcattgtttgtggaaattctagcccaaactgggttgggagacccagatgaagaaaactgttccaaatggggaattcgtttggaaaatgcggtttggaggtgggagagagtggtttggagatgggttttgaggaaagatgggtttttggggagttgggagaattggtggaagagattagagcagttgtggtgaaaggtggtgaaggcttgttggaggttgagttgagggggttgtttgggaggtgagaaagtttgggaattgttgggttttctggaattcattttctgagaaagtggggatttgagctttttgttagagaaagggttttggggttttggggtttaaggatgagaactgaagagaagtgaactgaaagagaaaaggtaaagaagaagaagaagaagaagccaaaaaagtgaattatttgagtttaatattccttttatagaaacaaagataattgttataagaaactattagtggtctattataagataattgttatgtattaatatccatattagtttaactaagtatcaagttttatatagtttaatgtgataatttttaggagtattgttagccaattacaatgtgatatatctagaggtactagacatcactagtgctcaacaaaaatgctcgtataattaagtatcgtatctcatataaattaagaaaataatttttaaaaaatatcatggctaattagcaatttttccccccgaactttgacatgtactaaatcatgccccctgaatttttttaaccgttaaaa

SEQ ID NO: 297186 - DNA, 1522 bp, Cannabis indica
aaaaaaaaaaaaaactctaatttaaagtataaaaattaaaaaacccctaactaaccaaatttttatagatacactttatgaagataaacaatcatatataataatagcaatatatacatattaaagataaaagtcttattaatacgatgttattttaataactataaaaaaaagtgaataacattttgaacattttaatatggcatatactttccaatttcagtcccaaataattcatacagctatataaaagatatttcttgtattatcttctcatttttttcctcctcttattatgctcgaaaatcttcatgcataactcatttatgctgttatacacacatgcatattttatttatgatgcaaagatatatgtggatttttagatattagtagataagaataagaaatctcaaattggtatggggtatcaggtatgaaaagaaatcctgattactaggagtgggcaaaaaaaaaaataataagaaaatgacttgtgagcaggaaaaaaaaaaaaaaatcctcaacaaaaggctagaatcaatggatcaatgtttgatagctcatacattcccaattatatttgtcatctacattatataattgaaaaacttatggtttgtgattgatctattcatgccaagattatttatgtagtaaatgaagtaaatttcttggaaatttcaatgcagcaatcagaatattcacctatcaatcaatgctcaccatatctcatgattttcttttatgtatttattttaacaaatgtatgatcagaatcacattatatggtacaaagcacatgaagtaataatgaaactttttaattccttctctcatttatttttttgacaccacaccacaccacaccacacagcacaaacacatattttattttcttattaaaaaattatctttaattttggaattgtttttccaatggcatgtgaccaagttgataaataccattactatatatattctcatagtgtgaaagaaacaattaattgaggttcatatatatttattagtacctcatgatactcaatgtttctttataaggacaccaaagcaaagtgctgtcatccctatatggaatggtggttatttcataatgtttttctcgatgacagaatatatactttactattgttgattaataataattgatgattaataataataatgccaattgatcaatattcaaatagaatctctaagagtacatgtgcatgcatacaataatcttcaacaacaagaatcccaaaaagaaaaaacgggtaattattttgggataacatgtattaaggatgcttttactgacactatattctgtttttttttttttctctaatcaattgtttattttatatataaatttaaatatagatttatttaataattaatgtattttaatatacgggcatctattaagacatgacctaaatgcaatattacatctcactaatatttacatttacatgactattaatataggtgccgtttggtaacatttttgttt

SEQ ID NO: 297187 - DNA, 5909 bp, Cannabis indica
ttagtaaacaatgcacttgacagagcagaaattatgcagattctgcaaaccacatccttcggaccttgagacttccatgaaagcaaatgaccgatatacttaaacatgtcagctttctcaagatagataccaacaaccatggttccaaaaagaagtccaaggactgagagatcaatggcatcatatgcttgatctggagtgatgaccttaaagatgatcataagtatggctccaaggagggatcctgctgttctgcctataggcagtaatggaagtgaagggaatactgccaagacccagaaaattacaaatgaaatcgaacctagcactaccttgtcggtagacgctaactctaacgccatttctgaaactagaaaaacttaaaagaaagagttcaaatcaattggtttggaacgatagaagctacttgcaacaaagcttctactaactagttccttatgacttaataggagagaaaaaaaacaaagaaaatgattgagtgaaataactctaatgggaaccagatagaaaatgtgtaaataagtacatataaaatttgaccttaatcgaagaagctagagaattacacaaaaagaacatgtaacagagttttaaaagcaagttcgtgtgttgatcccccagttgtactgttactgaaaatatcttagattttgagtaaaagaaaaatgccaatctttctagaaaaaattgcaataatttacaaatgggatccaattggaacactgtaattcatgaggctaaccatgacttgacaaaatgaaaaataatttgactagctggctgactcaatacttctgttccaaaaaacagacgaatcccaaatttgctttataaaaagatcctactcagattataaaagacagttttggatgaaatgaaatctatttgatcacaaaaaaccacacaattgttcatccaagtactactgagtagaagttttcgagtctagtattttgtagatgagtactactggcacagcatgcaaatatatatatacctcaacatgcaggacaccacaaggctcttatcaccttcaccttggttacaagtgcacgtttgtccctgtccatattgaaaaaaaaaaagaaaattgtattattatgtaaaaaaaatgacaaaaaaagaaaacttaatcaagacccttttgttagtcaactttcctttcctctagcctgtggtctaattacaacaaatcacatacgtaaattccagctttaaatggagtttttcatgtaataacatagcaaacagataatgatcattgtcatttacttaaccaacttggtgcaagaaaattcagtgtctttactgaccgacattaaatgtagaaaaacaaaaaaccatgacaacatcattatttaggtacttagatatgacatcacaaataagaaaaaccaattaggccataaagtgcaatcttttcaaacaagtgggcacacaaagagagctctgggaaagataataatgcaatgaaaaaacatgtggcgtgatacaaatcgtactctaattatttacaaatcaaagatatatggcttaagcattaataagcaaaccttcattgaatttgtaggagttagttgagtggtatttttctcaatgcagagcagcctaaaaagtttgacttgtcccccccacactgtcctggtcatccagcacaacaaagcctggttaaagaattaacatacagcaaagccaaaacaataatacaaagttatgtaggagtagagaatgaagattctcaaaaagtaactttttttagtgttatcaactcaccagtacaatcaccatttacagctctatttgagattagaagcatcaaaaggacaggctttggtatgtcagtaacattatcagcctgagcatgaagctttgtcagactccaaaaagagaaatacaaaacagaataaactttaggtaaaaatatctagcagtcaaagaaaatgggatttacccaagtcttttattatgatataattaacttacaaaatagtgggaagaagatatttataatttgatggctgttatgattctttgattatgacataatctaatgattaaaagaaagcattaacaagccatgcatactaatatttctaagcacaccaatgcccgctattttactattggataagagacatttagatcatgaacccgaccaggtgactattcaaacttggatgactcaaaatatcaacgcattaatcaaaaacttaaacatataagtggtatgactcaaataacattaaaaaatcattatgttaaagataagacctgaagaaaaagttcaacatttccgcattgttaaaaaacttacatcagtcacacaagaatgtttttaattcttgaccccaatggaaaccacactaactcgctcacttactcacagtgcttttctgctctgcattttctcgagcaccaaacttacacatttgtaggagaggtcacatggagaagaagtgtacctattcttgggcaacactccaaggtttgggcagctaaattagatttacttgggcagcaatccaaagccttgtctggggtagatggccttagccacatcccccaattgggtttcgcagaaaaggcccaacagcgttgaaatgataaagaaagacgtatcaccataaatgcttggttgcatcacagtcaaacccattaaggaaaaaacgcactcttagcccaactgtccattaaatttcctttgatagagacagaaagaaccccacacgccatccatgactattggacttgctctccaagttttcttcttgcaagtcaccttcatcatctagtgtctttttgtgcatatctaacctactaactaggctgctactatggctggacatttattgtctttctgatcttgagaagacgtatgaacactaacccgatcttttatttattatgacattaattaaatattttttcaaccagtagaatttggacaggaattaggattttccttgtatactacgatctcttcattctccattatagcttctgaaactagacatcttcattcttatacgtatgcatgctgccaagtatggcagattggcagataggattttcaacaaaagcaacttggatttgcaaattaactggtgtttcaaaaggtatgtattgcaaggaaataaaggagaaatgaaagttcccaagtaaaaagaagattttattcaaaggttgcttcagagtaggctttttaacaaattgataacaatttgattagggatctttagcaaaacaagcaggtaaagcagataatttggctggcttggctaagcatgaaagtcccagcaaagacaacaatatgccgagtctgaagagaaggtaaagctcaataaaggtcgagtgacagcaatatcccagacatgcttttaagttataatattactttgataattttgtttatcactatcagtatagagtaagatagatagggtatgaaaattgcagaaccaactagaacagagttattaattactcaaaatttatattaaaaaaattaatttataatgaatcgtatcacaatatcattgtcaaacaaaagaagtgtatttacaaattgtttgataaaaaaaaaattaataaaattaagctttatttatacgatcaaaatcctctagatgaactttgccaaacctcaacagtttgttggtcttttctggtgacaaacattttgttccctccaaatcccaaattggttatcttgttaccacccatgtccttcactttccccatcaaattcttcctaaacactctctcttccaacccatcttcttcacttctctttttagagctcatagctatttctgaccagagctcaatatctcctcctttgctgcaaaacacttgacttccatggctttcaatcttgcaaccaacgccttccttcttcccatgaataaatcctcttctcttgtccccaagacaaacccatggattctcagctcctaagtttctcaaatcagaaaagaaaacttcacctgaattaacacccaccttgaacatagcagacaagtcatctgaaactgtgacatctgagaagcaatcaacgctctctttcagatcccaaatcacattaccagaacgaatatcccaaaactttatgtcccctgaaactcctgaagggccactatgagacccagaagccattaacaaattcctaccctgaacccaactcaactttgtcgatggaatagctgagttgagctccgccccataaatctcacagtgaccaatctcagtaactggactcaaggtattcaaatcataaaccataattgaattcgagttcctacgacccgattcgaaactaacgaaaagtaactcaggagaagaaccaattgcttgaaccgttgagctagaccgagtcacattctcccaattcaaactatgtttcactaacccattttcgagatcgagaatctggagccctgagaaatccgtagctccggcggccaccaccgacggagaaatcgccagcatagaatcgactgccgtgaattgagtcaggatggtatttttcttcctcagagaccaatcgaaagacgtgatcttgctgccgtgagccacgtggagcgatccgaacggtgttgaggcgatgactgagggagaatcacggccgttcaaggccaaaaccatggatttctcgagattaaaggcttcaaactgagacgggttcgatactgaattgaccaaaaggttatcgataccatagaattgggattcgaatattaggtcttggacatcgaaagctttggctttggacggaagattgccagttcggagaagcgaaagtagaacggaaaacaagtcggggtctcgatcaacgaacggaacaccttgccgagaagatgaatcggagattctaccgaagagggagttgggtccggcgagagcaagggtttgctttgttgtctgaaagagctggccacccacatcaatggtgactatgttagactctgaactgtacggaggagaagctaaaccttcaaaaggaggcattttgagaagacccagatgaaggtttttggccgaaagagaaaggtattgggtattggaagagaaagcggcaatggcttacggagttggtggagctggtggttttggtagttgtcaacaatggcttatttgtctgtcaattatgaaaataaatatctatacatatatatttgaagagagcttctagaaagtcaaagacatgggcttgggcttttgtttattttattattctcttcattttgatggaattgtttatttttattttatttgatgaaatcatgcaaaatcttggtcaattatggctaggtctaatataaaaatataaacttattcgagaaaaagggaataaattagtagctgtccaagttggacttttgaccgttttacatatagttgagactcaagtaaccaaataccatacaacaaataacggcaaagcaaagcaattgattctgacgtctcatctttagaattcacaacaaaacttatcataatttatcttttccaataattaaattaatagaaaagaggggtttctatgaaagtttttatttatttatttatatgggaatacacaaaataattacgtaaacaaccaacgaacaatttaaattataaatcaaatccatatagcaacttatctagtaatttagactataaaaattaaaaaaaaaaatatatatatatagagtgattttcagaagaaaaaaaatgacattatacacgttttataaatgtagttatagaggattagggctgaacatcgggcgggtttaccgggtttcgggttggcgggtttcgggttcacgggtttcgggttcaaaaaattgaaaccgaacccggacccgaatagggcatgggttggcgggttggcaggttggcgg

SEQ ID NO: 297188 - DNA, 3815 bp, Cannabis indica
tattaaagttgctggtacaattaattttacatgtacacaattcaataaggttcactaggttgagtacaagtccatttaaagaaaaaaaacagtattacaagattggatgagaagaaggttggttagttttggtatgaaatgacagtgactagaatttcaaaaactcatacaactctcttcaaattgataaacccatatcattaccaactcctttctatttccaattccttcaccaagatcatctctccttctccattctccacccatattcctttcaacaactcccaacacgcagacattgcccatggtctcatttccatcttcacaaaatctcccttttccccagaaaacccagacctgaagcgcctcgctccggttctcaccaccgatctcgttgaaaccgtgctaaataacctcaagagctggaaagtagctcacttgttcttcacttgggtctcaaatcaacatgggtttaggcacaatggttatacttatactgccatggcctccatcctatcacgtgctcgacaaaatgccgcactcaaagccttggctttagatttcgttaactccaattgctcgatcactcccgggggtttgggtttctttttaagacttctgggtagtttgggattggttgatgaagctaatatattgtttgatcatgttaagaagagggggctttgtgttcctaatggttatagctataattgtttgttggaagtaatatctcagtctagttcgattgatttgctagaaatgaggtttcaggaaatgttaaatgctgggtgggagatcaataagttcacgttgactcctatattaggagcttatagcaatgcaggtaagtttgaaaatgctttgaatattttccatcaaatgcttgagaggaattgggttgatgcccatgtgtttttctattcttatactgtcttatagcaagtggggtgaggtggataagtcgtttgagttcattgaaagaatggaggatcacaatcttatgttgaatgagaagacattttatgttttggttaatgggtttgtgaaagaatctagagtggataaagctcttcagttgttcagtaaaatgcaaaagtcaggttttggtgctgatgttgccctttatgatgtgttgattggaggactctgtgagaacaaagaactcgagaaagctttgtgtttgtattcagaaatgaaggagaggggaatccgccctgatgttcgaatagttgccaagctcatatcatgttgttctagtgaagaggacatgcttcaattacttgcagaaggaaaagaagatatggatgaaggagctgccattttgctttacaattctgtgttgaaatgtcttatcaatgtgggtttggttgataaagctcataatctgctccggacaatcatgggggataaaactgatagtggtttcatagtgaaaaagcacctcgagatgaatattcgccctattacttcttgttttggaactgttattgagggtttgctaaagactggtaagtttgatatgactataagcctaatcaaagatatgatccagattggctgcaaaccagatatattaatatataataatttgattgataaactgtgcaattcaaatagacttgaagaaagttatgagctcctgagagatatggaggatttgggacttgaaccaacagaatttactcataattctttatatgggtgcatatgtagaagagaaaatgttgcagaagcacttgaactgctgaaaagaatgcgtcaacatggacatgtaccatggaggaaatattcaaccttactagtcaagcgactttgtactcgtagaaaggtggttgaagcttgtaattttcttcatgacatgcttcaagaaggtttcgttcccgatataattacttattcggctgctatggatggcttagtaaagtctaaagaactaaatcgtgctctggacctgttcaaagacatttgtgcccaagggtcttgtcctgatgttgttgcttataatacattgataaatgggctttgtaaagctcaaagaatctcagaagctgagaatctcgtgaatgaaatggtgttgaaagggcttgtaccatcagttgttacatacaatctgctgattgatggatggtgtaaagttggcgccattgatcaggccatgcattgcctatcaacaatgtttgatctagagagagagcctagtgtcataacttacacaacattaattgatgggttatgtgcttctgggaggcctgatgatgctctaaaactctgggaagacattaaaggtaatgagtgtgatccaaacagaattacttttatggctctaatttgtggtctttcaaagtgcaataggcctgatactgctctagtttatctccggaaaatggaagaaatggaaatgaaacctgatagttttgtctacacaacattactaagtgcttttctctctaactcaaatatgtccaaggcatttgacattttcaaagagatgtttgacaaaggaattgttccagatgaagcagataagaaccattcaatagtaaaagaggctactcttaagttgttgttagctgatgacattacttcctctagtgtaaaagctctgattgcagagggaaagataccatccattaatctttcaaactttggaagtgaaggtcagtcttaaatgtagtataattattgcagagccaagattctttgttgtgctgaaaataatcttctatagtggattggattggttgaaaacaggaacaaattagttggctgggcttgtatgaaatggggtggatgggattaagatatatgtaggtctgcaagtacaagcaagtgttacacctgattctttttttctttttatggggaaagacttgtatctatatttggtttatactctttgataccatagctttcagggcaagcttttttatttgtacaatctaaatctactggtttgttaatggtaagttatcctctcctatcaatctttttactcggtagtaatatttactagaatagttattgcaataacaataccagtcttcatgtgtaagtgtcaacccaagtgggtggatgtaaatgttatttctgtgcaaatcaatgtaaaattgacgaaagagcttactctttcaccatgctgtattctgagattcattgtacgtatctttcacttgagatggtttaatttgacctcagattctctctttgtagtagcagtttctttcatatgtgtgattttaaaaatgacattctaaatattataaaattgctttcattttcacctttagttcttcagatgaaggaaaccattcaaaagttataattactcccatatggatttattttcttgttgcatctttagaggtgagaaaatacacaaagtgatttttctttctgtaatttctccagcattaattttcatctcaaacattgtctgtctcctttttaaattacaaaaattagcttaaaatatagtagtccacaacacgttttggttaaaatctaaagacttttgatttattttatattttttcatttataaaattaaacttcatggtttagtaggtttaagtatctttccaatataactcatatatcttattgtaaatgtgttgtttcattatgtatattatgtttgatttacagtatgatcaagatatatctgttggaaatgttgtgaatgttttaacaaaatatataagtgtcttatgtgtgtgagttggaaagagtcccacaagggatatgaaccctcatttacaagggtataaagagtgtaactttggcaattgggtttgggccccaaggggtacccagtt

SEQ ID NO: 297189 - DNA, 4555 bp, Cannabis indica
gcctggggaatgtcatgtgtgataattttgagattgtgtaggtataggactacacagttgaagatgacttaaatggattgattagtactacctatatcaacaaggtgcatcttctttttatggtagtccatcacgaaagaactctatggttaagcgtgcttgacctggagtaatttcaggatgggtgacctcctggaaagttttctcaagaagcgtgcgagtgaggacaaacacgctggaaacactcgtgttggtttgtaggatcagtcgtcattccatgaagtagccagagtaacgtactcgtgtataagagccattcattccgtagatgtaagggtccagtgaagacttaaagtgaggacattattatttttacttattttttattaaaataatataattattagtaaaaatatttatttttttaagatactatatttaatattttattaagaaaaaaaatagttatattttttaagatactatattttaaaattctacctcttagaatttatcaaattatgaaatgactatttgcttatttatttaataattgcctcttagaaattagaattctatattatatatctatttcaaaatagatattaagtggcatatcttatatttcagataattattaattaatcaataacaagtacacgatatgtttaatttgattattagtggctgattatttttttagactaatttataggcgtaaatatttaattttaactttcagttacaaataaatttttaaatttaattttttacggtaataatatctaagttatatttttgaaatttctgtaagtacataatcgttaaatgttaagtcattatctttatctaaatcactgggaggttgtgaaaaccgacctattcactatgattcatcatttcttccaatcaatggagttgccgcacttcatcaacgatacaaatattgtacttgtaccgaaaaaagagtaccctgttgggataaatgattataagccaattgctcttcgcaatgtggcctacaaatgtatctccaaactgttagcgcttcgactgaaggatctgctcccatccataatttcaccggcctaaacggcttttgtaaaagggcacctgatcaccgaaaatactgctacagccagagaagtggttcattcgatgatgaagaaaaagggcaagataggatacttgatgatcaagttagatatggagaaagcttatgaccgaatgggttggggcttcattattaaggttcttcaaagtttggggtttcaatatccgtttattggttggattgagtggtgcatcgagatcaagagaatgagacttgttctgaatgggtctgttaatggttttatcaagtcgacttgtgggttgcgccagggagaccccttatcaccagccctctttattcttgcagcggatgtgcaatctagattaatttcagccagaaaaaatgatggtacaataagggggttcacaattactcgcaatgggccgtcaatcactcatctcatgtttgcggatgatattattctatttggtaaagctacactgaaggaagcaaaaggttttatgaaatgcctctctcagctggtctgggcaagtagtgagcctgcagaagtctacggtgtatttttctaaaggggtgtcccctaggaaggctaacgaaatctcaaaagctcttggaatgaagaggatgagaagggatgcaatatacctaggactgcctttattcaagttgattaaacgaacaaatgatctacaattcctggttaacaaggtccttagcagagtaaaaagctagaaaacaaagcttctatccaaggccggtagagcttatcttgtgcaatcggtcggaacctccttggccatttatgtggcagctacggatcccatccctctatcaatagctcagaaggttgacaaatgcttgagggacttttggtggggagatactgaggataaaaaaactatccacactatcgcttggcatcaattatgcaaaccaaaactccaaggaggtttggggttcagagaattagccacagtcaataaagcttttatgcttaagtgggcttggaatgccttgattggtaatcaaagtctttggtactctgtggtaaatgcaaagtatcttggcaaaaggaagtttctcgatgtagagaaaagaattggggattcagctatgtggaaggccattattgacgcaaaattggtcctggaaaagggtatttaccggaaaattggtgatggcgcaagtacgtctatttggtttgatctgtgggttcccactggtaatcagtctcctttgccacgacatgatgtttcggagggggtggcctgggtgaaacggttcataaccgaaggtaataggcggaatgttgtcaagattagggactggttctcggaggaagatgcaaaggacattctcaacatcgacctcctggatcacccaaccggggactcttggctatggcttggggaaaagaacggagatttctctatcagatcagcttgtaagtctattaaaagatcccttggggttgacgcaactgattaggtttggaaattggtttggaaatctagactccattcgcgtttgaaggttctttggtggcaattgcttcatgatgccttcctcaccaaaagcaagctgtctaacatcatgaggttggattcgaacttgtgtgctctttgtgggtgtgcctcggaaacctcattgcacctattctgggagtgctgctttgctaaggcaatttggtttagtacaccatggggaattaccacggattcagtgaaagtgggatgttggagagcgtggatggactggttccaagttgattcgaatcatccacctgatgtctcttttgatgagttcatggtcacaaccctttgtatagttgaggcggtctggaaagagcgaaaccgtaaagtgcatgaaggtacgattactcctatgccgaatctcctttgtctaattaaaagaagcatcaatgatcatactctggtatcgagaaacgaattagatactgttcttgtttagagaccccctcccccaaaatgggtgtgttgtaattcatatatgaagctttgtgtcaatggagcggtgttggctgctgtcttgagaaacgaatggggtgagatcctagccattaaaaaggctaagaccttgtgtactgatcccttgagttgcgaagctcaggcagtttgccttgcgacagagttggcgggtgagagtggccttgatttggtgatttttcaatgtgataatgctggggtttccaatgccttcaacaccaacatagaggtagcaattgattttaccctctatgcggctaggaacagattctttaatctgtacaggcggttcaaggagcggggattgattcatgtctctagacggtgtaatttcatggcgcatagcgtagcaaattaggccttttgtaataacacttttgatttagtgccccttgggaggattgcaccgagtgtgcttgatgattatactgaatgggactgtaattcttgattttttgcttttggtttgcagtttgtgcttgtattttgacttttagttgaatggtatttgtttggggtgactttgtcacccttttccctatcaaaaaaaaaaaattattatctacatgtcattttttattagtatatttaaattaattttcatataaaaaataaaaatttaatgacttaaactaggaactgctacatggtcattgatttcacttaacgatcatgtatttacaaaagttttaaaaatataacttaggtattattaaacttaagtatttatctacaactgaaaataaaattaaaatatttatactacaaattactcataaacttaagtatttatctgttgacccatgaatcacacaatagaaaggaaggtaagaaatatggaattatttcacaaatacacaaaaattaacaaaaagaattacaaaaatacagttgtacgaaattttagatatttttgcaatttttatgattttatttacaaaaactaaagtctttttatgctgcactcatgttaatttattattaattttttgttatttgtatgttattttatattattgttttgatgttgtttggatgatactcttttgttacttatatgtaattttcttattattttcatattgtttctataaaaaaactgtaaaaatatataaaaaaaatatttacacgtacaaatataatatatttgatgtaattatttcaaaaaatattttattatttctatcaaaaaagaaaaacacatatacataagaattatatatgtatgtatgaatgttgatatttataaacatgcatgtcaaaaagaaaagaccatatatatagcacatattcttttttatttatattgtctttttttttactaatagcatctccaatagtagtatttttaaagaatgttaaaaatttatacatcatttaaaaatataatattttattttatctctcttccacatcatatttgacactcttacttttaaaaacactccaacgtataatattttttaaaaatact

SEQ ID NO: 297190 - DNA, 3437 bp, Cannabis indica
caaataattattacatgaaccaataaaattatagtatgtgtacattatattcacgtatatatagacagtccaaacacttaacatccaaaaataaataaaaatattaaattactaacgcgaattttggaaatcttacccccaaaaaataaattttgagagttgattgataacgagaagaaagtttagaaattttgcctctatttactctaaaatcattgttacaactctaatgtttagtttgattttgaaaactttataatatctttacaatgtaattatcattacacagtttaagaataaatattacaactttatgcctgtgtaatcactattacaaatgaaccttatatccttcttttatacacctttaccaaaaggaaagaaattaaagaaaatttttatcaatatgccactcattccaatttcccattaccagtctaaaaataaactgaacaccataacttaaaatagatattatttccaaaaatcccatctttcatccttttctacaattttttaataatctattttatcttcttattaacaataaatttcatctacagaattgtctagtagtttaataagctagaaagcacatcatgaaagcctaacaaagggatgatgataaatgaggaaatctgatcccacccattttggttaaaaatttatcaatagaagttgctattagaaggaaatgatacacaaattccatcagttacgattattaacatcattcataagaaatgcccaagagtggtactgatgtttcctagtatatacagaatttccgtcaagattgccaacttttttttggttgaaattacaaagcaaagattataatctctggagtatagtgcctgaaataaccattgtgttttgtttccgactaaccaaaaatatttaaacgtatgcatggaatgaaatttcaaaacttgaccactggacaatagtgtgattctcaatttcatctagttgtgggggccttcaaaacttttcgaaacattcaataccttcacaaacagcattagaaaaactgcagacagcagccaatatgaacatacatgaatctgccaatgattaaatgcattagaatatcttcatgtgtaactgtagatccacatacatatgatggacagtcctactcaccaattaaatgcacactatgcacaagggcacaacctcctggtatgctgatgagaaccatcacatgaaagcatggactgcgtccgggtgtacaaacatgctccaggattctggcaaatataaaacataatatatagcatcgaaagttcacaactcaatttgtctattgatttaaaaagtgatggaacaatgaaaaaatggagatctgcaggtggtaaaacaataacatttaaggtagtgaaaatatcaaagttggtgttgaacaagcatgcattttcatgatgttcagtggaacatcaattgcataatccatcaagggctatgaatataaaataatttattaatactctttcctcatcatttatccaaagaaccccattttggaagcaagttgacacttatatatggaaattcaattattgaaagtatgttttatcatgaaaatagattactacaatattaaatagccccgagataataaataaatagtgaaaaagtattaccaaatgtttaggggcattatcaacaacttcagcaggttgatcggatcccatgcttgacaaacaagctcctttgcatcgcatgtatttctgcatactgctcaggaaaagtttatttatcaaaacaggttatctatgtgttcaagctccccatttctaattatgaccataaacctaacacatcacatgtaaaacaattgtatctgaacctaaagagtgatagtaataatcagcttacatgtcacattgattaagcaccaaaagcttatttggaacacatgattgtccatttgacttgcaaactgaatcacatgactcaccttgcctgtcaacaaaacatgaaatgagaattccaggaaaaatctacagcttcacattgattactagaattgagaaacacaaataatcaccaggattccccaccttccaacaacaacatcaatgccattaagtctggcttctagcattgtagaatttgcccctatcaacataaatccacaagaataaaaattaagtcttgtctattttggatccaatgagaaacatgtgttcgaaaatataattgtgcatgcagacataagcaatagaaagtaacaaatcaaaagctaagaatgatgtaaccaaaagagtataacattggggcttcttgcatatatatatggtgctttagtgcctaagataccttttagcagtcatacaagatttgttgttatttcaacatacttaaacttacttctagagaaatataagatatcccacctgaagactttgatgtcgtggagaaacagtgatgaaaatcgctgatgtatgcattttcatgaacctgaaatgttgaatctcattcagataccattccagattaaccaagtagaatggtagcaagtcatataaagaaaacacaaaagctctcctacatacattaagagacaagatcaaatgagcaatttagaaagtaagatagccaggaaggctattatttaactcagcgctacttttttacaaacatcccatcaagaaaccagattaaaaactcgaaacaaaatataagcaatagtagatcaagtttaactttcaacatcaagttcctataagacataaatttgattaaaaatttaataccagcactccctacaccctaaaaagataagcattctctgttatgagctcatagaactgttagtttggtggaatgggacttccttgactttgtgttggaatggagaaagattttggaagtttgtggagaaaatggataaaaggatgtgtgctcagcctcttactcgatatttcttattggacaacctaaaggaaagttaatgttctagaggtttgaggcaaggtgttcctttgtcgcctttccttttcaccatcgcaggggatgtgttggggagattggtagatacagcaaaaactcaactgtggtgagaagcttcaaagtagggaagatgatataggtttagttgacacatttgcaattcatggatgatactatattccttcttgaggtgaaggaccaaaatatttctcacttgatgaaagttttgaagaccttttgcatggtttcacggttaagaatcaaatgcctcaaaagccaattggtaggacttaattttaatgatgagtgggtggctgatagagaagaagaagctggatgtgaagttaactcttgaactatgaaatacttagggttgcctttctgttaccacggttttcctccacaaaagtgagacaccctaataaatttgagaggaggtcaatctaagacatataatctctgtttcttttctttttttt

SEQ ID NO: 297191 - DNA, 1414 bp, Cannabis indica
agcgaagttacttgcgccgacaaaacttttgtgagaagttaaaaattggcaataattttttgtcggtgactaaactcactgggaaagatgggtcgaaaatagctcaaccagcggggaaaagtgcctttacgagcgaactaactacatttgctagaaaaaccccttgtctcgaccgtctaatgctggtagggtaactcactgacaaaattttatcgacgattctagttaacctttgtcatcgtaaaatctcaccagcaaaagtactttttcttgtagtgaggttctagcttaccaattccaatccctattcatcatcgcccaccttcaccacatgtccctcaaactacttatctaccatatgtcactatcttatctccaatgcctcagcctgttgcttccaactctcaaactggtccatcacctatacttgtctctgataatcttgttgatgtccttgtccaattctccactattatcccaaacagtatttctattattaatgtttccacaactaatctgcctattattactaatgctttacttgtagatactaacacattatagtttactttaactcatcctatgacaaccggacttaaagcatgcatcataaatcctaaagccttgttggctatctataaacaaaaataataaagacttccttttaagaacctcactagtttgaggctatgtctacataattctttcctctcaagaagaacaaaacatgggttttggaccttttggttcctcttcctgccaaaataactattctataggatgtaagtggatgtttagagtgaaacaaaatattaatggctcactaaataggtacaaagaaagcctagtggctaagagattccatcaacaaggtggttttaaatattcagagactttcaaccctatggtcaagcaaattacaattcgagttatacttactatagttgtaacaaatggttgggaaatcaggcagttggatgtaataatgcatttcttaatggtgacttatagggaagagatacacatgcagtaatcatcaggatttgttgatccaatataccctaatcatgtatgcaaactttataaggccttgtatggccttgaataggcccctcaagcctggtttcagaagttttctacagtgttattacagccatggtttttaatttgtaagagttgattagtctctcttagagccacctctcaatcctccatcaatatcctagtttatgtgttgagttttgtgccctaaacaaaacccatttcaatataatcagatttactaattaataaaagattagaaatcattttatgttgcattgttcacatgatttatttaatgtataaattctattaaatccagaacacatatttattcatgattatagtgttgtcaacacaatagaatataatc

SEQ ID NO: 297192 - DNA, 2788 bp, Cannabis indica
cgttctgacccaatttaagccaccaattccctgtgttctcatcctaagtataaacataataataattaatcaatcattaataccaaataattgaatctaaattatatttatatatattacctgtgtaatggtaattgggagttcgtattggggtcctctttctttggaccaaggctcaagggttccacccaacactacttttggattggtttgaataaaacctgagcaagtcaggtcaaagcaacctgttgattcgtattgatccttctaatatttataataataattaataattaattagctacaccaatatatttatattgaaaattaatgagaggggtcgagtttagtagtagttacagtccaatatacgaaaagtcgtgtggctttatcaccatataactttgggtttacgacccacccagcttcaatgctttcaaagagatctgaaaccccagctttaagccatatttgaccacttgagtattcatcttctaaaacaaaagggttccaaagattcaaatttgcttgagcccccatataattgtatccaagtgtcaccagcatagccacctgttacattatatataatttaaaaaaataacttttaaaaaatatcgctaactcataatattcaaatttgcttacagaacgattgactataggttcttgattgaaagtggtgttgtttgggaaaacaacatttggttttggtgtagtggtagtgatggagtgatgatgataaggattcttttggccaaaacgttggagattattattgtttaataataagtgttttctttggattcttcgaatgggaatggttcgttgtgggcagaaacttccgtttctttgccatatttgagaaacaacgacacttttaaaagtgtcgttgttttgttgttcggccatctgaatagtatggttgaccaacgctgaatgatcaaaagctggttgtttgtatatgtcaatacaatctataatatctccatcactactctgcaaaacaataataatattatttatattattgatttttcaactcaacatgaaaaaataatatttatatatatagtaattgattgatgcatgtataccttgatagtcttaagaggaggtttattgagaagcttcaacttcaaatcaacttcatcctcataatccacatgactatgagtagtgttgaatggtactactctacctgtgtttgcatgttcaaccaaattcaataatattattgcaaatgacaaaatcattataatattcatcttcatttctaaattatccaattaaattaattatatataagaacccacaacaaacattacttatatatatagctaaagagaaattattaagatatataaaaggaatattctttgtaattaatataatgagctgtggctgtaaaggatgaatatgaatcatcctaattaacatattaaacacttattattaacaacactcaaattttaattattatgaatatgattatggaatcttaaattataacaaattaaatttcttcctctctgttatatataattaatttatatccaaaattttgtcaaaaaaataaaaataaattttatatccaaaataggaaaagtattttgaataacgtacggacacatgaaaattacatattaatacataatagtattctagtcaaagtcaaataattcttattttgatcaggtatttattatttcaaattaaaatattatcatatacaatacagcaagaagttaatttctgtgaaatgtacagttttcctttcctaattcagaaatatttgaaccttaattttatgtaattaaatatatattatttccattacataaacatatgcacagtactacagctatacatgatgcatgcatatatattcctataataattaggtttcatggtttgcacaataataatgaccttaacatagatatgtgagaagtttcagaggcatactatatgctcagtagctttacttcataaccgatgctaatgcttcgacatttatcgaatagaatcagatagaactgacgctatataagagtcggtttaaaatgatactaaatgtgggtgtcgtagtagtggattgacataatttacatattggatgaaagtatagtgtaattatagtatagtttttctaaatgaaaaagttttcagaagttattattttccttagaaagttgttaactcgcggaagcagcacctggaaggctttcttggaaaactagtcctcttccggaaaagagtttcgaatggctagctgttcctcctaattaatgtagtcttgaataggccactccagcttactctttcctatccggaaaggcctgtagcgagtgccttcaaccgtgactccagaagccctcttacttgttctccgatacactcttacttaggctgacatatggagacatcgctcataggagaattggttaagttaggtgttgcccctgattttgcccaatatacgtggaccaaccggatggtgacacgtggatggaaagagtttagcatttgaataaaatagctaagtcttcctagagcgcatgattaccttagacatgcctcctagagaaggcatgtaaatctcgcatgctcccggagagcaagatggcaaccaagcatctctgggaggtgtcaggtttcatctgaacagtcatttcacaattaatgccgcatgggaggaggcgtattgaaactgccatacgcagtaaagtctgacgagacaacccccaatctgtacctacaaggctatgatcaataaagtctagtg

SEQ ID NO: 297193 - DNA, 2562 bp, Cannabis indica
gtgtggttcttttatatttttttaagtggttatatctgttgtattactttacatttgtttttgtgttgttttagtagttttctttattctgattttccaagaatgggcttccaaatatagccactattgcgtctagtgttgaggctgtcatttaatcttttttttcttttgttttcttaatttgttttagtgttgttttgctatgattatttatttgacgtcgatttttctactttgttccatcttgcaaggattaatggttgttttctggtgttctcgtattgctagggtgattttctatgcatgggtatggaagatggaggcattgttcttgatattcggtgtgtacagtataaaagaaaaaaaaaattcaaagacagtataaaaataattttttccgtgtggcagtaaaattgtaattatttgccaaaaatttagtattttttgtaagatccctattagtattgctttaaatctaaaaaattaatataaaataaaagtaattaaatatttttaactaaaataaattttcacttaaaactatgaaaatattaattaacattgattttatgtgcaaacttaaatggtaaaaatatataaatttgagctttaatcagtcgttggccagcacaggaccctcatgggttcggtcgacctccaccgtgaagctacgggaccaatctgtccctgtcgtggccttcaactcaaacccaaaccctcaatcgggttctctcccctttgtctcatatgcatgaccttgcatgggtcacaagcacaagtgaaaatcacgtgcttcgatccttttgagcttcatggcttccagctgcaatcctttagggttcatgactcatcattcgaggtccaaattttgtcatcttaatgaggccaggatttactctttaaacctgagctcactcatcgatggatgactcgtggattttttatgttacaattttttacaaaatttataaataaaattaaaataaaaaattacatcaaaacttataccataaatatggtgtataattttactagtaaaaattgtaaaatttctaacccaaatttaccatataaataagggtaaataccattttagaccctgtgttttgcaaaagttaccgattggaccctctattttgttaaatgacaaaatagaacctgtattttttaaaaggctaattaggatttttgcctcctgaactttgacatgtaccaaatcatgctccctaaacttttaagatcgttaaaaatgccccctgaactatagagattgttagatttaaggacttttttccaattttagtaaaaaagtctaacatggatgaaaattcaggggcataatttagtacatgtcaaagtttgataggcatgatttggtagatatcaaagtctaccgaacatgatttagtacataagcaatcactgaaatagtaaaattgaatgaaattagacaaaagtccttaaatccaacaatctcaatagttcacggggcatttttaacgaccttaaaagttcagggggtaatatttagtacatgtcaaagttcagggggcaaaaatcctaattagcctttttaaaataataaaaataggaccctgagcttaattttcgacaactttttttctaacataactaacttgaacacaattcctaatatgaacagagacaaaaaaatataaatagttttatcataacatatttagatcagattattattattaacgttggtcaatgctattgttcattgcattgactcacgtgaatagtgtaagggaacattgaggcgtcatttccaaactgatgcaagaaattaataattagtgtaatttacaaatctgttgctaataaaaaaatttgacactgataacaaattttgtaaaaattaattgcttttagcttcaatttaaaaggctcactaactctctagcttcactccaaaaccgatgctaaaacatctagcttcttttatcccctgaagctaaccttattcatttaccctaacccccaaattgattcacacactattcaatttgtcttcaacctcaatctgaaggcctcctcctcagctttggcgattctcctcgtcccaacctccttctatgtcctccgtcctcctcgtcttctgtcccactcccgtctcctcccaacccaaccccattcaatgaaaacccaacttgattagacgaaaacaactcaataagtctatcgtcttctcccattctcttctcttctttcttttatattttcttcatctaatggtgtttttctctttgtctcatatctctctttgtttgacccttggaccatcaaaattaaggaggcaactcattctcgcttggctctgttggaatatattttaccaagatctagatttactaccatgtatgttgtttaacattctaaatatgaatttctaaaacaatgtaatttaaacacatataaagtttgagaaaccttgcattgggtgcagcataattaaatgactccttccgctcagatctctagcccttgtatcctttttgtatcagagtatcaccaaaatttgagcctgattctccttct

SEQ ID NO: 297194 - DNA, 3322 bp, Cannabis indica
accacgtaaaaagtcttcatctcgctttcttacagctcattattataatcatattttactagttgccgaaaacctcggtcaacaaaaacatttaaaattattttttcgaattagttacacgtgtagtattgatatgatactgacgtagcaactgtctaagcaattatgttatcattttgtttactacttgtaataaaacttgacagaaagattaatttataatattatgaatagtttagagattatttttaacggggtgaaaaaattcaggagataaaattaaatataggtgataatttgggagacaaaaattctaaataacataaataatatgataagaaaaaacattggaattctggggagaaaaaaatgtccttactatttgggttcatgtatacaataaaaaaaaaaactggacaagatgaattataaggtcccgcccttttttttctttttttatgaatacaaaacaacacacgtgatcaatataattgaaatttatgtataacataagataatattttcaatattttatacgagaatatatatatatgtattacaagtacagaaactcgaatttttgtttcccttttaatttgtatttgtagcttgatgtgcatgtttaattatatttataagtatttgttttgattgagaaaaagaatgcgaataagtatatatgaaaacaaaaatacgatccattattctaaaacagaattatgacaagtctaatattatattatattcatattaagcaacaatgacattttagctatagcctattagtaatttaattcgtataataaatactaacaaagggattttggattcaagtaatcaaaccactcaaaacacgttgaaaatacttaatttgaacagtcaaagtttcactttcgttaccagaaccaataaattaatttctctatatgcaaattgtgggtcaagaaaactataatataatattaataagtttaaaaaaaatacaaaacttttttatatcttataaaatcatgataatttcaattttcctttagttttgcatgaatcttaattagggctagatatccaattaaattcaatatttttcttttaatttaatcaaatttaattagtaattaaatttaaaaaataatcatccgatccaatttaattaaacttcaaaattcaatccaatctaatttaatctaattactaattagtttggttcgattttttaatcggatctaattaaatatctaatttttaatattaacttaaaacatgaaaaagtacataaaaactacataaactttcatttaagtttaatactacataaatatatcatccatacaaatttattagaagttagttagctggtttgttagtttgttattcggttatatcagttagtgtaactaattctttcactgtattctcgagctctataaatgctttgttcttgtacttttcccattaataaaaacagttaagtttctcattcattctatctacatctccttcttctctctcactcttccgcaactaatatgatatcagagcaagtctcttagtaaaatccattgcatcccttacttccatggctcgtggacgagctcagactcgaagctcatctgaaaactccaatcgatactctgttttggatgccaatgtcaggtcatattcagatgaagctcgaaatccttattacctttttaatagtgatcatcctggagctagcctcgttccaattatccttatgggttgtgaaaattatagctcatggcgtcgagctatgacagtcgaacttgttgcaagaaacaaacttaagtttgtcaatagaaaacttcctcctcgtgatgaagatgatgaagattttgagctttggaatcattgcaatagcactgttatttcatggatccttcatgcaatctccaacgaaatagctgaaagtgtcatgtacatggatgatgccacctagatctggttgaatcttgaggaacgattcaatcaaaagaatgctcctcaagtctttgaagctattctaacaaaacagtctcttgcacaaggatctaacaatgttaccagctacttcactagactcaaatctctttgggatcttatccaagagtatcgaccacaacctatatgtacctatggagctataaagacaattcagagatatcaagaagaagacaaagtccttgaattcttagttggcttaaatgaattctacagtggcactcgatctcagatcttaatgcaagatcttttgcataacatcaacaaagcctatgcctctgtcattcaaaaacagagtcaaaggtgcttgtcgatagttccagctgaaagtgataaaagtggatctggatttgaatctggagcaggttcgaatttaggataatttgctggaaatgtcgagcctcatcgtcctaaaatggtatgtactcactatggaattacaggccacaccatggcaaagtgctttaggattcatggatatcctcttggacacaaattacacggtaaatttcctaataagaatgacaatcaaaacacaagtaactcgggaaaaccttctgcagcaaatttttctactagcttagaaggcaatgaaggatatcatggagataatactatcggggttcaagacttggttgctagcttgactaatgtgcagtgtcaaagacacatggcattgctatctcaaaattctgaaccagcaactagtgtacctactgaacctcctatggtatctcatttttttggtaagagttctctcattccccattctaaatggatcattgacactggttctacacaccatgtgtgcaatgacatttctttactcaaaaacacacactgtgatcactctataccctctatcaaattgactgatagaattttttctaaagttgtttgcattggtacaatcaatatttcacaaaatcttttattatgtatgtcctttatgtaacaaagtttcattacaatttactttttgtatctgccttgactaaccttgataattactctttccattttcattctaaacattgtgaaatacaggacaatttgaagaaataaatgattggggtgggtgaaaggataagaagattgtactatttgaattttggtgtaagaaataatattcattttgctttttgtaacgtgaccctacagaccaacacaagtgtttccagcgtgctttgtcctcactcacacgcatcctgggaaaactttctaggaggtcacccatccttgaaattgctccaagccaagcacgcttaactgtggagttctttcgagacgggctaccgaaaaacaagatgcaccttgttgatat

SEQ ID NO: 297195 - DNA, 5490 bp, Cannabis indica
atcagataaataaactgcttctgatttaaagatttagggaggaagacttagttgatagtattgtattatcgaattgcggtaattactatggatcaatcaggtacgcatatacataattattatatattgttattgtgttctatattatatacaaattgatcttgggttaatttattattaatttatctaacagtttttagtcacaatacttgttgtgactaaaattaaattagtgacaatttgtgtctaaataatatgttcagtcacaagtaatttttttgttgtgaccaaaagtcacatttagcaacaaaaaaattttgttgtgactaaaaagttgtctctagctaaaagtgacatttttttatagtgatggtttgataaatcattcttttcggttaaactatgagctattctgattcaaggaggatcatacgttgattgcagatatattaataatttcatattggctgatcacaaggaaaaaaagagttataaaccacagacacgatacctataaattaaattcacattctagctaagacatatatattaataatttcatatatgtcctatgtcctcttggctgatcaatatttgcacgctcatcaatataaatatatatattatagtgggagcagatatatttgtacatttatatagttgaatatactaaattaagtaagatcaatcgtcatatagtacgtgatatcatgttactcaattatttgcttatactagtaaaaaatttaactataactaattaagcatatatgcataataattattgttttcgagaaacagataataactaatgtcaaactatatatagttggacctatgggagctctgagaattgatgatagtaacagcaattattttctgagaattgattctcagaaaataattgctattaatttatgcctcttgatgatagttgtagcaaaattctatcatctacgaatatatataaatatgtaattgctcctttcatataataaatacatatacatatacgaagaatataaaaaaaaaaatgtgcatacataacatagtaatataatccactaataggaaccacagcagtgaattggcacagggaagtttggggaagagcaattattcccaagcaccaattcattcgatggttagttatgttacaaaagattcaaacaaaggtcctgctgcataaattcagtatttgaaatgtctcgtggtgtatggaatgtgggttattagaagaggaaacaattgaccatttatttttttcagtgctctaaatgttcaccttgcctttcgaatctgaaaatttggttgcaaactgggaaatttgatcaggaagcaggtgtacatatgatggcaattgctgcactcatttatataatttggagtagtagaaatgacaaatattggaacctctcaattcatagacttaattacacgaagtaactttaaaaagattactcaaatatataaggaatggatggaaagtttataattatttagcagattttactcaggccggattggtgctgaacaagttaaagtttttagttcaatgaatacaatactgattcatcaaattaaaaatatatatatatatataaattgttcactaataagatatattgtgtgtataatgaaaaaggacatcatgctcatcagatacagcattaaacttacactaaatatacaattagaaggcaatataattaaccacaaaagataaatgtgaaatatatatctaattaaatataaattatacataagagatttttagacattaatagtggtggaagatggtacatgattattattatcatcatcatcagtattagaattgttattggctgggctcatgaaattagagttggtaggctcgatcttcctcatcgtaaactgatgatgatcaggtctaatagagggatcttcatcatggtacacgtaagcaaatccaccgtgtctcgtcaaatccaaacccgccatctcatcatccctcgatatcctcaacagcttcaacttgttcaaaccgtaaaaaagtgggcccatagtggccgtgacccaacccgccaccaccaacacctgaaccacttgcgccgccagtaatctccatcctccgcccatcaacagcccgtacggcctgtccgcgggtccaccggagtaaacctcagccacatattcttttgtagcaaacaaacccgtgaatatcaatccccacgcgccgcacccgccgtgtagctgagccgcttccaacgggtcatcgtatctcagcttctcggctaacttgttgaagccgattaggacccaggaagcaacgaagccgcagacgattgcagcccatggctccacaaccgaacaacccgatgttatagcggcgaagccaccgaggagaccgttgcaaacatcgatgacgttccaatgaccgaccagtaaccgtttcccgaataaagtggtgagtgcagctgttgagccagccaatgttgtcgtgacagctgtcctcccaatcgcactccattgtccgtaaaatgtcccatgttggttcgtagtaccgtagctctttactataatcagaaacgaacccgggttgaatccgtaccacccgaaccatagaagaaaagaaccgagaactacaagtgacgcgctgtggccacgtagcacaactgaacgacctgacctgtcgaaccgtccgagtctgggaccttcgatgaaggctccccatagaccggctatgcctccaaccatgtgaaccacaccggaaccagcaaagtcgatcgctccagatccgaataagaagtcttttccgggtcgggtcggactggcccacccatctgctgaccagaaccagtgggatactacgggatagacgaatgctgttaagaaggaggaatacaaaagataagcgacgaattgagttctctccgcgatagagccgcttgtgataccggcggctgctattgcgaaagcccattggtacagaaagaagctgtagtctccagccggagaagggaaggattttagtccaaagaagtggcggccgatgaagccgtttgaaggtgagccgtaagcgaaagcgaagccaaggaggtagtaggataagccaccggctgccgcgtcgagcacgttggtgagcattatgttcatggtgttcttggctcggactgagccggcgcagagcatggcgaagccgagttgcatagcgaagactaaatatgctgagaagagaaggtaagtgttgtcgatggcgtaggtggttgcagatagctgagctgatacggcgttgagttggccgcagaggaactccgctgcggctgcgttggaggtgtttgtggtggcgcccgagctgaggagagaagataggtcggagactgagcaggttagggaggccatagtactgtactggtggtggtggttggagtacgtgtgtgtttgaggattagtttcagagagaaatatatagagacatttttttcttttcaggaaaagagttttgtggtttgtatttataaagccaaaaataatttaaaaggaaattttgggtttccagtatttttattttattagccataatagaaaatttgcaggtttaactctgtcatattttttgtcttttcttttcaatttttaaaatataaagagtgacatgattattggtggtttgagcctaaacttgtaatttgattattaagatgatcttataataaccttatagggttggtgcttaattaataagcactggttaatggttatattattattattattatttttttgctaaatagcaaagtaatttaatattatttctagtaatcatattattaaataataatgaaagcaattacaacattattctaatctagttgagaaattcaaaatataagagtataaaaataacaacaacataacaaataaaaatcctaaactaattttgataaatgtaagggttatgcatatattttatgtcgagaaatactaaaaggtaccacgtactctcctacgtatcaatattgatattgatctaattaagtatcaggtggtatataatttaatataataatttaatataataatttttagagagtatcgctagttaatcataagacgacacgttttaagagtgttagtcaccactaatgttcaatagcaatgttctttatatcgacataagattacgtcatattaatggttttatcacgattattattattattattattattatattttttgtgagactacgtgcgatggttgaattgttgatgacctatatatctacaactattgtggttcataacatacatagatcactatattatgaagtattgtgtttagcgaactgtagttttataatattagttagagattttttattatatttattaagagtattgttattggggattatatattagtgacgagcactttttataggtggtgttttataattggccaggtaagcgatattgcttaaaagttattttttaaaattatataagacatgatacttaattgtactaataacagtatgatactaaggaaggtgctaagacaccaataatgcctcttagcaattctcatttattaaagtaaaataagtaaaatccagtattaaattataccaataataatattacacttcgcacaaatttttagacaccataaatataccatttttcttgtgcataacaatgagtattaattaataatattggagaaaatgaaatcaagttggagatagtgcgcacatgcacgtagattcgtatgattgtgtgaatatatgctgagggaattgtattaatgaagtagagggacttcaacttgtaactcaggatatatattaaactaaaataagtgaggaccaacacaacaattttaaacacaattactttgtagcacaattgattgggggcaatttatttacagcagagaggtcagggatttatatataacgtatattactttggtccttttattctcataaataatcattaaaatggtgtccctttaattattaaaaattaaaatagtaaataaaatccctaattataattgtagtcaattataattataaataatatttcaagaaactaatatttaattttatattaggttatattttctttccaaatattacaataattaaataatattactaatacataaattaaaataaaaggtcgtagcacaatttacatgtccaagtatattatattaaatttttacatagattatgaactattcaaacacacattaagaatattaatcatcattgctcataaccattaaatctaagaacaatactttatttagaacatccaaaacattacacacatacccaggggcggaacaagcatgaaaagttaggggtgttggaatatttttaccagtatttagatttactaccatatatatttttaacatcctaatatgaatttctaaaataatgtaaataaatacataaaagttatgagaaaccttacagtgggtgcagcgaaa

SEQ ID NO: 297196 - DNA, 2389 bp, Cannabis indica
gtgtgggatgttaatccaccacaagctccacaagattcggagcaaaggtttgctgagttacatgccagattacagcaacaagatgaggagattgttagtctaaggcagcaaggtcctcaagttactcttcttccttagattggtattggtccagtaccaacgttgccagcggaatatcatgtggctgcaaataggttggtatcactgtatgagaggttcacgaaatagggacctccaatcttttgaggaagccttgatgttatgaaagctgagcaatagctaaccaatatgatctagatattgaattttatgggagttactggtagtgacagactggcctgttccatatttcagttctaagaagatgccctggaatggtgggagttagtgtccttcacacaagatgtcgtcgttatgaccagggatgaattccaagatatgtttaactccaagtattataatgaggctgtctgtagtgcaaaacagaaggagtttatagaattggttcaaaaagcatcaatgtcagtgacgaagtatatgaccatgtttgaacgactgcccagattagcctcaagtatagtacttagggattacactaagaaggaaaagtacctatcattcatgatctgacaattacgatcgatgatggtatcccatatgctctgatggtacagaaggatcttcgagctgaacgtgcaatgttgttttgcatgagccctgagggacttagggttctagtgaagtcactgctttgcctccttctagtttggagtagtgatttagtcgcccacgaaaatcaaggaagtacaaagccaaacaggacgcattgctacactaagtaaatttgtgtccaagtctatagacaaatgtgtacccttcttcaacattctcaaaggcaacaaaatattcaagtggacaaaggaatgggaaaccgcattccaaaaggtgaagaaacaaattttcttaaccacctatgctgtgagtgttgccctcacaagtgaagaagatggtgtactacaccctatatactacaccagcaagagactaatcgacactaaaagttagttcccactcatggagaagctgacccacaacttgctcttggcttcctaaaatctaaggacatacttcaagatacaccctataaaggtgtacaccgatcaacagttacgacaagttctacagaaactaaaagcatcaagccgaccactcaagtgaacaactaagacccggccaacattgttcagtaaaggctaagatctcaccacttcattgctaaccatagaaacatatctccccaaatctcccaaatttcgagagaaaagcatgagccaaggaagaagcaagagcaagaactgaagaggtgcattgaccacctgcccgatgcatccatagcccccaaggcacaaaagggcaattgatgcacgaggcaacaaggtcaatttcaaagcttctaacaatgatggtgaacatggaacttcgaatgctggcgtcaggctagcacacgaagcgtaggttaaccacctagacatgcaacacaactctcaactagtcgcaggttatgtcctaggtgactatcagcttaatacaaaaagatgatggcctactgaagctattaagatagctcaaaggctatactaaaaggtaagcccccaaagatggcacaacagctgacacactcgctcaactagcaagttgcgccttgacaaccaaggaaaacttggtacctgctcagttcttcaaagaactatgtccttctttttcaaaaggaatagacatgctagacaaccaacatggatacaccaatagcaacatacctccaaacaaagaccttgcgagagagtatggactagaagaacagttacatggtgtccaatgctacacaacataacacacaaaagtcatatcccaacaccaccaaggagtgtttccaagaaagaagctgtttagctattgacaaaagtgtacaaaggctctacggaaattatgcctaggggcaaagccaattggatgcagatgagatcaaactacagcatcaactgggcctttagaaggctggccaaccatgtcctcagcaagctggccgaccatagaatctaaaatttttcctactacctctacatgttggtcagccatggcctcatccaactgcccaggcaatgctccctcaatatggtgtggcaactggtcttgccctgaccagctcgatccaccaacatcctgctctcatacatttggtctatagtgaccaagaggtaaacaacatcttgctagtaggatcccttaacaaaagggaaagaagaagagaccaagcgaactcaaagcagcatggttgcccttaaatagttactaggcccttcaacaaatagatcgaggaaagaaattcttc

SEQ ID NO: 297197 - DNA, 4629 bp, Cannabis indica
ttgttaaatttaaggacttttgtcaaattttactaaacaaagtccgacgtggatgaaaatttagaagacacacttttatacttttgaaagttcatagttatgatttagtaaatattaaaattcgaggagcaaaatttaatatatagacaatctccatattagtaaaattgaatgaacttgaataaaaatccttaaatctaaccatagtttagaaaaaaattttaacgaactaaaaattcataaaatatgatttggtacacaaaaatcctaattagattttatttttaatataattaattaaaaaaaaaagaaaaagaaaaactattatattatatagatatattataatgtatatatttaaacacacaaagcaaacaaaccccaaatcgaagatctacaaaatacaactcttttctctttctctttctcgatagatacctcgctcgcctcctcctcctttataacccatcttaaactcactcagcctctttctctttctctttcactttctctctctccaaacagagcccaccatagtgaatttaccaaaaactaccctcctcaacgcgattcacagaccagaggaacacacatagctacaatattcatggcgcagcagcctacacctaacgctgctactggggatctgactcgccaccagccgccgcaacaacaacaacaacaacaacaacagcagcagcagccacaacaacagtgggctcagcaacaacaacaacagcagcagcagcagcaacaatggatggctatgcagtacccggcggcggccatggttatgatgcaacaacagatgatgatgtacccacagcattacatggcggccgccgcttataaccaacaacctcattaccagcaacaaccgccgcatccttatcatcaacagaagcagttttcgcagtctcataagcaggatgagatcagaacgatctgggttggtgaccttcatcattggatggatgagacttacctccatggatgttttgctcacaccggtcaggtataaaatttactttctttttttttttttttttgtttttgaatcttgtttttgttattggatcgtttacttgtttttcagatgcttatttgttgatttgatttgattgtaatattgtgattgagaatgtacttcattgttacttaatcttaaccaggaattgtagatcgacattttaagtaataatgaattgaagaattttttgactagttattctatgaatcttggttgtattgttgtcatgtcagtttgtttggattctgtttaggtggtttaagttttttcttgacatggaaaaactgtttcaagtaataggagatataaggggatccagaaatatccttgggacactgttattcatattgataatttgatactaagtttcctttgtgatttttgcttgaagaatcacatggtctttgtgtgaagacatatcttgtttctgtttctctaaattctgtttagccttgttggtttgctattataaagatggatgaaaatatgtgttcatagaattatcattttggggaggagactgaggcaggagtaatttagttttgattcgacgataaataatgacagatctgtttgttgtttaacactcttttatgtcaattttattttgtgaatcttctttcacagtccatacttcatccagaagatagacacgaagtattttatctgaaatgctttctaattaggtttatgttttcttttaatttttctatttggacatggtagaaagtgtcgagttagctgttctcaagtaccttttatttatagtttatgtactaagtttcagagttttgatcttatatttgcaggttttctcagtgaaagttatacgcaacaagcaaaccggccagtcagagggatatggctttgtggagttttattcacgtgaagcagctgagaaagttttgcagagctttaatggtacatcgatgccaaacacagagcagcccttccgcttaaattgggcaactttcagtgcgggtgaaaagagatcggattctggttctgatttatctatattcgtaggagatttggctgcagatgtgactgatgcaacattgcaggaaaccttttctagtagattttcatcagttaaagctgctaaagttgttattgattcaaatactggtcgttcaaagggttatggttttgttaggtttagtgatgaaaatgagagaacaagggccataaccgaaatgaatggggtgtattgttcaagcagacccatgcgcatcggtgttgctactcccaaaaaatcatctgggtaccagcagcaacaatataattcacaaggtatatttttattgcttctagctcttggtttcacaacttgagaatgcatatattagtagatatacatctgaggaaagaatattggatcccaggtgaacagttcatttgtttgcttttggttctttgtgctaaatctttggacaagtgttaacttttgttcacctttccaactaattttgaattaataccatgcataatagtacatttttctttcttcacttggtgataaacactagtctttttatatagtttgggttagcttgtcttgctgcttatgttattttctatgcaacttcattcccattactccactaactgctcttcttcccatcacaataaaaagacatctatttaactctctgtcattactgttgagaagtgctgatcttgtatatttctttcgacattcatttgtagtgatagaataattttgtttcattttctctcttcattagctctggtattggctggtggacatggttcaaatggtgtcgtatcccaaagtcctcaatctgacagcgagtcaaataacacaactgtgagtccaagtcttccgtggtaaatcttttataaatgatctctgatttgctaatctgatattcatttcagatattcgttggtgggcttgatgctgatgtcagtgatgaggacctcaggcagccttttatccagtttggtgaaattgtctctgtgaaaattcccattggaaaagcttgtggctttgtacagtttgctaataggtacccttgtaatctttatgtcatgactactggttagcagttatttgatacaacacacctttgttcgatcagcatgaaaattctataagccgcaagcatacgtaactctaaaattactagactctgacccccattatgtttgtatttgcagaaagagtgctgaaagtgcaatccagacattaaatggaaccgtaattggcaagcaaacggtccgtctttcatggggccgcacaccaggaaacaagcaggtaaaaatgcttttgcatgttgttcctgggttaatcttataacatattaaaataacattattttcacccaagtttaaaggttcactcccagagataggccttatcttttctctcaagtttatctactttaaatagtgtcataattgaattatgttgtcatgatagattttcctatgtctcccatatctctttctttgtagtccatgactgatttttcttgaactatacggaatttaacagtggagaggagactcgagtaaccagtggaacggatcgcatcacggagggcaaggttacggtgggtatggatattcagttcagcagcagactgcagctgtggctaatggggcctcttgacagaagacgatgaagcaatacgcgtcgtgtaaaatgaactttttacaggagaggagtgggtttcttattagatatagttataatatcaatcatgattgaaatagggtgggtttagcgctgctgctttagctgaatctgtagttaatcctgaattttgtagctggattgaattggtgtctcaacattgtctttgcttgtatttgcgttaatactttagagagttttggtctgcgagtattatttttgtttatttttcaatggacgggggagtccttcatttcatttttgttcttgattttttgtttttgtttttgttgatttgtttatgtttgattgggttggattgggttcggttgggtttggggtatttttgagttcgagttaacatgagaaacatagaaaattatttttgaacaaattttgtcaatgtgaaatgtataatatattctttttataatgttcataacaggaaaattaatttgtttttgtgtgtaaatctctcctctaaatattggtaatttggtagtttcttttttccctctcttaaaagtatattctcaaaattactaccttctatttctaccaccaatggatatgggttggctatgtgacattgcaatgcttctttttcttataattaaatggtttggttgttaacaaattatagttcacgagttaatataattatggttgttaaggtttacaacaatggcagtttttcttcctttcaacaatgtttttgcttgaaactgaaaaagggagatctcttttaccatgttgacgtgattagcaagacccaattggttaattaactgagaatagttctctaatgggggcgtttaacaaggaaaatttacatggtgtattaacttttgcattttttttacaaaaatactgccagatggtattttttacttttttactgtgtttttttataagtttcatactgcagtatattgtg

SEQ ID NO: 297198 - DNA, 3081 bp, Cannabis indica
ctccacagtaaaagaaataaaaaaagttaaaaatttaggttggatccaaattcattaaatgtgagcacatgaacactccaacatatttcacaattgtggtaaaatgacaataacttttcattattcacaattatcgtaaagtgacaataactacaggggcactactgcaaattacagaaagaaaaacccaaaaaaaatctgaaataaatctccaaactccattatttttttcgaattctcacagcaatacagtacacaaaatccaaccgccaattcttctgggcatggcttgttcggctcggctccagccgatattctactcgttctcttacagaagctgccggtcgaatattcccgccatcttccaaaggttcaccggtttatcctcaacccgccagttcagccggatttccgtcatgaagcgattgaaacctccagttgttccggtcattgcccaggccaaacgaagctcttctcctaaagaatatgaagtcgctacttgtaagcttaaatagtttagatgaacagttttctgtgtttaattatttggttttacgtttcgttatattcagttcagtagatattacttcaaaatttatagttttgtttttttgttaaatgttttagctgctgatattcaatttgaggcaccgctaagaatcgtggaatatccagaccccatactgagagcgaagaacaagcggatagaaacctttgacgataatttgaagactttagttagtgaaatgttcgacgtaatgtacaagtgagtttttttttctttttttgttaactcttgagcaagaattttgtgtgtttaggggtgttatgagattaaggaccgagcagagtatggacaattggaattttgaagtttagttttgcagatataaatttgttatccgtgtatgttttaaatgaatttaattgtttttaagtagatttatatacatgtatatatttattcatatgggtcttttgggatcaaattggcaagagggtctgcaatatcagtttatgatgttgttatgctgtgacccagaagagtcaaactctgagctttttcgttttggttttaagtacaacttatagagaattattgcaatgtacaggagtgtgaacaatacttgttgcttgttggcttccttttccacagaactgatggcattgggctctcagctccccaagttggaatgaatgttcagcttatggtgtttaatccagttggtgaacgtggtgaaggagaagaaattgttcttgtaaatcccaaagttaacaaatcttcgaagaaaacggtgctttttaatgaaggttgcttgtccttcccgggaatttatgccgatgttagggtatgcatagatactactcctatattcattcgatatacttttgacccggtcattcatccaaagtgagctgcagagtgttttcacttaaaatggttattctttttcttgcatatttagcaacccttctgcattatctttctaccgatcataacataactagatcagtcattgttggcttctggacaactgaacgcgcaataaatactaaaacgttttggtgcataaagtgtttttttttataagtgtaggttcgtttgtttattcttggtctagcaaagtattgtgccatctaagtttgttttacattgctggctattttggttgtgctttaattttttagactattttacaatgtatattttacttttgcagaggccagaatcggtaaagattgatgcaagggacattaatggtgcaagattttcagtcaatctttctggtcttcctgcaagggttttccaacatgaattcgatcatttagaggttttttcccagcttttgttcaagattttgtttcctttctttatgaatattaagtcatttaatttcattgatcgatgtaaatatagatttgagagtaaagtatatatatggtttaaagtcgggtcttatagttcttttatagagttgaagaagctggctatggaccacatattggatagaactctgttatctaaaattgtgctcatagtaaggagggatgttcaaagaagcctttctatgtgtccaaaatgttttaaccaacgttctcttttctcttgaagaataaacatcacctaatacgaccttgtatcaaaaattgcaaaactttgagtgctggtttaccccatagaattatgaagaagaagaataggaagaaacatagaagagagtacagagagaaactagagagagaaacaattctgatattttcattcattaccttatcaaatggcttactcatatttatactctcacctaagaataacaagaacgatgtagaacatcccacacaatatgtataagcaatgatgttgattggtatagactattgaatcaaactaaataattctccaagtaagctgtcccagttgtacctgtgtactgtagggtatatcatcacatgagtcgcgtttatttatttttttcctttttgaataaaaatcctgcttggaatatgcaattgtttgaggattaatttagatcttctaaggtcagttttatggtctttcatgattctatgttctcttatagctagcaacttcttgcagggtgtgctcttctttgatagaatgactgaagaagttcttagcagtataagtacacaattgcaggtgagtagacatgtttactgatgtcaagttttatttcagcacattttttcattttggcttttccacatctgtggatgggggggtgaagtaacaatggtctttgttttaccttccttgagttatcaatccatctttatagttacttctccataacaattgcaattgaggccattgctttttgtttggatgctgttaaaatgagttaatagaagatttctccttccatgatttaatactccaaattatattttgtgtttgcttacttgttccaataatggtgacaggccctggaaaaaaagtacgaggataggacaggtttgccaagtcctgaaaaggtcgaagtcgaaccccgccaaaccaggaaggctgctgttggttttggaaaattatcatgattcattattcctttgaaccgtgag

SEQ ID NO: 297199 - DNA, 5204 bp, Cannabis indica
aattaataaatggagtaaatttgagtttgatatttgtttgtaatacttaaacctcaatacagcacaacataacaggacataacacaaacatgacccatgaacacaaattgtcattcctacatccttgcccattcatcacacttataaaaatattactttttccagcgcaatttgctactgagcttgtaaaagtcacttttaccagcgcatctcgcaaactacgctagtaagaatgtcagttttactaacacacaattgtactgacaaaacttatttttatcagcacaagtggcatagcaatccgtgtaaatatcctccccttgatacttttttactagcacaaaagtgtaatgcactagcaaataaagtcacttttaccagcgcatctcgcaaactgcgttggtaaaatatcataattttacataaataatttttaatatttttttggaattctttttcattttttataatcttttattttttattattatttagtatcgtataaaagtattttcaaaataattttataatcttttataattatttagtatcataggataattaacattctaattttttgttatcccaaaaagaaacattctattttttttataatattaataatataattaattttggagtagatttattttaaaaataaatatcattgttcatttctctcctccaaatcgattgaaataagggctccgacgatttttgtccacccttcgaaatccagctcctcccttctctcggtaggtaatccttcattactttctcgataagaaaattcttagtatgtgaggattgttgcaatgacgagtcttctgatgttaacaatctaatggttaaaatttgtgtaaaacattatgtaaaaatatgtgttcataaaacctgtctctatatgttgaatctcttcgccattgatgaacagccaaacaagcaagaacaagaaactagagaaaaacagagataaagagaaacaagaaagagaaggaaagatagagaaagagaggattgaaaaacaaagagcaatcatactattcagtaaagaacattggcaatatatagccaatgactacagctgtagtttgttgaatataacagaattggttagaaaagtaaaaacagtagtacctaacataactaactcttattcaacatactaaccgaatagacactcctaacacggtccctcaaggttacaattagaagcaccttgaaaaactaagatgtcttcaatagtaagcttggatcgaaatagaggaaacctttaagtggagattgcctttgtgagtccatcagcaagctaatcttgagctggaacatatgcttgacttggaaaagtttttggatgattttctctcgcacaaaataaagattaagctcaatgtgcttagtgcgtgcatgaagcactggatttactgtgagaagtacagtgctaaggttatcacaccatataactggaggttgaatggtcttgatgtgcaactcagtaaataaggagtgaatccaagttagctctgcaactgtactggctaggtttcgaaattcggcttcagtactcgatagagaaatagtgtgttgctttttgcactgtaaagtaaccagattatatccataaaagattgtgaagccagaagtagagcgtcgatcgtctatgttagtggcccaattagcatcccaaaatgctactacttcttccagaggagacttttttaggtgaagaccataactaatgttgccactgagatatcgcaggattcttttaacagctaaccagtgacttaattggggattttgcatgaaactggcagactttattggcattgaaagagatttcaggtcttgttatcaggaggtattgaagagaacctataattgatcaatacaaatgtgggtcttgaactggttcacagccgtatatatgttgagagtcgaagaccacttgtcataggagtgggtgttggtttagcatcatgcatttgagctttgaaaagcaagtctctgatgtatttggcttgtgataagtgtaggcaagatgaggtttgttgcacttcaattcctagaaaatagtgtaggtcaccgaggtccttgagtgaaaactcgctattgcgagttgcaactacatttttgattgcaatgttgttactgccagttacaagtatgtcatcaacatacagaagtaataaggtagtgtatgttgaagtgtgttgtatgaagagagagtgatcagacttagatggaacaaaaccaagatctaagaggcaatggtgaaacttgtcaaaccaagcacgagatgcttgtttaaatccatatagagctttgtgtaacttgcatacaagattaggggctgaagcaatttcaaatcctaggagttgaaccatgtaaacttcttcattcaaagtgccatttagaaaggcattattaatgtcaagttacatgattgaccagccatgtgacagagcaatggttaggacaatttgaattgtgacaggtttaacaactgggctgaaagttttagtgaaatcgaacccatgttgttgatgaaagcccttagcaacaagatgagctttgtacatgtgatgtatcccattagtagtttttttttttttttctctaattacccatttgcagcgtattggagtccttcctttaggtaatggaacaagagaatatgttccattcttgttaaagccagcatctcatctgtcatgacatgattccattattcttgttgcaaagcttctttgacatacagttcttggaatcttggtagtgagataggccttgggtatatgaatcctagactttccccttgtttgcatggcatgagaattagtggtgatttctttttttgcagtagcaacttgttcagtttcaacaacaggagctggtgtgacagtagcagtaggtgctggttcagtttcaacaataggagctggtgtgacagtagcagtaggtgctggttcagtttcaacaacaggagctggtgtgacagtagcagtaggtatttgttcagttgatgtagtagtggtgttgtcattatttgaagaaattaggcaggaaacaaggagctaatcttgaacctcccattcaagaaaagttggtttgaaattgttcgaagcttaatcaacatcattcagaaactgaggtggaggggcacgatcttgaatgaacatttacaacctatttccacaaattgcagtaagaacctgctgtttccacaaaagaaagttgtgatcatttagtctaatagacatattgtgattcaagtatactggattgaactcatctgagttgtttcttgaacgattgagattcgaagcttcattaggttgattgactggtctgttgatgttcgagttgttctgagtgttgttggtgctagctccaatgttcgccatattaaccgacagtaggggaaagagctctgataccatgttgaatttctttgccatcgatgaacaaccaagcaagcaagaacaagaaactagagaaaaatagagacgaagagaaagaagaaagagaaggaaagatagagaaggagaggattgaaaaacaaagagtaatcatactattcagtaaagaacattgaaaaaaaaaccaaagaataaaagtggaagttagttgaaatataacagaattggttagaaaaaaattggttagaaaagtaaaaacggtaatacttaacataactaactcctattcaacaaactaaatgaatagacacactcctaacactatatataggatgttaaataataaatatagtatttttttatatattgattatttagtggtagacattaatgagtggcaaaatgaaacaagaattggtattttgataccctttggtatcttattcatttttataagaaatgacaagtatttagtataataaattataacattaaacttaagataccaaatagtttatatatatatataaataaaattgtattttaaaagaaaagtttaagtgataacaaaataaatctaacatatgaaatgtacaataccaaataatatctaaatatatcaaatataaatattggagtaggcgtgaaactttgattattttaattttggttaaaacaatacaatttaattgtatataaatagagtatacaagtaaaaggaataaaaacgataaaaggaaaattggtactagaatttaatataaacgttagatataaaattttattgaagtattttagtatatattatgttttcactgtgaaaattgtaaataatttaaacaaaatgtatttaggtgggaattggtatgaagattggagtggttagtttgaagggccttaaggggataattataatgtactattttttgtaaaatatttttttacatttttacggttttttaaaaaataatacgaaaacaacataaaatcaacaagaaaactacataaaaataacatcaaaataacaacaaaatataacacatataacataaaataaacaacaaattaacaagattataacataaaaagaccgtattttttgtaaataaaataaaaaaaatcggaaaaatatttaaaattccgtaaaattatatttttataattttttgttatttttatatttttgtgaaattaataatccctatcacatatgtacatgagcctagctattgggctgctcaagctatatattataaacagtattatacatatatattttatcaataactaaccattacattaaatattcaaagagaaaatgagtaacttaaatatattatagaggtgcacaatgcacatcatgattgtttaatgtcttttagtaggaatgtaggatatgctgcattttgagttgaaaactatgagcaatacgcctgtcaagtcttgaaatgaattaatgaggtgctttcaagtttcataatattattattattattattattattattattattattattattattacatgtatgaactcttttcatttacgggttgattgggttttgggttggcgagttttaagttatcgggttttgggttgaaaatattgtattcggagccggtctattcacgtgttgcgggttggtgggttggcaagtttagtttggacggattaatcgggtcaatcctaattcaaagtggtaaatatctcttttaaaataaggaaaataacaatctttttatattatatttaaattacaaaaagaataattaaatccc

SEQ ID NO: 297200 - DNA, 1140 bp, Cannabis indica
ttatattatatttaaattacaaaaaagaataattaaatccctaaggtattggactaatatcttagaggaacattcctatctttataggttgttggaacagccccgtaattgtagtttagcttatgaatcttctagaaagttcgttgtggatcccacaatccattcagcctttctttgaggctgccggcacgtgttggccggccagcactatttttggggcctggctggcatgtgaggctctactggttggctaggtattgtgtggcagggccggtcctagaaaaaaatgggtctaagactactttaataaaattttaattttaaataaaaaaaaagagtacaatcttgagtactcgcgtgtaggaatgataattttagtgtttttttttttccatactttttgctttgctttcacctgaaattttaagtttggtaaataaataagctattgggccacttgggttgggcctaagttgttataacttacatgggtcaaatatatgtgtggggttttttgggccttggatttggttgagctctaaaaacaggtctagtccgtcttagtccaagatcggacatgtggtctgcaagggttcccctagcttgccattttcctctcgtttgatcctgcttgacaatttacaaaccgtgcaagttaatcttgtcctgacaaattgtatttcacgtaattttaattttaattatgtgaacatgccacatgaagtagataaaaattaaactaacagtataattgatgtaattttcccaccaatgttcttttattatatattggacacaacttaatccttaaaaattctggatgacatcattgatatgctggcttgcaattttgactatgtagtggtaattattataattagcataattaggcacacactctttgactttattttgcatcaattaataaattaagggaaattttatgctagtttcggtaaactttctttcagactagttagtttagtatttaggagagttttgtcaattttttttgtttaatcatgattgagtacaatgtatttagttaccacatctaattttttttttttaaaaaatgtaaatagtttgggtactaaaattaagatttatatattttgttgtatctataattattttttt

SEQ ID NO: 297201 - DNA, 7781 bp, Cannabis indica
gttgttgagaactctcgtagtgtttttgtagcatctcactcgatacaacttggatcgacaggattccaagtgcattggaaagacattttgatgatgtttcgatgagtgtctcacatgcatataaaaaattagaccccttcttatcgaaaattggatcacaagctaagttacgaattttgggtctcaaagctcctaaattcgatcaacgaacctcatttgatctcaaagaacaacggccgccattcaaaccaagatgagcaatctcaaccatccaatgatggtatggcatctgtcaatggtccaagagcaagatgaacaaaaaagaatattcttgaaatatacttttgtaattatttatttattattattttaattgtaaataatcagtcatcatctcctttaaatagaaggctgatttagtttattttcttcactctcacattctgatcttcagactctttttctaagttcagactttttctctcaaaaaatccgaattcattttgcattttggcttcgaacttacgcttaaagtcatttgtaataccccttcactatttgatcaataaaagttgatatgctaccctgcgcaaatcactttacataatactcggactatcttatacatttattatttattttaggtagattacctttgtttttatgttttttaattgttgcattaatttcagtatcaatattatttttgtattcaaagtatatttatttgtacatattttgtagtttatgtttaattactttaaacttttaatttatttcgccaactcatactaaacttagtaatattttattgtaattggagttattctcttaataaaatagactttttcttcataacaaaataatagaacattaagttaagatattgttgatgatacacgactcaaactcaattctctttttttattcttttggtagtcaacactctttatttcattcatcatcttcttgaaaacgttgctttgttgatttcatgtagttcttatgttgcgtatatattttgtacgtcattatcattgataatgacgtcaatacaacataccaacagtgcgacaatatcagtgctataaattaaaattttaaaattctcgttctcattggactaccaagacttttaattatgtgttttattcctttccaaatttttgaaaattacctaaatacaacataagtgcgagaactaatatcattaacctatacgaattaataagccaataaaaatatttgataaataaatcaaaagaaccacgataaactaacttcaaaattgcttctttttttattttttctgttttgtttcaaaatgtttaagtaactcttgatcaataatttttctattcgtgtaaatagttttttccattgatttttctcatgtagcgttaatggaggtctttcgttgattttttgtcgcgaacgttcacaaggatatctccttgattgtcgtttgttgttgctaattaattactaaagcgtaacctatcttcaacatttaaagaaatctcttcataatgaatctagtttcgtgtttttggttgtttggatgattagtttgcgaagataaatggtgtttttcgttgatttgagttggatttttgttgctcccaaatcagcgtcgtgggagctacatgaaagagaggcttgatccgcgtgcgattaagacttcatgagaaagttgtattttgatgataattctcatgtatataaatgtaattttcgagtcttatataagtatacaaagaaaagatatttacggcacaaatactttatcttttcagtatacacttatatactacatatttttttttttcaacagattaaatactatatgttatatttttgttctaacttttaattctaattttgttaaatcttattatatctgaccaaactaacacgcgttaattgattaattgttcactgtaaataaaaaaatttattaaataatttcaaaacttaaaaaaaaaaactaaataataattattaaattataaaaactaaataaataaaaacataatttctaatatttcaaattctactgttatttattttaagattatttaataatttttaaacataaaaatgagttgcatcgttaatatattggcatgtggtattttacttaacaaaatttattataatggcaacaacaaaaatgtaacatgtagtatttaatcctcccataaaaaacataccatatataagtgtataaaattgaaaaaataaaagtatttaagccataaatatctttacaaagaaaatacccctaacttttattgtttgtcttagaataatttgaaaggaaattacactatatacccattttttatttttattttaattttcaccttcattttattactctttaatttatacccaattttttaactcttatccccattatgtacattaggacctctaattttgataaattatgtgaggttatatttattactttaattataaaagaagatatttatcaattaaaattattttaaaattatatttggttaatgtataataaaaatgggtagttttcaacttatcccataatttgaggcaaacccgacccagcagggacagggaggagccagtattgcccagcacgcagatagttttcagccatccctctttgtttaaaatgtcagtcatatgtatgtgtatgtttcatgcaacaacagattcaaattagcaaacaattatcatgttaagaaaaaaacgcccccagttggaaagaaatcaagtactaattatcgtttttatgattaatcgacctaaaccacttgaccgaccatatatcttcattttcttaacgaaaacaaactgtttgaaaataactagaagggtatacaatacatacatatattcattgttttatcattgaaacttcagaatcaccatttgaatcttcaattccttgtgtctgcgagtagtagagttacgcatactggtctcaccaaaaatctgtatggacactgatttaatgtcaaagttctagttgatcactgctatatacacctttcatactcgctctcactctcgactgttctttttttcttaactagaaaagaatgctctttttcatcagcataagaaaagagcaagaagggatgattttgaagtggagaagctacctggcattgtaggtcaagtggaggaatatcataaagctggataataagagtaaattagaaagcatggcaagtaaaacaaccactcaaggaactcatctggcgagttctatgaaatgatacaactttatgattactcctgggaacttgatgagcttggttagctaaaacggagcttctcatatcttgagctctcttctgagccgatttcaactttttcataatcttgtccatagatgatgatctctttttttctagcttcatctgaggaacagttatgcatgtatgttttaaattagcataaagtggtatacccaacaaaccattattttgtacagcccagttgctcaaaaaatgctgttttgtcttttggttccttagcttttgagattttcacaagtagagacaaatatatatatggagatatatgtaagcatttttacctctagcttccgtatcgcagcctcagcttttgccttctgcaggttctcccaagctgtaattttagcttcctctcttttaactctgaaaaagaaaagggagcttaacatgtcaacaatgtcaaagacgtctctgataagttacttgggaaattatcttttagcctaagaggaatctcaagagggccacgtatcttttagtgtaaaaggatcctattctctttagtaaactaatataagtcccgaaaatcttttctaaattacgatttagtcaaacaacaaaagggacccaatatttacttaattgcaacttgcaaatcttccatcttattattttctccgtgctttctcagtttcacatggtttggtgttagtagaaatgcaccttttactaacttgtctaaatttttggcctttcggtaagaactctccagcatttaaaattataacctatttttttttacataaaagtttacaatcataataggcatctcacaattttttaaaaaaattctaaattatttagaatacttaaacaaagtctaaaataatcaattgcacacattaaaaaaaattgtcacagtactattaaatgtttaaaaactaactttggcatgcaaattattcaagttttttaaaaactagtagaatgtctctcatcatgtcgaccgtcatagcaaatttgtaaaagaaaatgcacatgataatagattaaagtatacatactttgagatgctccttgttgtgtcagaaagatcccaagctggagatcgagcatctccatctttctttttcccgttctcaaagatttcagaaccctttccagaaattcgtgctttatgtttcttggaccatcttgtcatggtgacccgttcatccacctgcacatctctgacttccgacttacatgaaggaccactctccaacgccactaaaggcaggattgagggatttgaatcagagaaagaaagccctgctttaggagaagaatgggtactgccctctgggctcatttgtgtagccatatcccttcttgaaactgcacgagatacattgggtcctgaatcttcgaccccatcatgattttgatctgtatgtttaaaattgaatgggtacaatacttttaaaaatgtttcaatttgtttttaacaaatgacaatacaaagaaaactctcaaatcagaaacaaatttcatattcgacaagaattacggggtagttcatgttcatgactttgatactatgacaagaatcataggattacatctcaaaaccaattaaaaataagtggaatagctcatattcttatatttcactcaatatttacatttaatacaatattatccaataagtactaagttaactaattggcgtaaggctatttaaatcaattgtttaaatatgttaacaaattcaaatactacccagcatttccttagcgagtcaaacgatccctataaaattatttgtttgtacataagatatatcgttaccttcaagaacaggcattgatgactggctcagcatttcagaacagccatggacgctaactgaccgggccatggaaggctctgttcgtgcaggaaaggctccaccatggccattgggacggattgcaattccatctggagcaataacaccagctgagaaaggagaagaagccatgaaattgccgacgttaccaccatcgaacatcggtattgctggcgagtataacgaataatatgcaatcccaggaggcccaagcgggccactctttgatttaggcctcctctgcggctgctgataagaccttaccgctccatcaccagaaaccggactgaaaatccatctttcagcatcctcccattttgaaggcaacgtctttccattgttgaaaggtactaacaaagcactcgcatgcttccgcccaccatgtgaatgagacggtactcgttcagagctccaacccttctgcattcccacactcggatgcctgtaattcggtgttccgggactggggaaattacctgagcgtcgagaagttaaggaggccttcttgatggttcccaatcgaggggaagcagtggcattgttcaaatccaaagaagcgggtcttcgcctgtctgacttcttagctaaaacttcagatctggatctccgttcctgacactctgcaaataaatggtgacatatttagttattattagaaaagagattgagcttgcttagaccagattgtgaatgaaattaatacctttgagggcgagggagaacgaacttctagctgaatcaagagctacatcagcatcactatcatctctatgaactgcgacacaatgatttgatttaaaaagaaaacgagtgttgtaaggtgaatccgtgagcgagactcaaattttgaaaaaccgcaaaaagacatgggtaggctattataaaacttttggagaaaagctacgaatatagagctgtatacctttaactttttctccttttctatacttacggatctgtatagtgggtttgtttggatctagatctggaccactcgaacactcttgcagctcagtatcattccctgcaagatgctgcaccaatttaccaatacctttagattcatcatctaagattctgttcctcaaaagaaaaacaacgatcatactcgtagataaataaataaataacaattacttcgccattcatcacagtccaaactctatttcgagccctatacaaacacagtctcccaaccctaccgaacaaagaaatgtcacttcacaagttcctccaaactttcaaatcaacaaatacacggaaaattattactaaaccacaaaatgttaaggaagatagttcacacaaattgccaaaatagctagtcgcaaaagggcaatcggacatgcaagggatccgaatctgaactgtatacacaaatgtcagctcaagcacaaacacacacatgaaaaaaatagtatgaagttgagctttgcaaatttaccagagagatctcggacgcgatggaatcgtggtcgtgagcgtcggaagcgaaggagcagcggtcaacgctagcagacgcagaagagaagaggcttaagtttgactcgagcgtgaagatgacagagtcggggcttgagtcacggggtctgaagcccgatctcgacgagctctgatcctgaaaattcaactccggcattgtgataataatgtcttattcctcacatcaaagagacattttcaagattggtgtttatgcaatatatgaacattaaatccaaacccaaaaaaaaatggcgggtattataaggtgatttcaccaagcaagctaagctagaatattttattatgtcaatgattttgttagttaaaccaattacaaaagatgagggcccaaggctttttgactatgagaatggccacagaaaataccaaaagattattccttttattattattatttggaaattaaaaaaattgttgtttttgagttatggtgatatagtgattagtgaagtccatgagtcgatggtgagtgagtgctgaagacgtggattttggttgttttaatggtgggtcttacttgttaatttgactgaaatgcgaaatgacctcagaggccgtggattctatgacagattttgctttgttggtttgtgaatgtggggtatgaatgggaaactagcagtcgttgggtacaatgacttttggtgaaatgtaaccaaaaataaaccacgaaagaggacaaaattatgacagagcctgtctgtgtctgtgcactctctctggaacaaaattttaaccgttgaatgaaaatctttacattgatcacagaggaaaaaaaaaatagaaaaaagaaagcaagcttacagctagcataagaaactggagggtgtcaaaacttggcattgtattatcttcgtgtcatattttatatcactttgattttatatttcgtgttaagtgtgtctatttatttttaactcgtgtgtagttttttcaatcttaatataatgtttgaaaagcatttttctatatatagtttttggtgagttctatttacacatcataaaatgataaatacatctcattattaaaaaaatataaacttaaataatttttaaaaactaattttaatatttttttttaaaaaaaatcttctacattattttatgctaatttcaatacttattttaattttattttctataattttttct

SEQ ID NO: 297202 - DNA, 3844 bp, Cannabis indica
aagcaaacaaatattcatagcttagttggtagaagtggatgacataatgtccaaggtcattggttcaaaaatataaatgtgatacatgtacaaaagtgtacacataagtagtttatattagtagttaactgtgaaaaatagatgacaccttaaatttactatcagttcaataaaatttaaacttaaagaattaaatgcaagtgaaataataattaagagaatttaattaaaaagaattcttaaaaaaaataagtagaattggactgcacaaaaatatttgtagtaatttatatagtttagttaaaaggaaaaaattgacattaattttttttttataattaatttaattattgtagatttgtaaatttgatttttttttcttttcaatttaccaaaattggaaaaggctgattatatttatcttttgtaatttagctcacagatgacagaagagaataatatctcttttctcttaaacctgaaagggcataatgggaaaatcaaacagagaagtggggaccagttataaataagcagttttatagtgttccatgtataccgtaagctttggtttaacgatgacataccattcgttctaagctaccaccagccattcagagcattgcacgtattaaacgtaacctcctagatgaagtacaggattcgaacccatattcaaaaattcgaaattcccactaaaattaaacgtccgttacagcaagcgttaaaatcttcttaaaacgctcaaacggctgacgaaaaccgtcacatctccacgttatataaatacgacccttcgctattttacacttcattctcgaattccctcctttcaaattttctttcgctttctgtccgagaaaaggaaaagaaaatttcaaagaagagaaaatgcgtgaaattcttcatatccagggtggccagtgcggtaaccaaatcggagcgaagttttgggaggtgatctgtgcggagcacgggatcgattccacgggacgctatactggagactcggagcttcagctcgagcgactcaacgtctactacaatgaagcaagctgcggccgtttcgtccctagggctgttcttatggatctcgaaccaggtaccatggacagtcttagatccggtccatacggtcagattttccgaccagataacttcgtctttggacagtccggtgccggaaacaactgggccaagggtcactacaccgaaggagctgagcttatcgattcggttctcgacgttgtgagaaaagaggcagagaactgtgattgtttgcaaggtataataatttctactctctatatctctctgtttttttttcttatgtgaaacgtaaatttaattagggtttgtgtttgtgtttttttagggtttcaggtttgtcattcgctcggtggtggaactgggtctggaatggggacattactcatatcgaagataagagaagagtatccagatcgaatgatgctcaccttctctgtgttcccgtctccgaaggtatctgatactgttgttgagccctataatgctactctttctgttcaccagcttgtggagaacgcagatgagtgtatggtcctcgataacgaggctctctatgatatttgcttccgtaccctcaagcttactactcctagctgtaagtatttatatatctacttgcctttttatctcactttcttctagtttcactttttggataccatgaaaccaaatgttaaaattgatatgttcaatctttgtttggtgggttttgttaggttggacagtatttttgatacctttatttgagcgatattatttatgttcaagaaaaccctgtttggatgccaataagaaagtgataacgggactgatatgtttaattgataatgattatgatgcttgggcatgattgcttgatagtgattatgatgtttggctattaaaacagctttaaagtctaataagaatatgaatgaactatgtgtattgttaattatgcttcatttcgttaacacccgatgttaaatgtcttcattcagatggagaaatgtcagtgttaaggttgctctaatttttattttctttatggaattatggaagtatttaggcatttatgctttgtttctgaaaagtagatcacgcactttttaagaaatgaacacaatacttgattttatacttctgctcgcgcgagcatgggccatatggacattcctgacccaagctgtaagggatccagtttctactaaatatattgaagcacaactattcttaaatctgtcacttgactgctttaatcacgtgatagtcagaacccttttctctctgtcgttgtatgcaaagttccagttgttttccacatgggtctcactttgttgtgtattatggtcaatgggttggaagaagttatatgataatttattcagaaagagttgtatcttccaatgtgattctttaattatgcatttatgaaccgttcaattactatgtgtttaattaatttaatcagcattatctgcagttcgctcatactgatgttagtatataacgtgtaattatttgctgggtgactttgactataatgggtactcactataaagtttgtttgatcagttggggatttgaaccatttgatatcggccactatgagtggcgtcacatgctgcctccgcttccctggtcagctcaactctgatctccgcaagcttgcagttaaccttatcccatttccgcggcttcactttttcatggttggatttgcacctctcacttcgcgaggttcccaacagtacaggtcactcactgttccagagctgacccagcaaatgtgggattcgaagaatatgatgtgtgccgctgaccctcgccacggtcgttacctcactgcatcagctatgttccggggcaagatgagcacaaaagaagttgatgagcaaatgatgaatgtccaaaacaagaactcttcttactttgtggaatggattccaaacaatgtcaagtccactgtttgtgacattcctcctaccgggttgaagatggcttcgactttcatcggcaactccacatcaatccaagagatgttccgtcgagttagcgagcagtttactgccatgttcagaaggaaggctttcttgcattggtacactggagaaggaatggatgagatggagttcactgaggctgaaagcaatatgaatgacttggtttcggagtaccagcaataccaggatgcaactgcagacgaggaagaagagtatgaagaggaagacgggggttatgaagaagatgtttaaacaagcttcttttggttttcttatagtataattgatgtgttttactcaagcaattggatgttgtgttttgatacatttgggaggagcacagttctcatactttatgagattttattggtgcaaactaattaccttacctttgagtagtatccaattttccttatggttttataatgttgttgttttcaccatttgcaaatatttgttgcaatttttcttatacaattggtgtttttctatcattaatgctacaattatatgtatatgcaaacatattttttagatatagcgttagccgtagcttcatatcctggacctaaatattaattttatctaccactttaaatttagcttaatattttcaattttattgcttctttcacattgttgctgctgcctagcatacgagccaatctaacttttttattttcaatttattttgatcaaatccaatttgttattagatttaaaaaattataatctaatccaatttaaatagacctcaaatatcacttaattattaatgagattatttcacaaatacacaaaaacacaaaaaa

SEQ ID NO: 297203 - DNA, 2955 bp, Cannabis indica
aacaataacaaaaaataacatacaaataacaaaaaattaacaacaaattaataagagtaaaacataagaagaccgtattttttgtaaataaaattaaaaaaatcgtaaaaaatatttaaaatttcttgaaaccgtatttttgaatttttttgttatttttgtgtatttgtgaaataattcctaaaagtttgagcttctaataagcccgattatcacatggccataatgctaacactaaataacattcacaattatcacatatatagcatctcataatttgcaagaataccattatttcttcacacatatatatgcacacataaggcaaacgtttgcctaaaacttattcattaaagtataatcttgagatttcacatgcaaatatccttactataagcatccatacacaattatttctcataaaactatacatgcaaggtactattttatttccatgcatgcatgcactacgtactacattgtcaaatgcattagctagtgacctaaaatatatgattgataatagaaaataaaaaaaatatttatttttatttttaaaaataaataaataaataatgtcatgagtataagcatttatattgggctttaggattttcttttatttgggtccttatttaaaaattacttggtattttcaaaaattaataaaattaattatttttttttttgaaaaaaaacttttccttaaggatcttggactaagtaggtctaagtccagacctagtccgccttaacttacagtactacacaaaatattatttttaatcacaataaaatttgtgattaaagataaaaaagttgtagctaattataaattactattattgtgttgtgactaaaagatccgtggctaaaagtattagtcacaaaaattacaatttattgtgcttaaatgtgtttttagttacaatatttgttgtgactaaaactaaattagctagtgacaacttgtaactaaatactatgttttagtcacaagtaattttttgttgtgactaaaagtcacatttagtcacaaaaaatatatattgtaactaaaatgttgtcactaaaaatatatagcaattttttgtagtgctagaaaagaccctctttataacaaagtgaagagcaataggaaaggtagtaagctaggcaatgcaaccctctatatatattattttttgtttgttgacataacatatatatcattttaagagttatttataaaaacaatcttatacctactaattaaaatgacttaagtagccttaagtaaggttagaatcctttcttaattggcgtatttttcaaaggttgccaaaatgtttgaaggaagaaagtgattttgataataattctattgttgaactgttttaattaagctgagggaagtttaaaaagagaactattaaccaattatagactaataacgttcaaaaaagagtaaggttatacaaggaaatttatagcatatatataaataagaaataccctattaaacttgagatgatatatttcagatatagtaatttctgttgcagaaaccacaaaaacaaaatttagtttgtagtaaccaaaaaagggctacttctctcaaagagaaagaatgaacatttttaaccaaatcccctaaagtggaaaatgagagactagaaagccagcaactcgatcggcttcaagaggggaactcacctatacattggaagagaaaagcctccacaaagtcaccacatgatcactcaaaaccaacaccacattaaaggccattcttccccacactgcaacattagtaaacacttggaacctctaggccctagccatgaaaaattgactcacaatgatcccatcatcgcgttgctggttacgcttcactactacaaaaagaagtatttgcgatggttttaaaaatattttttttagcgtcgaaaaaaatagggtattcccggttttaaacgtaccttaaaaaatctcgtgtatttgtaaaagaaaattgtcaacggtttaaaaccgacgtcggctataccatagaccacagttttaaaccgtcggcaattctcatgctttaatttcacgcgtttcagatctaaaatacaagtcgtcactaatttagttttagtcataacaaatattgtgactaaaaatacatttagtcacaataaattgtgatttttatgactaatatatttagccacataccttttagtcacaatataagaatgatgatttatatagttacaatttttttattacttttagtcacaagttttgtagtgactagaaataatttttgttaatgacccctcttccccacagtgaaagctttcaaaactttactgctatttgttatatttaataatataatatgtagattaatatgtggtaataaatattattcacatgtaatatatattattatgtgaataatatatattaagtgtttggtaaataaattgtataacatatgatttatttaacttaaaatagcaacctacactttgtaacatagagagaaattacaatattaatagcttctgtaacttatttcggttgatcacatttttgtgtaataaaagagatgttgcacaaaattgatgatatggtatgtttgaattctaagtgtgatcacctgaacactatataaatgagtctaatcatttgcttatttagaggagaaatttttaatcaaaaaagtacattgttagaaaaccgtaagatttcataatttccaaagctatttcttaaggagttctcttacttttgaataaaagtgtaataccttatttaaattatggtgatctttttaatctacactcaaaattgcgattgagtgtatacatatattttttgctcttactgttatattatttataataatataatatatagattaaatatgtgtaataaattaataatatgtaacatatgacaatgtatattagttgtcatcttttt

SEQ ID NO: 297204 - DNA, 5647 bp, Cannabis indica
gaatacagatacaatcaagctacttatagtagctggtgtttagttacagctgtcataactaacacttgatcctacaactaactattaactaaccaaaaaactgattctaaccaactcaacaactgaatctaacaaacttaacatattgagatatcaatagcgtttactacttatttataggtaacatcttataattagttagcgatattctttaaaagttattatcttaaattatataagacccaatacttatttatagcaataagggcatgacaccactgaaaataaggctaaacaccaaaaatacatttaaacatttctctttctatgagtatatgtgttgactttttgttatgtgattataaataaactttttttttggtaaagattataaattaacttaattacttatttagtatactcatttcccaattgataggctagagctacactataaaaaattaatatttgtagtgacaaccttttagtcacaacataatttttttgtgactaaatgtaacttttagtcacaagaataagaggtgtagatggattctgactctcgacaactggcaactgaggatagcattatcaacgtggacaagttgggtctccaagacaggctcaactgaacctgaaacctcaccaacaacttgcacgggaggcgcctcatctgcactctgggcggaaagtgcttcagtagaagcctgctcggtctctttatctcgtcggcaagcatcttagaagaggcttggctagttctttcaatctggctggctggtagaggcctctgaagcgctatcctacgtggccttgctacaaacaactccttgcctcgagcaatcaggtcctcgcgaagagcaatatccatatacatgaagttgcccttgagattttttatgtagcactcataaaattagtctcgatggacaggtttgcatattgatccttaagagtctcctaagcctatagggaagcatcaagctcttcttacttttccttttaagtcttctccgcaagatctaactccttcttcaacttggcatttcttgccgtcaaattagtcacctcttgattgtggtggctaagcagctcgcccacaccttctagtggtccttcacctccctcaaccttttctcttccaactccagatcgaccttcaccttttcaagctcaatgccctccgtcttaaggttgacaccttgctccctaagttgggtatccttcttggcaagctcagcgtcttttttctcaatgtccttcctaaaggctactgcagagcccttgaccctagcattggtatggccaagcttcaaaaaagcttgatatacaaaagaaacaaaataaataaggttgcacagtgcatgaagtaaagaaccaggtaagtattaaaaaaaacttatagatgccacatctttcatggtgctggtcgtcagatagtgaaaggagacaacatatctagcccatggagctacttatcagcatctgaaagacacttgcccgtgtatttttaggaaacctctttggccttgtcagccttgctagaagaggttgcctagctatgcctttggctgccctaacccggtgccttgggaggaagaggtgttgcctcaggtgaaggatcccaaatcatggactggttgatcggaagtggaggaaaagtggtctaagtcacatctgaggtagcccctactcagaaaaccttgggttgtgaccgaccagctcaagggctgcttgattttccctttagaaggtattgaatcctggaagccatgtctgcaaaagaaaagcaataaagtcagtatacacgttataaacaccaaaagcaagtaatggtagaagaattactcccaatagtttcctcaagataatctacccaaggacaaccatctaaaggccctttatcttcaaaagaagactcattaaagctttcctcaattacaaaagccttgcctttgcctttgtttgttggcacaggccgagcaagtctcactgacttctgtccattaggcctaataaaaaatgaggtgtgaccaaccatgccaccccgtacaagatgcttctgtcaagctagatccctactagtctctctataggaaatataagctagaggaacctcatcgtcgaacatacttttctcctttttaactgcaagcgtcttcttcttggcattttccttctcaataggagcactgcctggatcctcaagaggattgcctgaagcctcaacatccttaccggaagggtacatgtcatacttcctaatgttctctttacaatccaacctacaaatgttgcgccactcagcagaaagagatagtatgatgttagccctgtcccttatctctagcgaggaaatcggctaaatataagtggggactttatggaagaaccgacaaacaccttttatgtcataatccattagaaaacccttgacataacccctgatttttcacatagctgcgtcatttgtgccgtccaaccactcgtagccttgctggcaaaaataaaagtatctagtcatgttctagtgtggactgattttagtttaaagtatagcttactttaaaaggtgaaggctgcgaccagcctagttcagcatacacgacagagagtgtaaaaaggtattttatacccttcggtgtaatttgagttggacagagcttgaagaagtttgctatatccttaaagtataggtgtaaaagaagaaccatcctttactcaggatggggaccaaactatgttatccagttcagttaaggatggtgagcaagatggcttggtgtcggcctaatacatcagacttcaccaacaagtccacttttgataatgtcagacagtttggcggcagatggcgtggttgaaagggatactcatctctctccatccccgtgttgtagaatccaaggcacgacgacctcatcctcaatgtggtcaaccccaacctcagagggttgacccatgctagaggttgtccagcctcgccttaagaacccaaggggttaccctagatcacatcacagtccctagcacaccttcaggcagccctgggcttggctgctagattctggatcctcttcctaaccggccataagctctttagcctgcccgacctcaggacatttagcttgctcagcatagtaggctcttcctctttccatgagttcagaaatatgaggatcagttggagttgcctagcagtatgtctgcttagtcctaactaggattggatatttcttagagtactgagcaatggtcacaaaagcctctgctacagaaagttctctaagtaaagaatacgtatgtccaataggcaaggtgtcaagcacaccctgctggacaatgtaggtccaagactttgagaggaatcgtctccacccctggttcagttaccaaatgaaccttctataaatttcaccacttatttgctcagaatagtggtgatgctagatttcaggtttcggagaaccactactcacttcaaagtcactcgaagagctacacagtgagctcttataggaggaactagctgtctagactgggcactaatcttcgtatataaggctaagtaagtcctcatcgatcttgttgtcacctccccaatagtcacgtaggttcatctatgcataaatgaagactgaggtgaacaactggagatcataaaaagacttggacaaaaaatgggttgaccggccaactttaacctaaggttactaaccggacaacctggtaatgaaaagccattaaccagccaaattaaattaagttcaacaagaatcggatagggtttctaaacatattcaaataatcgaataggatctctaacaaacccaaagtactgggtagggtccctaaacagatcaaacagtcctatttatatgttcaaagctaagttctttgtgttcttcatgttcttcaaaactcgaagttcaaatgtcaaaatatagtgcaagattcaatcttttttatcaaaaagtcatgcattatacatcctaaagctattaaacagattacaaagagtaaaactactctaaaacatgaaaatcaaaaagttcataagcttagaaactcatcaatggcaaaaacttaagaaaaaaaagggttcgaaacttatccatagaagaacggcgcaaggtatcctaaactttctctgcgagactgattctccaacaaatgacgatcaaagttttgagaaaattaaaggtccaaagagggtccaagagtcaaaacctttgaagagtgacaagttctagagaagtttgagagagtttttaagtttaaagaagttgaagagtgaagaaaatgagaaaagagaggaatgtgtccttatataggttctgaaaaatttgtaatttgaatgggtcagagtgacaacaagactttgtgagtaagctggtggtgcctggaattgtatactgagaatctcgttggtttgggtagctgcaggatgcgatcctctgagatattgtatctcggacgtatatctaggccctttggttagataatatctaccaaaagttgtgatttgggcctattccaatttaatgtatttttgagcccttttttgaaaatcttgcatgctggctgcaccttcttgttggaactaattctagagaggagttttagtttggatctcggtctgtaatgattctaatcattgcccatcgtcaaccttatttgtttcggaagcttcttccttaaatctcttgataaaattatttagggtctcgatggacagttgtttgattttagttaaggcactgacttcaaggttcatcttccttcctgtgacaaattatcttcagaaacagcaagtatgtaatttattccagcaacttgtggacccatgttctagtttcttaaaccactcttccacagatcctcccaaagtcaatgggaagcacaaacacttggcgtcattgctaaccctcaatactgtcatgaccgtattaaaccgtgacagatgattgcttgggttagtgtctcccgtatattataccatgtttggcattttgaagttttttgggagttcaccttcaagtgcgttcctagcacagggctgctagtcctcacaattggattccgaatcatcacctttttgcctgtgagacactcttgctatatcttttccatggcaagcatgttcaacaaagattcctttgtttaggatatctttcaaggctagagcattttccctatggctgaggcaggccttgaggtctccatgctttgtattaagcttttctcgtaagtcaatcggaggatcctaactcacagacactcctctttccctaagcttttggtgcacagaaatacttcagcgatccccacagtcttgggggccagtcctccctttaggaaacctgtcccctaacagatattttcctttgggtgatcagaacgtactctccgtggatcacgggttgctttgttcccctctggtattgtcgttgggtttgccttaggagatgatggtcctttagaagagtacctgatagggctaggctctcttcctttctggttttggttcattgtgggttgtgtgggtcattctcttgccttctcatgcagagatggcacaatagttgggtgttggataaattttaccaggatctagatttactaacaagtatgtttcattaacatc

SEQ ID NO: 297205 - DNA, 2203 bp, Cannabis indica
acacgagtgttttcagcgtgctttgtcctcactcgcacgcggtgtgagattgtacagcttacccggtatttccccttacggatcacgggactactgattgtcacaaaaactcaatcatggcagaaattgaaagtggagctggagttagaatgccttatagtatttcaagctattcgaaattcattacctatatttttttctttgagggttattattatagaaaattgtcataaacttattgcatcttttaataatgtttctttgcttttatgaaacgatttgttaatatcttattctttttgattgaggtacaattttatcttttaattgatttgtcaaattaataaatatattccttttaaaacaaatacatttatatgttttttatttttttttcaggggtagtgcccttttggggctctatgagggtccgtccaatatacatgtgatcaatatgagagcaagcatttataatatgttcatataaaaagaaaaaatagagagcaagcatttatatatagttgaagattaattgatactgaaacaaagaatgttgtagtacttgaggaattaataagctggatatatatgatgagtaaacataaagcataaattaatatgaaaatgacctcaaaagatagtaaaattctgttttacaaatcatatataattaatatatgagaaatgttaaccacaagctatatatttattgatataaattaatattaaatgtacaaattagtttaataaattaataatataaaaaattgttaattactcgcaatgcatcacattagtatagtgttgaatatcataaaatgtgtataacaatacttatatttatgtataagtaagatatatatacatataaatcatacataaacttgaacttgaagataattggataaaattatttattaaataagtgtgtctcaaatttttctatgcaagtaacattactcattgaacattgtaagccatgtttagcattttcttaacatgtagttttacaattggttaaaaatattttttaaaaattattatattaaattatatgagacttgatatttaattatactaataacgatattaatatgtaggaggtgctaaatactactggtatcttttagtatttctcttactcattactctatataaaattggaaatttttatattagaccctctaaaggatcgttttgattggtagactccgtatttgttttggcatttagaaaacgtttttaatctaattcttttttatgatcgcattcgttataattatttaagactatttgtaaattattcataatttacaaagtcaaaaataaaatttaaacagttacttattaaacatataaggaaaaacagtcgcgagtataataaaatatataaatcttatttttatcattataaattacacgaaattttttaaaaatttacagattatcatgaataccgaaacaaaaatacaaaatctaccgaaacactactttgaagagtatatttgtagagttacccaaatttaatatgtacactaagagagagtactacttgtagaatagagagttgtacataatagaatttgaccaaaaattcttttctgtctagatgcaccttcttattattaaattataattaattaattaattaataaagcaaaaatagaaatttgatattgccttcatggtcacggaaggagtagattcctttgaggaattttatattcacattgtgttgatctaataaactctaaagtaaataaactaataacaaaaacaaagtatagtaaagttacattctctcagctttttatgtatgcatatattatatattatattaatatacatcatataatgtataatgtacatgtatatgtatatgtatacatatatataaagattatatattcagcaaacttcactaactttgaatgcattccactcaaagcagctccttcctcagacattcaaacccccctacatcgtgattatataaatatatatatataatatatcacatatagagagaaaagaacaagtccccaaaactttataatatatagggtacttattctataatggatcaagaatgcactttctatttattttgggttcgtttggaacgccgtattaagtcgtattgtattgtattatattgaattggattatatacaatatttttatataatactatgttaaattt

SEQ ID NO: 297206 - DNA, 9383 bp, Cannabis indica
aatcatgttttacttgggactcggactcaagacctctaacacacactggcttatgaacatttgagctagcctcaattgatacccataataatattgcatgtcacaaaaatactaagctaagtaataagtaacaatgcccttaccatttctctatactataatgggttgaatacattcatcgaattttgcatgaaaaaaaagttttaattaatttgtttgtcattttttgtagacaaaaacatggtcatgacaaagactagtctcaccatcaacttcaaaaaaaattaatgaaaatgaaaaaattagtttcaatttttcaagtggctttgtacaatacactaattaagagtggtgtcgtgtaatttcatcgaacacatgtgaaaaggaatatgcattgatgtcagcaaccttttcttctcgtgaaagctttgttagaaataatattaatgatgtattcctcgaatatataaatgaaaaataaataatataatacatagaatagaacctatgcaaaaataaataatataattcaaatttatatatcttgataaattgtcatcaattgaagggtactaaaaaaccatgtattttgcacagattatcaattagatattctgttttgttaaatgacaaaataaattttatatttttcaaaatagtaaaaataggacactgaattaaattttaataatttgttttttaatataaccaacattaaaataatttctaatataaacagatacataaaatatgatcagttttatcataacatctctaaatcagattattattaagttttattttaacaaaaaatcttttcaaggtcctatttgtacaattttaaaaaatatagaatccatttgtcatttataaaatagagggtccaatcaataatttttacaaaatacaaaatctaaaatagtatttaccctgaattgaaaatgatatggtaatatatttattaaaaataatccaaaaaagtgaaacgtaaaatgtaatataaaatatagaatgattctactatgtatccaattaaaaaagatgcactgatgcaccttctatttatttcggtatccagaaaaaaaatttagtctaattttttttttccatatttatgtacgttatagctatatcttacaaaattttaaaaaattcagaataacttacaatataaaaaataatattcaaacaatctattttacacgtatataaaataaaatagtcacgcgtgtaacaaactgcttgaacgtaattttcggcgtattaaactttttcaaatttcttaaaattttacaggatgtcttaaataactataatttacatgatcatgagaaaaaatttgactaaaaaattatttcaaatattaaaatagatagagatatatgagtatattcgacggtacattagatatttaaatattcggttaaattaacaaaaattcttaaataattacattttatatataaagatattattagtttttaaatacattaaataaaatacagagaatactgatataattttttaattttcatatttatttaattataaataaataaataaattacatatttattttatacattcttttcatgctattttcccacacacacatatataaatactagtgtctctatacaaaggaaattaaaaaaaaaatggagaataatgatgaagtgattaatattgtaatggaagagagtgataatagtaagagtaatattccagtgattgatatgagagagtttgaagacgttattagattcagaaaaagcttaccagaaactgagggaagcttgtgaggaatggggttgttttcaggatcatcaatcatggaattcccacacctctaatgtctgaaatgaagactgttgttcgttctctgcttgatctccccgaagagatcaagcagagaaacactgacgtcgtaaccggaagcggttacatggcgccgtctctaatgaatcctctttatgagggtttaggcctctatgattttggttcactagaggcccttaattcattttttgaccaattggatgcctcatcttatctaaaggttttttttttcttttcatttctctttattatataattaaagtttatatatgtgttcattgagaaagaagaacaaaattatatgtgactaagagcattaacatgcacacacatacaccagttcttgttgttatgataggactaaaaatataaggaaaataaaattaatgatctattgttaacaataaaaagaaaagaaaatgggcataaaaacataatttatttctcttacatttgatatatatatgtataaggatcggatgtcataaaatcatctcaaagtttttaatactatgcaattgcattattagttgtaaatcatatttaattgaattggtatgataagtatcatatcttatcccaactttaaatctaacttaatagacaatttagatcttagatttagtacttagtcactcactgtatggttcaataaatcttcatcattattattatttactttatcagagatgtaattgaaaagtacgctaaaggagtacatgagatggccatggacatgggaagaaaattagcaaagagccttggtgtaaaaaaaattgatccacttaaggaatgggtttgccaattcagaataaacaagtacaattttagccctgaatcagtgggatcttcaggggtacaattacacacagattctggtttcttgactgttctacaagaagatgaaaatgttagtggacttgagatcatgaacaaaaatggtgattttgtgcctattgagccatgcccaggaactctattactcaatcttggtgatgttgctaaggcatggagcaatgggagattctgcaatgtgaaacatagagtacaatgcaaagaagcatcaattagagtatcaatagcttcatttcttttgggacccaaaaatggaacagtggaaattcctcaagagcttgtagatgatgaacatcctcgtctctataaacctttcatttatgaagagtacaggagtctcagattatccgagaaattgcatactggtgaagctcttcaattcatagaaacacacaatattgcctagggaacaaaaccaactggtctttcttttttaatatgataagaataagagtttactttaaaatggtgcaagggttagcctaagagttgagttaattgtatgtacctcaattcctaatatgcttaagaattactgtttatatttaaagaaagaaagttaaggccccaaaatgaggttgtgaccaaattgttgagctgtactgtaatgttccctttaccttaatgaaaactaatgtaatatgatgatgattacgttgagtattattactgtaataatgattacatataaaatatactccattatagaagtattataatattgatatattctaatgaaaatatagtaaaaaactgaaaaaatatatattttactaattttcttttaaattaaagaatcatggatattttgagcacacggtcctattccattatattcttacaccaaatcattttattaaaccaaacattgcaataattaattcaaaacatgaatatgaatggtataagtctatatatggtagtagcttttctcccccacaaacaattatttttacctaccttatttactaggagttttatatttaaacaaaaaaaaaaaaatcaatacttttacaactagactacttgatgcggtatcttacacgctgtcaaatatcgtattacagaaagcaattcactaacttgggaaagatagattaaaaagaaagaaaaacaaaaaccctcacttacccttggaaaaaggaaaaaaaggcgaaaaagaaaaatgagaatgaaaaaactatcttacttaggcacaactgcaatgtgcagaaaaagaatctcaaaaacccccaccaacccctcaaaaatccctactcacaacacaaagccgataaccaaccaaccgcaacttaattagctcatcctcgagtttgtttttcccgccagcccttgcatcaagcatcatcatctttaactcgacctctcaactcgaggggggtgaatataatggctgggaagttttttttttttcttttttgcaagtgtatattgaacaaattctcacacagatgttgttgcattcttcttcatcacagcaagccagcaagcatggccccaggatccgataatgctgcaactggactggccggttgagccacttgaggtgttggtggcacttgaggagaaggtgcacgctgagctattggtatgtttactaattgttccttgataaactccttcaacctgcagaggaaaaaggtcagattttttttttacgagattgctaaatagaaagtgtgtcagtgatcgacaacacttatacatactcgaatgtcagtgcagggtctcctgaggcaagtgtcatacgcaactgagtcctatcagctggatctgtttcaattctaacctggattacatcaaaaacaattttgtgtcacgtattccaaaagcttgtgacagatgaaattaatgaagcagaaacttgtcaaaagaagtgctatatcatctattcccgggaaagaaaactatgcagtacagataggcaggattttttcctctaattatacagtattaatttcaaacaaccaaaaacacatgatgacagatattaattcatttcagtcacaattttatgtactcaacagatggtttgtataatcattgatgaagcactaaagaagaaacaagcaaaccgttcttaccaagcaaagcatggcctgtgtactttctgaataatacgttgtgcttgcaacgagattattaggatttggatcctaaaaacagacaatgtaacagtgagtaactctacacaactgaaattccacaaagaagaagaaaaaaaggtaagagagggatatatgtacttacaagccctggacaaaccattagccggaaactattaaataaattggtcatttcctggagagatagtggtctaacgcctctaacctgataaataaaccggggtaaatcatcaaaaatatcatagcctacttcctgagcataatacaatggaaccagcagtggaccctgagaagcagatgtcattaaatgctgaaaacataccacttcttggagcttcaaaggtggccctgaaagtgatctccattgagggaaaaactcttctgcagacaccattataggctgaaagaatttattcaatacgactgggagacgaagctttacattggcctataaaaggaaaattataagataataatcacacataacctagcttccaggtaggcaacaaaaaagattcagaaaatgaggatgttaataccatattgttaccaaacttgtaggagaagtccagaactgctacatccctgcttgggcggagattcacaacttcaagagggcattgtacctatgcagccgaattaaaatacgcgatgacaaagtgacctgtgtgtctatcaaaagccagattatactattgtaaagcatacctgtgccctgggaggaatagtgtctggtactaatgagacctctatctttaaatgggatggaggtaaaattatagcttgaaccgaaacaagtggagtagtattcttgttgcccaagaaaataacaagacggccttgatatagtcgccaatctgctttaataccaatctagaataccataacaacaattagtgaaaaataggcattgtaaaattatgccagcaaaaattatgaggaaaatcttatatcccaaaataaaaataaaaggaatgagtttctaaaatgcaaaaaaagaaaaaagaaaaaaacctgaatatgaggatcttcgtagagaacaccactatccttcaagcacaaagccataaatctttcagcagtatttcctataggctgcaaaaatgaagaaattcttaaatgtcgaagtaacacagaaaagcctaaatccttccaaacaagtatataatgatacagaagaattgtttctggcaaactcttttgacattgatgaagagataagaaacaatagaaacaatatgtcaagtcagactgatgagcacaaacagcgtagcatagatacagttcgttatgggttaataaggaattgtcatataaaaagctggcaaagaaagggatagatgcaagaaaatacaggctaaaatatctacagcaaccaaaaaataagtgcaagcagaagactgataactcggaaccaatacataactcagtaacaaatactggtcctatcaatagtgttattcaatgcacagaaatcatctatgtccacccttgaaaggaaaaatttgcatatttagtagataaacacagtaaccatttacctctacggaattctgaggatcatcaacagggactatggccgaggcatccactacattatcaccttccaacccagggactacattttgccgagattcttcattatccgatggaggagggccttcaatagccaaaggacccaagagatcaccaaggagatcagctgaaggcggttcaggatcaactgtagtcaagactccatttgtctgggacaatccttgatcagctgaactgacatcctgttatgaattcaaagctaaaaatcataatccaattacgtattttgtatatacactatattctgaaattttaatagacgtttacaaaacttccattcgaattctacaaggaagggaatgctacccgttcacagccttaagaaacatgtaatcacaaaagcaaaaaattgcaaaataacaggggaaaaaagagacagtaagaactgaccgcactattgcttgcactgggaacttttacaagagaaagctgaccggtgaatggagttccatttgcaggacgttggtcagttacaaccaaagcagttgacatttgctgctgggcccgcaacttgagagcactttgttcagcagtatcaacttcagtatcctcagccttccttatcaaagatgactaaattttgaagagaaaaaattacatttagtaaaaaaaatcttcaagaggactgtaaccaatattgaatggtcagccaccaaaaaatccataagcttttctcgaaaaaacaaaaactacctgtcgctcagggaacttgggcatttcagacaatatatccattagagccgcacctttcctactcaaggataaatattcagcagctctctgttgtatctcaacatcaatgcagctctcatatctaaaagaaaccagtgggtgtcaacaaggtccctttaaccttacttgatcataatattaaaaataaaagggttaaatgtaattctcacttgctaaatattgcccatatctgactctgtagttctggatctggaggttgagtatgcatcaagatcttagcatatgtggaaagaagaataggtattgtagaagttctgcaataaaagaaaagtgaataagatagtataaaaataataattcagcaactcaaactataaagaaaatggttaagtatccttacgatacagcaggaagcttctcatgtataatgctaaacaattcctttggagtacacccaggccgcctggacaaaaggtggccaaattctcctagaagatatgcacttacctgttacatatttatcaatgcctgttaaacttgagacaatatcattaaaatattattctcctggatattattaaactaaattacataataccaagcaaatacttgaaattttttaatcaatggaaagaatgaccatgacattcgtttttaaattttgtgcacaagcatatgggcaaaaaagtgtaacactgggcatctgtcagcctttccagtaagtactgactgaaaaagtaaagtccctagacctagagcattacatgagttgagattcataaccataaaccttcatataaaagataattagtagcaataaaacaatttcagataatatgattcaaactcttgttgtgtttggttgtgttgtaatacatctacactccttgcacttaactgatggataatcaaatatatacgcaaaataaagtagttgttccgtaactcaaatttatagtagacacactgatcaaaatcaaagtgaacactgttaaaactaatgatactaatatactaatactgtattcagagagagctcttcaaattagatgcacatggtataacttattttatttgcattagcactaataaatacagcatatacaaaccttaaccattgtctcgtgtattgctggcttgtcaagatactctctggcttttattgctgcatatgactgatcaaataaactaagttaatagtcctgtaatcaacacatatactatcaaaagaagaaacactttaaatcacctgtaggtcttcattgtttgtaacaaattgcacaactcgaaaccaaatatcatcactcacaaaatctccagccttgtcaatcaattgaaggatcacatcaacatacctaggtcacatataaagggaataatgtcagtgtgcaaagtcttaaattataagttgaagctctccatcttgacagcaagttttacaaacacatcatgctcaccatgaaagatcaggggcaaacttttctgcaagaatagcagctttaagggacaattcctcacgcattgcaaattctgctgtactgagatactagaaacaaacgaaagtcattggcatcttaatatttgaatcaagattatattatcttagaaaactactgttgcatggaaacaaaggacaagcgataatacaataattgttgagcaatagtgtacctgcaataattcttccactatgtccttcgcatttgacacatcacacataccatatagcaagtccagggctcgcctacgaatactgagtatagaatttgacatcagttagcataaacttgtttccataagcggacactgagttatccaataaactaaaaccacttcaatagattggtaataattattcagattgtcatcctctagaggctaaaaccctcatcctcctattcttccacacttaccatactagcaaacgaagtataggaaaaaatagaaaaagaatcagtaacaagtaggtagttatatctaacaagtagtggacagtgaaataacctgatgtcaggatctttcaatgaggtgataatctgagcttggtgtcttttaataatttcttgcacgtctgtcaccatcaacatacgtgtcatattctcctacattagagcattgaaaagcaagttacacaccatcaagcaacaaaaacaaccacttgtatgttcagtctagagtctagctgatataactttcagctcacaaaattcaattacagtgtaccttggccaaacaagttattaaggaaaaaaccgaagaaagtaaagcggagga

SEQ ID NO: 297207 - DNA, 5699 bp, Cannabis indica
cgcctaaggtagttagggtgttacaggttaaatgggaaaaatggccagatctcagcaaccagtagcatggggggctgaccaggtatctatggttcaaaaacacccccattatacaaccaatggctggccaaccatcaatagagcacacctggctggccagagtacaaaatttcctccataacgggagcaaggtgcctagaggtcaatcttgaaccaacaaggaccgagagcgggtggaaacacccaaaatggaaattcaagaagtgaaaccaatcacttttgacattttaatccccaaaactccaataattttcgtgatctaccccttatcaaaacataaccaacaccagttaatcgcgaagtcacaggcaactagaccctgttctttacaagtctggctggccatggaggagcaataggcggccagaacatgccaaatataggtctagccagccccgtaccttagaatggatggccatggtctacaattcaccataggtctggcccaacttcaccataccctctctaagggtataaccggtcagtacttatctctttaacatctgttgcctccctattgttggaggaattttgaaaacaccaattaaaatattataattgaaatatggacaagattatgcgattgctctaccccaaatggccagtattcaaactatggacacagagatgtactgtaaatataaataacacaaagagaatataggggttcaatcagatcacagtcttcttagtccactattgcaagggttttttgtcttgttcatttcatgttggatcactcctttatatacaaagcaagtgtcctttgattccacagatattgatttaattatcaatccttttgtacattgaatataaacatttaatccaattaaaacataaatacaataaatgaagaacagtttcggctcaatttactaattacagcaacgtgtgcgacctttatggtacgggttttcttttcatgtccttgcataagctcgtaggctcaaaattcatacaacactaatcgagtctaggatgtatgcgtcctattcaagtcccatatacggacatcctataacaggtcgataacataggaaatgcgagtccttattgtattatcaaggatgtttggtcatctagaccagctcgctgagtagagaatcgatctttactacttcgtaggaagacctgtatagttcttgcatatatctcagtatatgcaagtcttaaacttgatcttcggttctgcatcgtgcgagacataagaatgcgactagactctatcaaggtcacatcatccggctgagtctggttcaggcgacgtttacactcaagtggtctcctactgacatctcagccctcctcgagcagagtgagtccacgtgtcatttttatgggagcttggtctcaagtttctaggtgaaaaattctcactataacgcattcccctagtttcgcgattgacagctgtgtcacgagggaaactataagtgagagggatgtgaaaggttgtcacaagatggtgacctttgtttgtctaattgagggtttcaaaaacacggctgtaatcattattattaatccatttggggtgccacatcatcaaaaactctttggagtccttgtaggcgtggttatggataaccgttggttgtgagaccttaggcattcccttgccatgtgtctccatcccaataaatgagggataatggtatttaaattccctgatacaaaatgatcctttatcattttcatttttctcctcttcttcctctgaattttgaattcccgaaaattttcctttgcatttttcctaacttttccttgttagaagaaaagttgaaagtccttgatatctatagaatcgttcaaagaagatgtgcatttcaatgttagtgaaaaaatttctgcaactgcttccttttcttttgagagttaatctatgcttttagaggtagaaaatgcatgagatgagaggatatatgtatggaaatttatttgccctttgaaaaaatatgcatttctctgtgaaatatatacctaaaacttgaatgatcacgggttgcaggaagaacaccttgagtatttgcacatttctcattgagtatttcgaatactcgcgagtttgttaatgaacatctcgaatactcgcgtgcagttctgaatatccagaaatgacttaattaatttgttccctacctattttaacccctattagaatttaattattcttagagtttattttctagccttcaggttatatgtgcttttgttattaaaactttctcagtcttttaaatggtgggtgtgccacagtaacttaatggtcatgcaaaccttttcatgttccttgggtcactgtgaaacacccagccatttgagacatgcggcccagttttcacttttcttgttttgtagtcacatattatgactaaccaagttcttcgaaatggtggggtggcccattaactcaatgttcatgcgaggaatgcatgtcccttgggatactgggatactccgacccctttcttaaggtacacaattagttgtgaatgtgtgacttatcctttgcgaggatttactaaattctcaaaatggtgggggtgtctcattaccttaattctcatgtagcgacatgatcattatgttactgagatactccaagccatttctagagatgtctggccaatcctttatattttttgagttttatgcgagtgagggcactttattattctcgcactttcacaacattgaaaagatcttctatcttttagatgagcgacctatcgaatagctagatgctcgactttggaggtggggcttttactcatgagctgcaaaggagcaacacctacatacccacctcaatttcttaggacaaaggccctgttgctagggctcgtcactactcgccatctaccaacaacatagatcacatggtttaggaacacgctgaactagtgacggttgaaatttacgacagggaatccacggtgtcagcccaggattatctcattcattcgaggcatgcccttaatatcaaggttgaagaaatgggggaagacttcgaggtacctgaccacgactttgaggaagggggagatgctgatggaagtgagacggattcagttgaaaacactcaactgaatgaaccattttcatgcaaggatctggtctcgtgagtcaaaaaatcaaacctacatacgtttgcggagctaaatttgattcatatagggactttacgtccttcaacatctcagtggcctcaccttccatttactaaccctgagatcatccctacgcaagacatggtggtctcgatttccattatgcaatgtggggtaacactgccttttcatctgtttgtaaaagctatcctcagacattacaatgtctcccgttttcaactaactccaaatagttattgcctaattcttgggttttatgtgatgtacatggaatatgtccatggaaagccaacgatggaggactttagctatttctacgatataataagtgttggccatgaaaatggcttttattatttttgcaaatggggcaactctgagattaatggggtagaaggtacggtttctaatatgggagattggaaattgaaattgttctactcgtttaaagtaccaggagttaggaccgacttcaatcgtcaaactagtatgtcgtgtatcctaatacttaatgtatatttttatcaccttgttcagtcaccctgtactggattctactcgtagggagattgctgaagttttaggtagcctgcttattcaagattgcgattggcggctgttgtgaaccactacaaaattgcgagaacataagctcatacctgagaacgccagccttcagtgaaaacaagtagacaaggagccttctaagaaactaaaggaaagaatagacaagcgtctatctaaacaaacatcaacactaacattaggtaatgcatcgaacatatgcatgttcttttatactatataaaaaatattcctatctcatggtcttctcacagaaatgacattcttgaagcaagctcccattctcattcgaaagcctaaggtggcaactacaacaacttctcctatcatcccacaaaagaggaaaagcaatgatgtccctacgccagtggctgacttgtcaaagaagcagcacaaatctgcccaagataaggggaagaatgtcatgatcgatcctgctgttagggcccacaacatcatagctcttcaagacaaattcgttacggatgagttcgtttcaaaaattgagggggttcctgctaaggacttctttccacgctctacagaattggcctcgcaatctatgactatgttctcgagggattttgtcgcaggttctaaagagctcgaccttctgaggaagcagaacatgcttcttcaagacggcatgaagaagctgaagctggatgtgacctcgaaggacaaagacatcgaggatcttgtgaaggctaaggagcaggcggaggaaaatgtcaaactcttggaatcatgagttgacgaactcactcgcgaccttgagaatgagaaggagaacgaaaaaaacaatattatcaggctgtctctgattatatttacacgaccttgtcaggctgccttactttgactttgaaattcttggagtggaggcggctgaaattgctgatgcatttcgtgctatgtcgcaaactaagaccccaggccttgggggaaatcttttccttgaggatgccaagaacctgaatgcggaggaagtcgcaaatggcactgtaaacaagatcgcagatgatcccaacactcaagcttcctaatttttataaatttctttttgccattgttaaagttttatctcttttgttagcggtacacaggtactcgtgctttgtactttgaacaaagtatctttcttttgtcatcgaacaacatatcttttcgaagatattttactttttcatacttatttagcggtacacaggtacttacattatttaagctgcaattttaattattgcttttgttttttctcgcaatactctttgtcaatattatcacagcttagagtgataacttagaatgtcaaaacttgtgaaaaagaaataaaaaattctaaaaactttgaatatttcattaatataatcaatagtacaatattagattataccccctatacttagtacatttactgaaataaattgactaaatataaatacatgcgagttttattgacggtaatactttaagctttctccattccaagctcttttaattgttgtaccatcgagatcagataatcggtaagttgcactaccaattttttcagtgattgcgtacggtccttcccatttatcgttgaattctccatgtgccgagttacgcgtgttaagcaaaactttgcacaccactagatctcttactcgcaggtttcattctttgaccttcaagttgatttagcgacatgttcgctgttgataggctccgtttttcaaatgagcctgatcacgtttctcttctagaaaattgaattgtaacaactaacgttctatatagttgtcgatgttgaagacatctctccttaatgattctgctccaacctcgactagtaccatggcttcgcacccataagaaagcgagaagggggtttcaccagtcgttgagcgatgagttgtattatatgaccataga

SEQ ID NO: 297208 - DNA, 2471 bp, Cannabis indica
aaagttaattaacgactctcgttcctccgcatcagagccgtggattcgcaattcgacgtgttgtcgtttaagctttattgtcgtttgaattgcaaatgaactatcataactccgacagcagtggtactggtcagtttcaatgcttaacttattctctattctttcctcttccattacaattacaggcaagtgaaggaattggggtcttcctcgtttacgggttaattttattattttgttattttttgggcttgatttcggtccttgggttatttatgttaaatgtagtagagtgttatcttggtgtatcgagtgtatttggggagaattaggttttgttgatgattttaatttagccctttggttttctgtgaatggattagggtttcggggggtaattcgaatttagggttttgcttaaatatttggggttcttcgtgggtttttattgatgtccggtttcttagcaaaaagaaagttgattgcttttcgcttttgcttagatattgtgcaaaagaatggagacgaggttaagaaattttacattttttaactttctgtaggcaaaaacgtgcattccctttatttttattcaacataactgcgagtggtttaggaactctgatatgaaaactattgattcgaatttaagaccagtttcgtgaaatagaaagaggaggcaggtattgcacaacttagttcatgttatctgtacatttagattatcataattcagtgatgcgggtcaacctgctttaatggtcatgtagccaaatttaaacaggatatagtatgtttcttttaatattcgaattcaaatgtttataaatgttattagagattatctgcagctgaaatgttttgcaggaccataatatgcttgggaaatttttttgtaggctatgtttggtgggaaggaaggagaggtacataacttagggaaggagagtgggagagtaagcagattaatcttctctgttgtgcttagtatgagaggaagaagagaatctatccaattatagagtgatttggaatatccaaataaggttttaaatccattacccaatcccgtttctccttaaatcattcccacaaaataaacaccgtgcttcacttttgctccttaatcccttaccctcctatcaatggctttcttgcccaccatatcaagtttagtttattagtgtattacatataaatttataatgtgaatatcatttaagtgcacatttgtttaccttggtattgctattacaagctgtaacgtaggctaaagattttcttcactttagttagataaatactgatttattgtatacataaatgatttactatccaaaaggtagcacaaatctcatgtattggtgctcgtgccctgctattgttgggacacttgtttcttgtgatcaagtatttcttgatatcaaataactgcaggtactgatgatgatattcctccatctcatcaaaacagagttccaagagggagtagagttgcggggaatgaaaggtctgctgtaggttctatatcgtaccctagaatgtatgctgacatggagacacaaattcataatcttgagcaggaagcctattgtgcagtcctacgtgcttttgtagctcagtctgacgcacttacttgggtattattttgtttttctttcaacattcatgtatattggctatctttgtgccttgttattttctgagtcagctttaaattcttgattgcatgactgttcttcaggagaaagaaggtttgataacagaacttaggaaagagttgagagtatcagatgatgaacacagagaactacttacgagggttaatgcagatgacattgttagtaagataaggtaggtagtgcctctcttgatacgattgcattagtaggaggtgatgtttaatttgcagaatttattgtctatgttgttttatttaccttgtttggtctgtggcattagggaatggagaaaatcgggaggaaatcaatcagtgagactcaaccaatcacagtctgtttatgatgttttacctagccctactgttttgacatctcgcaagaaacagagaatatctcaaacggtaaacatccatagtgaaatttaggagtcacaaaaaaattgaatcagttcatttataaacacaaatgtagtcttaagaaagattgttgactgatattgatgctgtctctttccttgagcagggtcaccaattccctggtctatcctcaatgaaatccatccacaccccttctacgggacttgtttcgaataggtcatttctgagtcgcagttcttctggtgtccgtgccacaaatgagcctgctgaagctgcaaattttgattcattgattgggaggagagtatggactaggtggcctgaggacaatagcttttatgaggctgtcataactgattataatgatgtggaggttttttatgtgtttctgtttcaatatgttcttttaaaa

SEQ ID NO: 297209 - DNA, 1414 bp, Cannabis indica
tttttttttatttttgaactttaaaatagtttttttttatgtatttttacgaaaatttacataaaaattccataaaaattaacggagcaacctaaatcgcaatcaaaatctacatagcaagccacgtagaaaccactgaagaaaccacccgcacaactcaaaccgtaaatttgaaaaaaaaagttaaaagataatatataaaataattttcctattatttattcataatcatgtcataccggaaaagaagggacatagtgttagatcagtaatagagagatgattgatgagcgttatatatatagaaattttatttatttatataaataaaaagcagatgtgtatgtagctgatttagaagggtgtggctgtgttgagttcaaatccttggttaataaaagctcctgtaacccaaagcttcaaatttggcaaattcatgggttcccgttgatcatgacattctttattaataagtacctgtttcaggccaacatatgaaattgtatattaattcattaactatacataatgaaataataaattgattatttagatgattaattaggtacgtacgttcaaagtaaatgtgagtacaaaagtatctgaaacagtggccaagttggagctcttaatattgaagtttgtaagggattcaagagctttgtaaagtgatatagctgccttttctcccttactgcacactactttcacgtagaatcctttctcttcaacttgaaacatgtccatctgcaatgcccaagtacaccacatcatcatttatatagttataacatatgtctaagatcaatatatgcaattcagaattatatttatgggtcgttttgcaatgttgataaactatatgtagtcatgtataaagtatacctgagttatgatcttcattttggcaagagaattgttagttttgacatctttgatggtgtttgatttgtttgttgttgaccctgtttgatatctttctacttcttctaaggaagcttcaagactggcaatctcagcttttagcttcttcgactgagtttgcaggtcctgtacgtaaagtactgcatctccaactatggacgccttatccatctgcattaatatataaacatttattttatattatatatttattcatatagagtgtactctactctattcagtattctctacatgatggttttgtttaaaacaaaaagaaactagttatcagctatatatacatcgtatagagataataacaaaatatttgtcatccaaatatattattaattagttgcacaatcaataaatggacaagtttcatttttaataaggtaaatagtggcataagtactcaaagttttgaatttataagcgacataaactcaatgatttttttgagtgtcataagtaccaaatgtttataaaa

SEQ ID NO: 297210 - DNA, 798 bp, Cannabis indica
ttttgttttttgaaaaacaaaatgtatagctactttcttctcttaattttaaaaacaaaaagacataagtgtgctatatatatttatttaagtgacgaataagataattgggtgagagaaagtggttcgggttagcactagggtctagggtcgggttagaatggagaaaggaagtccacatcagatatcaaattaaatgatggatcataaaagatagtattttctacgcgacattaaattccaaagacagggttggaaccctcttcacgggaagctagtagtaaaaaaaaccagttttcccagaattcatgggtagatttcacagtgctagtcggacaaagcggtatcctgtatcttttttcaaaacgatagaaataaattttgcacatattcttctacatggggtttgactttacttggtaaacgtataggatctcttctgggggacggaacctctaccttttttgctttactgaggacgaaccatccagcttatagacttgggggagtagttggaatggggcaacacctactttcgcacagaagcatgcaaagtagctcctaagtggaagatgggctcccatcttcgtatgagcccaactccgtatgctgaagtttttcgcacaacgacatggagattctcctaaaaccaaaagcctattcaagaacaagccagggatacatctgagacctcgatcatcttcatgcaagtagagagcctcataatttttgatcttgttagtgtactagtccactattggaaattattttaccaggatctatttactatcatgtatg

SEQ ID NO: 297211 - DNA, 4502 bp, Cannabis indica
gttttggtgtagagatgttatgtctatttataggctttgaaagttgtggtagttggattggaattgaaggccaactaacttaactgacatttaagtacagagggatgctgtagaatatttctattaactggttttgtgagctaattctcaacataaacaactaaattagtaaaacaaaccagtaatgaatgtatgattcaagttttatcttgaatgcttagtaggttcagatattgatgaaacttgtctctgcaaacacactttgtgaatatgtctgcagggttgtcacgagtacatatcttcctcacttgaacctactttgagagaactacatctccgatgaagtgtaatttgatatcaatgtactttgaccttttatgaaatatgggatttttcatgaggtacaaagcatttgattatcacaatgagctaatatgtcttctgaattgaaccccaactcactgctcaaaccctttagccatagtgcctccttgatgacttcatttgcagtcatatactcagcctctatagaggataggaccacaattttatgtaggttagatttccaactaacacaccctcctagaactgtaaaaacataccatgtacaactccttgtgtcaatgttggatgtcaaatctgagtcaacaaagccaataacttcttctttgtgttggctttcattgttgaacatcagaccagtgttcaaagttcctttgatgtacctcatgatccacttcaaagcttcccaatgttcggatcttggatctgagatatatctgctaaccacactcatggcatgaactagattaggtctagtgcatagcattgagtacatcaagcttcccatacaacttgtataaggtattttactcatcttgtacctctctacttcagtggttagggactgggatgcagtgagcatgaaatgttgtgcaagtggagtggaaacttccttgcatttgttcatgccaaattttcacaacatcttctataagtaacctttatgagacaaggttattatgtttggtttgggccttttgatgtcaattctaagaattctcttggcagcctctggtctttcatctcaaactcattactcagtctcaccttcagcttatttctttttgatctttcttttccaatgatcaaaataccatctacataaatatgattgttgaaataaacacatcaatcatgatcacttttgttgaatccaattttgatcatatgatagtaaaatctcatgttccattgccttggagcttgctttaggccatatagtgatttcttgagcatgcacacctcatctggatttccactctcaaaccctttaggtaattccatgtacaccttttgttctagttcctcatgtaagaaagcagttcttacatccatttggtctattaccaaatcaaacttttgcaaccttagccaccattgcccttattgaagtttgcttgaccattggttaacaaatttcattgaaatccacgccttctttatgtgaaaatcccttggcaactagtcttgccttgtaccttgctccctcaattccaagaatgccttccttttgtctgaaaatccatttgtaggatatcaacttctatccatctggtctcttaacccttccatgtcttgttctttaacaaggaaactttctcttcttctattgcttgcagccatgctgcaacattttttccacttatttttttttttttgtatagcatgttggctctgagctattaatgtctttagtagcagctagtgcataagtaataaaatcagcatagccaaatcttgttgggggtctgatctccctcctttctctgtctctagctaactgatagttgttgaggatgtcttgtgcctcatcttcctcatcactgtcttatgtctcaaaattccttctttggcacaaaatagtttgaatcatctaaacagaattcaagcccattgtctattcttagaactctgagcttgttccctgtttgattctccaacagcttcctccattctagaaaagtgttgacagcttggttcttatttttcaacagatgcacccataccttccctctaaaatcatcctctatgctcatgaaatagtaggctccacccataatgggaattctagatggaccacatagatataagtgaacatatgctagtctttttgtggtagtatgttctcctttgctaaatttaatcctacaggccttccctaagacacattccttacaaaattctagattttgtttctacttatccttgaacaacccctgtttgttaagttcttcaagccctctttagcttgcatgagctaatcttaagtgccatagtcttgtttgatttgcacttactgtgttaatagctggtgcaacagatccaactactgtgtctccatccaagaagtacaaaccaatactcgattttccttgcatcaagacctgtgacccttgtcttattctcatcacaccatcatccacatatactttgtatccaagtttgtaaacatgcctatggataacaaatttctcttaagttctaggacaaatcaggcctggtgtagggttctgatttgtccaccatgagccttaatcctgacagtaccaatccctttgatgatgcacattttgttgttgcctagtaacacagtactattgtgttcttctgtaagagaactcaacaaattcttatttggtgtcatatgaaatgagcaccctaaattcatgatccattttctacctgagtgtctgaactggatgcaataagaactcctgtagattcataaccatgtgcaacatcaacctcaccttggttcttgttcttgccttgattgttgtctcttctcaacttagctttcaataccaaacattcatctctgaagttcccttctttcttgcagtaataatatttttttcctgagtttcctttggaatttgaacccctgtagagttcctagtgtttggcttagattgattacttatgtacccatttgaatttttgtttcccttgtattctttcttgtggtactttcctttgataatcaataatccttctccattgctctcccctctttcatcacccttcttttaaatctttttggagttgagagctgccttcacttctgtcatggtaagagtatctttgccatatagaattgtgtccacaaaatgctcatacatctttagcaaagagctgagcaatatgattgcttggtcttcatcctcaatcttgactccaagattattgagatcaaggatgattcttttaaactcatgaagatgttttttgagttctctggtttcatccatccgaagtgtgtatagacttttcttgacatacaacttgtttactagagacttcttcatgtagattgatgacaactttttccacatatcaatttccttttcaacattagaaacctctctcaacacttcatcatcaagacttacaagaataatactgtgtgcctttgtcttatcttagttttcttcttcttgtcctctatgagattcatcatagcttcattatctaatgcctctgagatccctgaatgaaccaaaaaagatttcatctttattctccacaagttaaagtcattcgagccattgaatttgtccacctcaaattttatagtagccatacaaacttggttcttggaagttgaatctaattcttgaaagtttgactgtagtttttgaagactttgaaagcagatgttgaagccttcaactagaacctgtgctctgataccatttgatgtgaattagattcacattaaactagttgttatgattaataacagctcataagaataaaaaattcaaactttagatcagaattaaaactttaaaccagaaaatgaataaaaacagaggagcttgtttgaaaatgcaatggcagcaagaatgaattctttactgattattagcacattacaaccagagttcttggaactcttttacactcatcaatggtgcatcaaaccagttacaatagccttacctggggtacccttgatcagatacacaaggaacccgtacaacccccctttactcacactagttctacgacagaaattacaattaggagaagagagaaagggagagagaaactaaacatggtgctgagatcgttttggtgtagagctgttatgtctatttataggctttgagagtgatgatagttgaattggaattggaggctaactaacttaattgtcatttaagtacggtagtagattgaaagctgaaaaagggatgctgtaatattttgctattaattggttttgtgagctaattatcaacaaaattatgtgtggaaaaattacgactaatagtgcagaatcaaatcaatgaaacttaaacaatcaaacaattagcgaaaacacaattaacaaatcaaggacaataatcgtataaaaacataagcaaacagagtagataaaacaagaaacaatatatacaaaaaaaaaataagaaatcaataccaaaatatac

SEQ ID NO: 297212 - DNA, 2217 bp, Cannabis indica
aattgaacttggaattgaatcccaatatattaccccgagcactccacaacaaaatggagttacagagagaagaaatcacacacttttggaatggttaagtctatgctaatctattcaactctgtcaatgtccttctggggatatgctgttcagatggcaaacgatattttaaatattgttccatcaaaaccagtcctcaagacacctgtagaactatggaatggtcgtaaacctagtttactctattgttatagtgtgaatttttgcctagaaactcaagaccaggctcccataagagtgacatgtggactcacatccctagaggattgctgagctttcaagaaaggactcctcgagaataaacctcgcttgaactaaactcgcaagatgatgtgaccatgacagactctagtcacattattacgcttcgtagtataaaataagtaggaccaagagggattatacaggttgcgcctatccctagatacatgcgatgattaagtagccttcttctgcgacctagtaaagattgcttctttaaataatgaattagtccgaatgacacggcgtactcgatgactcaataaggactcgcatttcctatgttatcaatgcatatgaggtgtccatatatgtgagtcatttagaatgcaaataccttaacacaaggcccgttagccctctttagaatgataaaacacaacttaaacctgtgagcttgtgcgagaatatgaacaggtaactctcaccatagaagttgcatacgttgctgcacttattcaaatggatttaaactgttcttcatctattcttttatgttttatcataatttaatgttaatatttattgtaaaacagttctatgaccgaggacacttgctttgtatataaatgagtgatccaacatgaataagactaagatagaaatattttacaatagtggactaagcagactatgatctgactgaaccactatatatctttatgttcattatttttactactttctctattgtctgggcagtcttgctcgaatactcgctgttttaagtcgagtttgctactttctattaaatatttattatttattttctatttggtgttgtccaaattcctccaacaacattttgcgttgtttttgagaacttttctcttttttgtttgaggagaatcaacatggctgcgaactagataaacaaaaacagcaccactggatctttcaatgttggaacaatgaatgtcccactcccaggtgatggaactaatccaactgatagaatcattggaggtgtgggatagaccaatgtcacccctctcaatctgttcctagaaactactggtcacgttggggaaacatcgatatagcagccactgtgggccacttcccgcctatcacaccagccatagtcttcgaaggtgttatccagcttacgacagcacaatacatagccatgcaggaacaaatgcaagcattgcaggctgaggtcgatggaagagtcaggactcgacgtccacctcgagtcctaaatatgcgttcaggaaatcctcaggtaaccaccacaactagatgacaaaatgagtgtcctaataataatcgtactcatagggaatgtgtgaacgaacaaggaggtctcaatttgaattagcctacacataattctacgccaaatagggaaccagttgcatctgatcctagtcaagaaaatgtaggaagagaagagagaccgtaggaggaagaccctaaacggagaaacccacaaagtcgggcccaagtgcgagtaggggtaaatgaagttgaatctcattcttcttctactaatagtcgttctcctagtatttataccaggtcaaagtccgttgagactcaacaaggaggtaggtaccatgtacatagaggcgatcttcctaatcatctcaatgagatttttaaagtgcgatctcagacatcaaggaatcgcaatgacaacgagccccatgatacccaagtgggcgatcaaggcatgcagaatgtgagtaacccgactaatccagtcaacctgccaatctcacccgctgcagccatagaagtaatgatgcctaccaacatagtcgcagttagtgctgtaccagcagtaacatagaccaatcccatgttgccaaaaggtattgaccaggagagcctcttgcgagcattaatgtaatgccctaatgctaaggcacgctatagtaattttttaat

SEQ ID NO: 297213 - DNA, 5198 bp, Cannabis indica
gatgctcttctcattagggaaggacccatgtgcgagtttgccattcctggtgcccagaacaccacagttctcgtcgttgggcccacttctcgcattggacgccttgtagtccgtaagctcatgctcagaggctactctgtcaaggtttctcaattaccctttttgttgtttgttcttttggtctttgatgattgattttagaattatgtgctgaagtgattttgatgatgagtaataatcaattcaaataataaataaactcattcgaaatccaataacaaagaacaaaattctagggataactatgatttgtcaattttgagtattcatttcaaatatttttctaacattgtgtataggccctggtgagaaaggcagatgaacaagtggtggacatgcttcctaggtcggttgagattgttgttggggacgtaggtgatccctccacactagtggatgctgtcgaaggctgcagcaagatcatctactgtgctactgctcgctctgccatcactggagacctctttagggtcgatcagcgtggagtttacaaccttagtaaagcgtttcaggtactcgttcttgcccacatttcttttcatgggtttgtttcagtattactttaccaatttggttttaaaaatttcttacatttattcaggactataacaataagcttgctcagctaagagctggcaaaagcagcaaaagtaagctctgccttgccaagttcaagtccgaagattcattggttgggtgggaagctcgtcagggcacctatttccaggatgttgttgcttctaagtatgatggtggaatggatgctaagtttgagtttacagagactggagaagctgtcttctcaggttaaaaattgattatataactgaggccatgtttactttgatcaatcattcatgtttattttgaagcaactaaaataatttttgtttaatttgatattccttattcaggttatgttttcagtcgaggaggctatgtagagctgacgaaaaggctttcacttcctctaggtcggactcttgacaggtatgtaatgtatagcattgttcacattctctattgtgttcttactttttgccttagccattaggtgttaagtatataaattgtctttgatttataggtatgaaggtctggttctctctgttggtgggaatggaaaatcttacgttttaattcttgaggctggtcccttagcagatacatctcaaagtaaattgtattttgcacgatttgccacaaaagtaggattttgtagggtaaggtgttgtttcttttatgccaccaaattcttctattttttcttctgttggtatgtttggttggtcatgaccacaattttgataattctatcatccctaaaattggcaggtgagggtacccttttcatcctttcgccctgtgaaaccggatgatccaccactagatccatttcttatacatacattaaccatacgttttgaacccagaaagcaggtttgtactttgttctgagattatggagttgccatgctgcctacttgagagtacatttacatacttaaattgaatgaatgaaaatgaacatatttagcataatctttggaattgtttttcagttctatcaaatatttaagagaaagcagtaatctcatcattttaacttccttggcatgcctttattctctctgagaatacacaaaattacacgtttacatgtcctcaaattttgacaaaagacatttctttttctttttgaaagaaaattaagattatgtttccaattccaacatatttgtataaattaaccttagcatttatttattttttcagcatgacacatgtttagtaattgattgaggttgaaactacttattcaccactgtggaaactaaaagtagaaacattttatgatttcagctgattctctttaatattcttctacagaaacctgcagaagggcctgcagcaggagttaagcaagaccctagaagctttaagcttatattggaatacataaaagctttacctgtaagcacattatgtgttttcttcctaatcatttcattgatgagtgttctgtattggatgttatatatgttttggtttctcatttttttgacaacatgctaaaactactactctacagccctacttgtaaatcaaattaattactttgtcagaagggcatcaggagcaatatgtactatttgttcttcattttttttctcctttcaattaaaccacgtgtttcagtgaagtatgtatgttctcctcaattttaataatttttttaaggtattttgattttctgcagactgggcaagaaacggactttatcctagtttcatgtactggatcaggattagaccctaccagaagggagcaggttcttaaagccaagagggtgagctttttgatttttgttaaaacttactatgcaaactatttccttacacttacaaaatttagtgacatataacttacaaaagttgtcctcgtataatgtttttctttttctctcaatgtttataggctggagaagattcattgagaaaatcaggacttggatatacaattattcgtcctggaccccttaaggtagttacatagactactttgctcattaactgctttcttaatgaagcatagttacatagacaagcatacaaatgtttagatatggctcattgagagcataaaactcattttttttttttggtaaaatgcaggaagaacccggtggccaacgtgcactcatatttgatcaaggaaacaggatttcacaagtaagagtcatcttgtgtttgttttttcatctgattataaaacttctagctctaaccaacactgtacacactaatttagcattattgaagttcaaatcttaaacatcttttctcaatataatcagggaatcagctgcgcggatgtagctgatatttgtgtgaaggcattgcatgattccactgcacggaacaagagctttgatgtgagcaaaactaagttttttttttcagtttctttatgttaataaatcgggtttcggtaagcatagtctagtcctcttaatggatattcgtattgtactcattgcaggtatgctatgaatatgttgctgagcaggggaagggactctatgagctggtgagtggacaatactcagcaccttttccaatatcattaaaaagatctctctcaaattttatgtctttctaattttgttattcaaaatgcaggttgcacatttgcctgacaaagccaataactatttgactccagcactatctgttttagagaagaacacatgatcctccagggcgaagccattttttcctatttgtatagagaagcatacaatgctttacttttttttttttaccattttttcttctctttctacctacatatctttactgcccccagatacatgttggtttataatagcacttgtaatgccttttatttctgtaaattcaaatgtagatggattacatataatatattttatttatggacaagtgtatatgaataaaaaaagcagagttacaatattttatgattatatttccttaaaatcagtccctcattgcattctcaagtgattaagaaagcaatgaatgtgaaagtatatgagagaaagtaaaataatatgcacaaatagctgtatcaatgagattcattccattaaacctatacatttgtgatatggctaattaacagagagaactcttttgacatttgctcagctgtattatacaaataatccttattttgtcctaatgtttctaatatttgtatatgtaacgtaaggtgaagactaaggacacgtacatgaattgttagacgcagtcctcttgacttgtgaacaagaaaaaataaaaaagagtaccttttggggaccacttggtaaagagataaggggaaaatggctgttcctagagaaagggtctttctctctttgctggtgactttgattaaaacaggattgaatatccataagataaagagcaacgggaaaagaaagaaatgctaattcatggccctacaactactattgctgctgctccaaatctctacttcagaagagcttcctcactagtattcagaagagtgagctgcatcaacaagagcatcatcatcaacatcagcagcagcagcagcagcaaatgcaatagcagcagcatactcaaaagcattaagtcaagctttgttgcagttgcagctgcagccttggtggcatcatcattatcatcagctgcagccggggccgaggctcctcctgaggccgagacactagagaacataccgcagctgctgtctggggagtgtgtgttgcccaatgattgcaagaaaccaagaattcaaaagccgaaatcgaggaaagcagagtcctgcaccatcaagtgtgtcactacctgcattagaggtggagaaggatctccaggagaaggccctttcaatgttaggaggtatcagttcttcaatctcttgtcgtttccttacatattcatgtcgttcgttgtgattaatctatgttgtaagagaagagatcaaagctttttggtatgactgaaaaaagaaagacaataatcaatcaaaccttattgatttaatcttatttacagacctttggttgtattcaaggaaggatttcgaagccgtcgttattggtacatttttcctcttaatatacttgacaatttatatgtcttttgattttcaatttaggctatgtttggaagttaattttgatggggaaagaagtaagtgtagaaaaaaaaatcatagtaaaaactttgttgaaccaactttttatttttgtgcaattctttttatatcaagcatgagaatttttttttaattttaattttttatattattttcttcaacattttctttgtttctttcttctaaatagtcttagcaaaaaaaaaaaaaaaaaactttagggattaaggtctagtggcgagaattgtattagacattcttgcttgattcgaattctcccagactcaacagcttgggactactaggaggtctcttggttgacaactacgattatagcaactaacggagtaacttaaatcgcaattaaaatccgtatagtaattcacatagaaactattggagaaaccaccgaaacaactcaaaccgtaaattttaaaaaaaaattaaaaaataatatatggaat

SEQ ID NO: 297214 - DNA, 2888 bp, Cannabis indica
taaacaactgctaatttccaaattaactaagcgggctttacataaataattaaatttaactctgatttattaataaatagaattaagtaaagagcattgtcatcgaacatcagaagtgtctaacactcttaaaacgtgttgctttacgattagctagcgatactccctaaaaactattatattaaattatatgaaattcgatacttaattagaccaatagtcatatagagtacttggcaccattggtgccttttagcatttctcttaagtaaattattacatgacaatctcttataagttcaggtcacaaatttttattttttaaacattaatttaaatataccaataagaaaatatcaatttacatttactacaattttaaaaatataatttagtagtattatcactaaaaattaaatttaaatatttatttacaaccaaaaattaaatttaattaaatatttataccacaaattacttttattattttattggcaatgagtgaagatagtgagtgagcacaaaacaaacaattatgtaccgaccaaaatttgtaatggaaaaaacaataatagagtagagaggcgattttggaaaacacttattattattattatttttaaactactattattattagtaatagtatatgaattggtatgatgactacaatttgatccattcagagccatcgatgaagctaagtgtaataaaaggcttggcttcttcctcggtgagctctcttgaccatgccactcttcctgcataccctgctcctggtcctgtgcacttgtattgcccataaaacacagtcctgtaatattaatatttatattcaaattacaaattcaaaaactgccaaacatatcaaattaaatgaccaaatcttcatggtggaaaagaaaaaagagttaggtagcttattgtggctggcttttgtagatagagccaccgttttttaattaaaaaaaaataaaaagaagaaggttcgagttatcttaggttaggtggacacataggatttgagggtttttatatggtgttttatggtgcattacacgtagtttttggagtagaaaaatgggtaaaaggacattttgtgtagtctgtcatggttaggtcatgactccatccatgtaataataaaccgcccatttttttttatgagtgtatcaaaatgcccaattgccttactttataaatgtataacttactttcagtgagtttcagccaaaaaatattactaatattaaagaataatactatctcaacaataacaacaagagtataatgacactacttcttttatcttaattatatactaattccctttttgatattgaactccaatcaatctaaggtgtagacaatagagtatagtagaacactagaacaagtaataaaggtatagctatatatagagtatacttacatttcacgactagggtcaccccaattataccagcccttgggaatgataatgttgtccatatatgtataagcaaagacaacagtagagaaaggaccccatgctctcccaaggtagagagctcctgagcccgtgaccctacagttcacgaatgagaaccccgtgtcttccattatgctctttcttccctgagctgttagagctccagtcaatagtgccactgcgtgcacgtgacaaccctgcaattttcattgtaattttcttcaatcaaattctctctctctctaattatcttacataacaattaaaatatatagaattatattagaaatactagctagtattttggtcccacatataaatggactacgcactatactcaatggtgatcactacatttcttttttctatatccatgcaatgtaatgatggaattcaacaaaaagcttattttaatttattattattattatgtatatgtatatggcacttatacctactctactccacttcttgcaatgtcaataactgaagatagtacttattctaactcgtgaattaattgattaaggtggttatgtttagaagttataaattattattacttcaaagagagagaggccatttccaaagatgaagtcgacagagccttctatgtaacaatctttgtagtaatgcctgccaaattgatcatagagggtatcttgtgctcccaagaatttgcatcccaagaaggttgctgtgtctgccgatattctaaatgcaactgcttgtttcccaatggctcctggtgctggcactggtgtagtgttctgtttccacattttaattatacaatttgaattacaaaagcccaacaacaaatataataaatttaaccaaattactatagcaacttagctgtcatatgattaaatatatatatatacatatatatatatgcataatattaccttgaaagtaatgtttttggcaatgaaataaggagaattgacagcaaaagttgcagaagcaaaggtccccatgggctggcctcttggtcctggtgtttgagcagtgtctccccattgaacaattgttttgtctgctcctgctccttctatggtaataaacgatttaaattgtggtatattcactttctccctgaaaatttactacattttttttagtcatgtccacaattcatacacaaaaaataataaagtaatctatgtagtcagaggacgaattccaaagatcttttcttttttatacaaggaaaataaaaaccagaacgtaacaagtaatcacattgaacaaaacgagcatattgttgaatatagacaaaacccgaaatccagagctgagtagaaagaacagaataaataccaatatgagcagagccaaaagaaaaatacaaacagagtaaacgacagagttcatgtgagaaactttctctctctctctactctactactct

SEQ ID NO: 297215 - DNA, 951 bp, Cannabis indica
ttgttggaaaagtcatagggatagaaactctcaagtttgatgggcttcctagactaaagaatgttatgatggaaaagtcataggataaaaattaatcattttaagaaatagttaattatagtttatttaatgttcttaaaaaaaatttacatattagtaacttgttattataggtcaacaaaaatataatcatataataaaaatgtaattattgaatatatatatataatatatatatttaagaagataacttatccaaaaaaaacggaaaatgtctttcttgaatgagtttgctattgttttataattatttgataaccgaaggtgtattagaagggaaatttcatagtaattacattattagttaaagaagagtgtcacaaattaattaataagcaaaattcgataatttatttgactcgggatttattagcacaaccagaaccacatgtttcttgttgtctttaactctccaaatccaattatgtgtttttttttcttcccaaactaatttttagctgatcaaagacttcataatatttggcctttcatctccaaatagttgactttttaaagtgagctcaaagtatcaccttcctcaaactcaaacacgcaacctaatagcaatacataatagcttataaactagtatagtgaaggaacaagaactatttactacgaacacatgaaaccatgatgtcacatttaaaataattaatggatgaaatacatcaaaactgaaaagttgagaattaaattatcgtgacttcttcaacagattaaaaaagtcatttagcgttacttaaaaattgactacaaaaacatttattgtatatcaccaattttagcgtcagttatgttcaactgatagtaccacttcattgacgctaaaagagaaggtcaatagttaacgtaatgcactaaacaaggtcaaacaaaccaaattgtttt

SEQ ID NO: 297216 - DNA, 2724 bp, Cannabis indica
ctaaatctctagaatcttatgaaagatagtaaccaataagttacctgaactccattaacatcacaaatcacagacactgtaagtgaacagctgtcctttctgcttgacatcttaacaatgacacccttgtgaggcatcttctcatctgccaaaaattataattaagcaaacattcagtatccatatttcatttctatttggcaattcgggcctacttttccctgacttataatgccatttcaaacaggaacatttaccgataatgttaatctttgtgcttaaggcatgcccgatggtagtgcacagagggtaacctgtatcaagcatcaaactaattaaaccagcaacatattacagctaataagttcaatacttccccgtagtttagatttatcagaaggcaaaagacatagatctcaagcatatgagaactaccaaaggctaatttgaacatgaacagcaactttatttttgaaactcaatacaaaattgaacactcaaacacttgctcattggactgaggcatgttttggaattatgcaacaggaactgaatatttccagattatcaaatatacaatagatgaaacaagcaaggatgaagcctcagacaatcattacctcctacagtgtgagctacaagtgcgctgcactccatgccacaatgtattggccccccacaatcctacgattatgagcagaagaagtaaataagcataatttttttgggaggaaacgggtaaatttgtgtttgtaaaatgaaattttttatttgaattcattaccctgcagtcaagacatctaggcagatcgtggttaaaaaccattccatcacaaagctgcacaaagagaccaatgaaaaaaggtaaaaaaaacaacataaggaataatagattctaaaataaacataattgaaaaagcaattcaatgattgctacaatttgagaaaggataacaccaaccacaagaaataatgttccttagtttcttggcaatggtttatatcagtgttttttaactaattatagagaagttttgtgtcagtttacagtcagtttattttaacctcctagctaaaaatacaaaaagggaatattgaagtccatatctattataattaagcctaacaacagcagttattcgagatgatcacagtgataagaacattcaaataaaaacaaagatgtgtgacctgatggagccaacctgaaaccatatcacagtcccatttactgccaccttataaaagctgtagaagtgaaatttaagcggcaagaaaaaaagccaagaaattagttagaatttggtctcattaaatatagaaatatgtacacaaatgtaatatggattgcttatccactatataagctgaacctgttatttgaaaaacgacatccactatcaatattaatatggtttccgtacagatagaaataattgtcattcagacaatttgttggataaaaacatcaaggaggcacaacctagtttctccaaatgaatgattgtcatgtcaagctctttcagcaacataagcatgaaaattaaataaaaaatatactgcctgaaatttctaagaggatattttactctaaaataacaactacagtttaaatactcatatcctgcttgatacccaataaggatttttaagcagtaagaaacatctacattggaaagcgtctataacaatggacacaaaatgcaaataccaaataccaaaaaataaaatataagaaataagaaatgcccatgtcaacaaacggaacccaaattacagatacagaatcaaaacccacaaaaaatgagctacaacccagttgagaaaatagcacagatcacagatttaaaggtgtaatatcataaatcgcgtgaaagaaaaaagattgaaatgagttaaagaggaagaagagaatacccatcttcgctgagaacgccatgagggtatttggggagaggagaagctaagctgaagttgtaaagcttgttacggtcgctaacactgaattcgcagatggagaaggtgtatgaaatcgttgagagaagaataaagcactttagtaaatctgcccagattaccatttttactttttgattctccacgaaaggagactgaattggttctccctcagatattcatcagttcgcgttgtatattgtattgagtggagtgggtgtttggagcagtcccagctcaggtgcggaagcgagacaagacgactccacgagacacaacaacttacgcggcaaacgtatgaaatggtgtgatgaggtgcggtgccgtaagtttattaataataaataatttttgttgttttgaatgagaaataataaatagggataagttgagaaatcttttttttatccagtctaatatacttttattctttacttaactcgtacataatttcaggggtatattttaaaaaaatataaaaatagaagtaaaaattaaaacaaataaagtaaagtaggtatataatgtaatttccgctaataaataattaaataatagggtttattttataaatatggtttttttgtaagtggttaatggtttagaaatatatggagaaataaagaaattttataaaaattagaaaaatgaataaaaaatttaaaatatggaaataactaattagtatatataatctctctcaactaatgatttagaaagttgagaaccccccatttttttagaaccccattttttccagtgttttgc

SEQ ID NO: 297217 - DNA, 791 bp, Cannabis indica
tattttaaatatatataataataaaaataagttatataattttttaaaataaaaaattgtatttataggcgactaggtgacatgtcaaattaatctggcccaatacggggttaatccccattaagctcactaatttagcatcttcaacactaagatttgactagttccctaagtacaggccctaccatgtgtataagaggtctttaacatgtcttttggtctcattttataatacttgaagtgctaacgaaactattttagtgaagatgtactgatagatgtcgattttctctagcggtagccttttagaaaaagtgtttgtgtcttatgtcagaatagtgggtgcatgaatctccacatttattatgctttatgagaaatctatttttccgaatgtacggagggttcaacctgtgataaaggttgtccttgttgttgaaggtcgaacaaacacatttgtaggctcctagtggattatggagcccttcgcttcaagaactgagtgatagagtatgtagtggtccctggaggacttgtcttaaagtgggaaggtgactccttctagaaactagtcatttcgaatatagtcattgcaacattgtggacttgtatcttttgaaacccatctatttatacaaatccggcccgtctgaccatttgaatttaggccctaagggaaagcttgtataaagaagtatttatactcgattcctttttaggaatggatatgtgacagtcagtagtcccgagatccgtaagggaaaatatcgagtaagctgtgcaatcccaca

SEQ ID NO: 297218 - DNA, 2323 bp, Cannabis indica
aagggttataaggaaattacccttgaagtaataaattatcactttgagggtttgaagaggaaatgtcatctatgtcaatcaaaaccacatctagaccatcatctagcgggtcaactgttttaaaatgattctctaccaccacaattgtagagtttaaatctctagcatattggccttcttcaatatattggacagcaaaaaccttgcaaatcataggaaagtgacttgcttccaagttgttgagctctgcatggagaccaagattcttgcaggtattatagtcgtaacttgatttcacattctcaataactcctgcatttctactttgacaagattgcagcattactgttagcgtaatcagcaaagtagtcattaaaactccaacagtaacaatcgccccaatgaaaatcgttgcagcaactgatgtcatgtagaaacctgtttccatcacgtaatggctatccccatctgttcaagaaaaagggtacgagataaataatacacattaagctcaagattcttattacatattctggtcctaacaagtaacatgttaaattctgattgaatcctgcagcagatacttaacgagaaaaggcatctttctccagcaaaagtgttatagtatgtcaaggaactcatgtttaccaactaccatttcaagttctgattttcacaaagatgtcaaaaataggtctataccaataccaaaccatacatctacagaactttgtcaaaactgctttaattggaacctcctatgtataaatgcatactgactaaaaacccacaagataggaaaacataaccagaatctccattgccagagagactctgtgcagagtactccctctccatttggtgaccataagcagacatggcaataatctagccagcattcaacaactaagttttctggaacaatactccagattcctttgggttcttataagggtaatctgctaataaaaagacttgactcactcatactgaaataagtgaatctctaagtgcaaaaataatatgtcatcagaattaggactccccttcaaagagtcatggttattatagaaattttcatcattacttatctcaagcactcggaaagaagagtttctagctattcttcatctctaataatccagaaacttcatgggcccgtaccttgttgagcatgtacttacaagaatcatcactataaacttcaccacccaatgaaaacccacctccataagggctcaaccaattaactacaccaaaatttagaattttttagtgatgtgatgaaccaattacaggcaaataacataaaattgttatttccttgattctgacccaataatcagaatcttaccatatcagatcaaccagtttaatgcaaatcacagaaaattatgcttgattgacgctaacccaatacatatttggtgcagctataatcatgaaaccattaatgacactcagtattcagagattgatgatgagtgaggtagaagcagagttaatgggagagaatacctgagagaagcatcgaaagatgggaattttaggagggcaagaaagaataataagaccatttaagaagaggtatctcagagaattggccttttaccattgatgtctttgtcactgactctctctttgtccttcgcgtgaggaagcttcctttgtaattaccatggccgtgcctcgacttggagtggggacctgttgtaattttgagttttgacattacccaaatcacattttgcaccgtttatcaaaaaataaataaataacatttccaccaatatacaataaaaataattactttctcactaaaatttgtttcagcaaaaacaaatcaagtagtatttgtttgtatgtatatttatgcaggatgaatgatatgtatattaataatcctaattaaatatttaacaaatatatatcgtttataaaatataaataaaatttgtaaatatatttatatattttttaaaatttcaaatatattatttagtaatatattaaaatataaatattcaatgtatttataattttatgtatttaattttatgtgtttattttttaaaaaaatcaattaaaaataattaatttgttaaatttggaaatatttatatataaaaaaataattagtatttttactttctgaactttcggtttcggcactatataatttcgccccctaaaatatattacttgttaaaaatttaccttaaaatataatagttacataattatatccactctgttaggttccatttcttttgccgtcaaaaaattaacatttttactccctaaattttaaccaatacaaaat

SEQ ID NO: 297219 - DNA, 3402 bp, Cannabis indica
attgtaataaaatctctaacagtcatgaccaccacgatctacctctcctccatcacgatgtctctcttaccgcttccctatttatttagggttcgatgtgctctgttgcacaactgctctaaatttggtaccatggaaaatatgctaaagaatctctccactaagtttgttctcactgacaaagaaagagtggtccatgaaattggtgaatcaagtattgttactacatctactgctcctcattttgttgtttttgcctttgtgttaacccataggaaggttaatgaagatgggtttattaatcagatgtcgggtttgtgggcatttcggttccctgtgaccataaatgctcgtcgtgaaggttacttccttgttcaatttgggtgctctggagatatgcaacgcattctgtatcgtcaaccatggcatttcaataatcagccaattgttttctattcaactcctcctctgtctactcctgctacctctaatttcacccacatccctttctgggttcaagttcatggtttgccttttcttagcaaaaccgaggttatggcgaatatcattgggtcgattgttggggaatttttggaggttgatgacgactccttggaggaaggatgggggcctttcatgcgtgtttgtgtctctattgatgtcactcaaccccttctctacgacactctcttgaagattactggtctcgctgataatttatgggtgatcctgaaatacgagaaacggcctgatatatgtcataagtgtggtcaccttggccatacttacttgagttgtattcattttttggaggctgaagatgtgggtggggatacttctttgctttatggtccttggatgaaagaggaccccttgcctagaagggatactggcatgcctgtttcttttaacaacatctgtaatgttgcttgaccacttatgactcggttggtccgtaattcgcttacccaagcccttcctcttaccccaaccctcccacctcgctcacacaatattcgtccaactgaacaagccactatttcccttgctggttgctgctctcgctactagtcttcttgctgcaagtaattttcctcttgcaccctgggaacaatctaccaacaatccaacaccaccaccttctcttcaaaatatcattaatcgtctgtccacacccacttctgaaactcccatacaacacaaatcatccctaatatattgcctatagccattactgcttcatcttcagtcactattccaccaattattgcctcatctacaaacactacttcaccaattgctactccaccaatggttgttactcatgataccaccacaaatctatccttcaaaaggcaatctgtccaagttggctgctctctttgtaatatgcttaaacgctgccgtctccaaccaaccacgggcaaccctagttctaatcatattaccactactgcaattgattttgaagcagaccttgctaatgatgtgcaatctacacattctgcggaggatgatgatgctgttttggtgggtgttgttgagcaaccccgccagtcgccatgaatgttttaagttggaacgctcaagatttgggaaatgacctagcattccatcaactgtgcctgcttaattctcagcatgctcctcatcttttattcctcatggagacagttaaaatctagttctgttaatagaattcgtaatgctttaaattttcctaatgagattgaggttcctagacaaggtcttggggtggtcttatgttattgtggaaaggaaatcttgatgtaaccttactttctttttcaatgaatcatatttcttgttatgtcggtgtgatgatggtttcacttggcatttttctgggttttatggtgcccctgctacacatttaagaaagcaaacttagaaaattttaaaaagacttgctgatgttgctccccagaatccttggttagttgttagggatttcaatgaaattttgtctcatgatcttaaaatcggtggggtctctagagacaatgaacttattgacaattttcactctgccatcaattatggacatttggttcggcttgaccacaatgatgatatttatacttggactaataaatcctctggtaatgctcatatgaaggagtgtttggactattgctttgccaatgcctattggtagcaagttttcccatactattctcttcatcaccttgactatactcatcggatcatagggctctcaaggtagttgtttctcaccagccgaacaatattccttctacaccaaagcaaagatctcgttccaaatatgaagccttatggttaaatgatcctgaatgtcaagatcttgtggctcgtcattagggttcatctactcatcagaatttgaggcaagtcgtgaccaacatcaaacagtgttcaacacatctccaagcgtggcatgttaagaaatatgggaatatgagaaagaatatctctaaagctcaagatcgagttgccagcctccacaattccaatgagtcaagtgctgatttctttttagagcttcataaatccaaacgtattcttgatgatcttcttaaataagtggaggtatattggcatcaacggtctaggatctcttggattaaatcggggaacgctaacactaaatactttcactcaagagcatttggacagaaagcgaaaaactgtattaaaaaacttcaaactcctactggttcgtttgtcaccgatttagatggaattactggtcaaattcaagattactttatctccatttttcacagctcaggtattgatcataatgctctagaccgtactcttgaggtgattcctacaaccataacccagactatgaatgactcccttctacaatctttctcctttgaggacgtttatgcagcacttcgtagtatgggttccgataaaagtcttggtcctgacggtatgctgctatgttttacacccgtcattggcctattgctagccctttggttactgatgctgttcttgatgtgttaaataaaaatggagacccctctctcattaataacacattaatcactctcattcccaaaattaagtccccaaccactgtggctcattatagacccattagtctttgcaatgtactctacaagctgatctccaaaactattgtcttgcgcataaagaattatttaccacttgtgatctctaaaaatcagagtgccttcctttccaacaagctgatcactgataatgttttggacatataatcatgattatattccattatgctgaagacactataatcatgaataaatatatatttatatatgttctggacttaatagaatttatacattaagtataatcatgaaataaatcatgtgaaccatgcaatatagaatgatttct

SEQ ID NO: 297220 - DNA, 2355 bp, Cannabis indica
agagagtgaaatgatggattgattgatagaaaatgaaaaaagagagggaagagagtgggatttgattgatgatggatggaatgatgactaagtggtatttgtgtaataaaaccaactttgtaagtaaaaatgtagacataggcgtgtagaggtatttaggtaataaattgtgcaaaatggatttttcatgtaaaaatttcttattcttaagttgtaataaaatgtattagtcacaaaataatttgttgtgattaaatgtatttttagtcacaatatttattgtgactaaaattaagttagtgacaacttatatattttagttatcacaagtaattttttgttgtgagtgaaagttatattttagtcacaaaaaatttatattttagttaaaaggttgtcactaaaggtgacttttttgtagtgatatttctttttggaataacttccatacattctaaaattaactaggtcgtccaaaatattgtctaagggtgacgctttgcgattaattagtttgcgatattttatagaagttattatattaaattatataagacaccgtaaaaagtattagacaccaataatacattttagactttctcttcacattattatgtaatgttacactttgtaaactttatattttgaagtgaaataataaaattattgtaatacacaatagaatatctatctaagaatacacttgagcctaactcaattatattctaattgaaatgttataactaaatatagtttccctaaaaaaaaacacaacaccaaaaaatattaattgaacaacaatgacaataaacaatccttaatacaatatcataataaaattatttttgcgtaaatatataatttttgtacatatattacaatttagaataaaatattaatttataaattacataaataaataaatattaattctacataaataaatttataaattacatgtatatattttattaagatatatgaaaagcaatgcattgttcaactaacacataaataatgaagccctaatttaagcttaatattaaaagtgttatttgtcttatgacatcattttgatgtttttctaagtggagccctcttttggtatgtgtttctttgttatggtatccaatagctcattgaagcagagtcttgaagactgttgtgctaatttgacgttggaggaggaagtacaaggggggaacgaggtgggagatgatactgaaatagactatagtttcgatgaacggtggtgttcagtgggaaagtttttgtctggtagattgatgggtttggaatttgtttagaatcagttagcttctttatggaaatcaggaatgggtatgtatgtgaagcaacttgagagtaatctgttcttgtttcaattctaccatgatgtggatattcaacgagttattgagggtggctcatggacatgtaaccgtcagtatctcatattgaaacaacttaaagaaggagataatccttgtcttaataatcttaataagttagacatgtgggtgtaggttcatggtgttgtcccaagctttatgtctgacatagtgctcaaagctgtagggaactacattggggtttttatggagacagattcaaagaattttattagagtttggcaggattgtttgcgagttcgagtgaaggtcaatattgatgttctccttaaacatcaatggcgtctgcggaagaaggatagtgaatggatttgggttcagtttaaatatgaaagagatccaaccttttgttttatttgtggtattacaggccatactgaacgattttgctcaaaattgtttatcactcctctatttgagatcaaaaaaccatatgacgaatggatgagagttgttcctaagaaactaattaattttccagatggttcgaaatggttgtgaaatcctgtgttaaattcgtctctggtgagagccgatagtggaggggaggttcgtcacctgtcttccaaccttcctattttggaagatactgttggagcaaatcttggtattttaatgcaattttgaccagagtattttaaggggaaagaatattgaacttaattttgttcctaccaagaattactcatcagagaatacttctatcaattaatcccataatttaggggttgatctgtataaagatactaatatagctcaaaaggagggatttattttatttgatctgaaaaggaaggatgggctttgtgaattgtgggccaagtatttgtgaagatgagaccttgtatgaaaatgaaaatgggccaacgaaagtggatgttgaggacactattgagtcaaataatgaaggaagtttttgttggaatttattttaccaggatct

SEQ ID NO: 297221 - DNA, 4450 bp, Cannabis indica
atattaaggactttcataagtaaacgacagcgtttcttgtaatattgtattttattttgcacccagactagtggcaagtggcaacagtgcaaactcaattactcacatcacatataatcgaatcagaagccaccggtctccgtctcaatctcaatcccaaattcgaccaaaataatcaaagcccgcatcgaacgacgatgccgtttcgatcagtattcgacgccggagcgattaggtcggagtttgaaaatgcgggtctgaactcaaaattcatcccccttatatggaagtacgtggttcagaaccccgactgcgacgactttgaaccactcccttccttaccctccgccgcataccttcttctccgctccaagttcaagcccctcacctccactctccactccgcttctgattcctctgacggcgtcactaccaagcttcttatcaagcttcaggtttgctaattttaatcaggtttatatacgtataccatgtgtttgaagaaattcccatgtgagaattagtgttcatttgtttagaatggagctctggtggaggctgttataatgaggtacgacactcgtttggggaaatacgctgggaagccacggcctggtggtctcagatcaacattatgcatatcatctcaggtgtcatatgttttcaatttgtaattgaattgttaatcatttctttgaatgtgtttttaattctttgaatcctggctttggttttcttttctctaatgtttctgtaataggttggctgcaagatgggttgcaaattttgtgccactgggagcatgggattcaagagccaactttcttcaggggaaattgtggagcagttggttcatgcctctcgcttttcgcctatacgaaatgttgttttcatggtatatttatggcttgttcttatgatagtgagttcttgcaagtcatggagggtttatgtggtttttaaaagaggacagtaaaaaggataggatagtgatgaaacgtgactattgagtaatatataaagtgtatagaatgtgtcattacttagttgcaatttatttttccatcgatatgatgtttcacctaaaattttcttagtgtcatctatcttattgtcagggaatgggggaaccgctaaataactataatgctttggtggaagcaattcatgtcatgacaggctctccctttcagttgtctccaaaaagaataactatttcaacggtatgtggatgcattgatatcatttaaatttcctgttctttatgagtcaatgagaactgcatcattccctttttaaggttgattattcattttataatcaatctcttagttattatgttgattttattggtgaccctcacaaatttctttgttgaatttgccatttatgtgtttataaatgataggttccttattttatacaatggctagtttaaaaaattgccaaatcctttagtaactagttagtaaggtaggggtatcataaagaagtaccccagcttaattctacatgattgatctttttatttatgcgtgtgtctaacgctatacgagcttattatttataagcaagagttgtatacccctttctctagattttaagagttctaaatctggacagtgctgtcatttcacaagcacataactagtaacttttattaatgtaatgataactgggagatcaatataggactctaatgatagatccttttatttactaatctttcgatgtcgtgtttctccttttccttttcttctgttttcaataggtgttatacgggaagctatcctttggtattaatatgtaaaactgtagtaaatattccatctgttgttgtattgattaatattgaatcttttgtaggttggtatagttcatgcgatcaacaagctttatagtgatcttcctggtctaaacttagcagtttcgctgcatgcaccagttcaagatattcgttgccagataatgcctgcagctcgtgcatttcctttggtaaaacttatggattctctgcaacagtatcaaaaaattaggtttgttggacctcatttttcagttaaaatatttgcaatatactttgttttcgttgagatcgtatctcactttggtctacctgcactctttatctttagtaaacaaaaaatcttaatagagtacataatgcttgacgggataaacgatgaagggcaacacgcacatcagcttgggaaattgttagagacacttgaagtggtaagctcttattcttataatattgatggaaagggaacttatagaatcctttaatcatctatgcatgccatgtgtctatacgtcccatttgcatatctcacattgtcccatttgccatgtgccatgtgttgttgccataaataattgagggctaacattttaggttgaaaaaacacatcatggcttaaaagtatgtaatttaacctgtattgagttatattacctcaatatcagatatcaataagtagctttatttactgtgttcttataaccttctgcactgcatttaactgtttcttgtccgtcaggttgtgaatttaatacctttcaacccaattggctcactaagtcaattcaacaccagtagcgaagagagtgtatccgaatttcagcaaatattaagaggtacctacaacatccgaacaacaattcgtaagcaaatgggtcaagatataagtggggcttgtggtcagctggtggtggatcaatctaaaaggaggcctaacgagaatctgcccctaatagacatagaggatcttcacatcagataggtctttctttccttggcgaagcattatatcatgtcaaattctggtcaagtactgaaaattttcattcaactaaagttactaaataggaatgttttctttatcatgtcattcaatatttatgtatagttgtttgaggtctaataacagtaaaattttgccctggtatttcaggaatgtaatattcaatattaaaactcttttctaagcttcgaaaagtctcaagtggtcagatatggatacactatctgagcattaacactatgggtacacttatgtggtcagatttgatgctcccacatagactcttaaaagattgcactagaaaatatcacttttgttttgttgtacaaattccatgtgcaagttagacaactgagtaaagacattgcaaagatcaggagcatctttaatctaccaatttcacccttaacaatgtgcctcttgaatcagtaaatccttctatcatcgatcattgcaatgcaaaccaagtccaaaatcgaaggccctggaaacctaaagcaaatatgaaatttaaaatgaccaccttcgttttcctttattgatttcaccacttcttactttcacccgctaatttgagcaaatgatgaagatggatttcccgcactatgtttgaagctttgatttttttctattactactacagattaaaaagtccgataatttgataataataataatctatttatttattaattaaaattataataatatttaaattctaattattattatcattatttatgcgattgtatgtaattattgttgaagaattatataaaaataattaaaactataaaatacacaaattttagtatttagtttatcaattgtaataaaaatacaaaaatatagaatacgaatttgagctcgtataataagttggcttatttatagaaaacaggttggtccgaataaagcacgacacgaaactatcgaatttgcgggccgtgatggacctatcctattttttgcacggcacgacatgacacgtgtcatattttctatgacccaacataacatgacctatattttaaaaaacctaaaaaaaatatgtctagctagcacgacgcgcacatatttacaacaatactcatgtccaattcaatatgcttactctttccatttccatgaaaaatataattcatattcaataactatgctcaagttgttacacaagattgaaagtggccttagaattgaaatgtgtatcttagtaaacgcagccaagaaacttcagcaacaacaatggtaagatacttatactctttctcagtgatagattgagaaactatgttgttttttgcaataccaagccactagattagagccaaatttttttaaggttgacctcttatcattagggtcttcaacacaatctgcatcataaaatgcaactaaatcatgatgttgtggctttgtcaagtgaagaccaatgtgatgaaaccattaagatatttgagagttcttttgatttctattaaatgaacttgaattcattggagaattattttatatattatttttttttttaaatttatgttttaagttgcatcggtggtatctatgtacattgttatgtaatttttttattacgatttaggttgctataaattactatatgaatttctgtaaaaaaaaaaaaa

SEQ ID NO: 297222 - DNA, 1508 bp, Cannabis indica
gtaagagaggagacaaggtagtaggctagtagtaaaagacttgcttggctactcaagcttagttacaatttaaaagcttgatggggtatttatagttgtttaccctacatttaatttcatctacattattctagttctacatgatttacaatttttctagaactttctaattacattcttctacaatcttcttgattggttacttctagttttctaaatattctaggtttctctagtttgctctaattttcttagttttgtgtagttaatactagaattttctagataagaaaagtgtagaaatgtgtagcacttttcatcagattgtataagcactgaagccatttacaattccagcataacaagtaaacattatattatttttattgttgacaaattacacaccaaacatatatagagttcgatggatcaaggatattgcatatcttattgcaaagacttaaataacattattccaaattacacacaaattcaaaagtactcgatcaaagatatatatatttatatcttattaaaaagacttaaataataacattattcgaaattcaacgaacatgcatgtgataaaagtaccctccacggtcacggagattgtacacgtacgtacacctcatgagccagatatccattcttcaaccttagttcttacgatcaaaattaataatttttcttttattagaaaatgttcaaatcaaagaaaaatgctaaatagaattaatatataaagagttaattaatttaccagtttgacataaacgccaattgaatcaatgaagtggcctgattttccatggaacccaacaatggcgccatcttgtgtttggtgggagaaagtggggccagttttgctgttcccgaacggtccatgtatttttttaagatttgttataaatgataatgatgtgatcaccatcattccataataaatatcatatgtcccacttatggacgtcaaaaactctgaaggcccatttatatcaatctgtatatatatatatatatgcatgaacaaagtaagtcattactttcactaatttcgttacatattactataaaaatgttatttttgtcagcatatttttatactgataaaagtttggcattgtgctggcaaaatagaatttacttttaaatgtattaacaaattaatattggtattagaacttttgtcggcgcaaaataaaaaacgctgacaaaaatgatttttccagcacgtaagtgcactgataaaagttaagacttttgctagaaaaacttcaacttttttgccagcgcaatttgcgagatacgctttatcaacacagtagcgaattgcgatgacaaaaatgacatttctagtgtatatatatatataagggaaatttgattttctacttagaaaatcaaaaatttttttccctaaaccaaaaatttaaaacctaaaaaactattcctttttttttcaaaaccccaaaaataccccctcacaatattctctctctgcatca

SEQ ID NO: 297223 - DNA, 2297 bp, Cannabis indica
tagaatgtaaccaaaaaaagatgtttgcaagttttccaaaaaaaaaaaaagataaagaaaagatgtttgcaacaatttctaagactacaagaaattcagcattaaattttatttattcatcattttctcttattatattataattagattgatggtacattgtcgttacatacaatggacaacttacttatatgtttagtttttttcttcttttaatttgataatgaattttaatttttaacttatattagataaagacggaatttaattaaataaataatattattatgtttgatatagaattttaaataaaaaaacatatacatatataataaaaacaaagttttttcattatactttttttttcttaaaattacaattacatgagattttacataaaaatatgaaagtaaaaagagtactaagtaacactgtaacagtaatctattttagaaatccattactctattgagagtataaatcttatatttttttttgaaagaatataaatcttatataaatattatttcttcatgcatatgtgatcattcattagaaatctatgagagtataaatcttatataaatattatttcttcatgcatatgtgatcattcattagaaatctatgataaataaattcagattatgctttatatatatttgtatgaacttactctgaatttgagcacacaacccatacataggatcccacttgaatccaatatcacaaaaacatctcttctgtccaactctaaccggatcaaccaaacactttgagttcatcaagttcatacagtccaatgacccttcacaaatgggctcactcggcaaaccccattccaactccatctccggctccggccacttctcagcaggcatcttcgccatcgccgccggcccagacgtcacaaagctctggtatgccgagcactcatctcctccaattttcaccccaaatccatattccccaacgttcgaaaccccaaccttaaacgaacaacacgacgccgttttcatgcacggaacaaccaaattatccttcacataacggtggcaaaggccgttcgccgtacaatcgaccggcggacgctggcggcgaacgtataaattcgtacagtttagtagcaagattgtattaccggcggcgactttgaacgaggaattgtggtcgagctgaattcctcggctacgaaaatcaatggatacacacgaattggcggcgataccggcgggtcgaatcgttaatcgccgagtgaccgggttgaccgaggtgatcgggtaagccgactcattaacggtgtcgagccatagagccccggcggtgcaacgtattttgtagagagcgtagtcaccgcaaccgggtcgggtacttagcgggtacggaaccagagtcgggccacagttctcgcattggcgcgaattaggagctcgtggagttggggcacgtgagagtgagaggcacgtgagggggaatagtgttagtaggaagaagagatttctagtgttgttctccattagtggatgtggttggttagtgttaattatttttggaccacacccgactatgtagggagatgtacttatacataggaagacaccaacatggattttaaggcacatgtagtacttaagttggtttgatctcttgtttttgctattatttattttgatttgtgaggatcgtttaagtctcaagtctcaagtatgaacttgaatcttgatcacataggtttggtatatccaagagaatattttgaagatatgtttgttcccaatacttgattttaatttgcttacaaaatagagtactttaaggaattagtactggtttatggattttcccccaagaaggtttgagatttggatggatggttcatataatccttctccaatctctgttacattatttctcttttatgtattaagaataacataaataaaacattactgcaaaatatattttgctgtccgttttaaattttcctatgctaagttttgtatactctctaaaaaaaatgttatgatagaatattcatctatatatatatatatcgacatctataaaagttttttagtctaattatttttttctttatgatagtgtatgttgtagctatttagaactacatataaatttttaaaaattttcgagtagtttaaacaactacttactacacatataaaatatagatacgtgtgtaacaaaatatttaaactttattttctgtattgaaaactatttaaagaaatttaaaattgtttacaagtagtcttaaataattataacgtacttaa

SEQ ID NO: 297224 - DNA, 3108 bp, Cannabis indica
atttagtatcatagtaattaccttttgaatgtgattacagacagagagctaagaaagaatgcatgatcaatgatatagttgtttctgatatagatattgcatggtgatgcagaaatgttgtgtgtgtttaatttctaatttagattacactatgcatattgttatttgcttctaggataatattattgaagcagtaacttattgagtgcaaaaacatcaaagctcttaagtatttccatctacttaaacttcagttttcatggcaattaggaccttagaccaagctggccttgctgtaatatcagctgcccaagcatgaacatgggaccgggattcgaacagcttccaggaacgtgtccccatcaagtactgtatgtgaggaaggtggtgaagatctgccaaggtgaagctgtccccggccaagtattttgacttagccaggcgactttcgtagacatctaaaacatttgccaacttagattcattttcctccaccactgcaaaatctgtagtacccatgccaagcattggctttaagactatctcccatgtcaattttgctgctgctggatcaaactgatgactctctatttccagccatactaataagattgccttcttctttgagtctgaatacaataactctgttccctggttagcatactcggtagctatgtattgagtaattgcccttgattctgcgcataagaaggtaatttatttgatacaaaaaaatcaaagcaaattaggatgaaaaaatgagtcttaccaaagagcgttagatctccatcctcaaaagctgggacctgaccaaatggctgcatcatcatccaaccaaaccaatatatgaacatgagtaagattagctttgggaaaacaccacacagaaccaatgaaaatgagttcttccttacattgagagaaagaaaaggttgtcttttatgttcaccaactttcatgtcaacagaaacaaactgaaaggccaactctttctcattgagacaagccataactctcattgcaggttctgagttattgcttgcgtggactttcctcactgccatggttgcttaactaagtattatgagcaaaggaattaataaccaaaacgattatgtcttaggtatttattcttgggacgcctgtatattctaattgggagtagttcttatcctttgaattgatgattattgtattacaaaatgatgagaaaagttgtggtgatctggttagtgattttgtagtcaatattatatagtgtgatagttattttaatggcaagaatacgtacttgcttacataaaattttgactatgtgcactaaatagtttgtttgtagtggatattcgttttctctcaccatattacttttgaagcagccaaaatttaggtccttgtagaatatagttttcttcctaaaattaagattactttattgtttggttggtgaaggtcctagaagaaagaagcatctatttccaaaatctagtgaccgagtcaatttgattcataaagtttgtggattactaccctatatttatttctaaaagaaaagatagttttaaataaataaattagtgtatatggagagcataagaaggaaaaaagagtagaaactagaggataggagatgaaagtagttcttgcatgttgtttggtagtaaaaatggaatggaaaagaggtacaaaaaattaccacttcttttttacactgttttaactttctaaattttcaaaagagtaaatactattttggactctgtgttttgtaaaaattaccaattggactttctattttgttaaatgacaaaatggaccctatattttccaaatgataaaaatcaaaccctgagctcaattttcaacaattttattttttaatataatcaactttaagacaatttctaacacgaacagatgcaaaaaaatataaccagttttgtcataaaatatctagattagattattattaagttttattttgacaaaaaatcagttcaaggtcctatttgtacaatttcaaaaaatacaaggtcttttttgtcatttaacaaaatagagggtccaattgataacttttacaaaacataagatccaaacataggagtccaaaatagtatttactctctttcacatatcacatcactctctctctctctcttttgtcctacactctccttactcttagagcaactccaacgctttattagaaggagtagcccaaaaaacttttgtcagtagcatagttattacaatttacatcgagtagctctgcattggagtaaacctaaatgaccactccaactgttgtgtaggagcaacggttctattcaatttttttttattaatcaaagtaaaattaatttcaaatatagggcaacagttacaattttaaaatttatttcaaataatttaattaataataaaaaaatcaactattttatctcctataagtactcatcatttttcgctcttcttctacaaaatttttacgatttcttacaaaatttattatcacaaattttctatttttttcttcttacaaatgtcatatcatttttcaaaccacttttctacattatcttatattcataaatggattccacataccaactctcaaaattcaatcattcaatcttctcaatccaatcttttcacaaaaaaaaaaaaaaaaaacaaaaaaaaaaaaataaacttaaataggaaatttctttatccaacaaatattttcatccaactacatagcgtattttactaatctatgagcagtttgattaatatttctcttagcatgagaaacaataaatccagaaaagaagaataaaaatcaacttacataaaaaattacatatgtaaatatgatcaatctgaaaatgaagcatttaaagcattagaaactcgcaatgcatcagttccaattgttattttttttttttttttatttttatgtatagcatatatatacttgagggaaactaaattagaaacctgtgtattaaaagtaggggtttttacactacatagaggaattttcaatttttttactttgaggcgaattttttttttaaaaattatatgtttgttttatactgtatattgtgttaagat

SEQ ID NO: 297225 - DNA, 1865 bp, Cannabis indica
gacaataaagtatgtttgacatactggctcaatgtgattcaggtgatcattacacacaaattgtttcatatatatatatatatatatatatacaatctctgtacaaaattaaataaacttaattatactagagatatatatgactatgaatatgcagaatcttggtgaaacaagtctccctttttttgtgactcttaatcctaatcacccaccaaaacaaacattgcttaagttttcaactacccattcactcccatctcttacttcatcgaaagtttcactcgagtttcatcgaattcaaggaaaaagaggaatttggttttgcggagcttatgatcaaggtaataatatatctgtttacaagaaaatcatacttttattcattagcattatcacactatatatatatctacttattatttcaggttatggatcctatgaggatggattaaaggtacttattactaaactaattaaatttaacaaattataatacagacagtgaaatgattgtttctcttagattaataatgtttataatttgtaggcaggaatggttgcagcacataacttaattggaaaaagttgtgagctaattcttggtaatccaaatccaatggtaccttctatgatggaaagaggagcacgcctttttgttactaaatttcttacaaagtttatcactgcaggatgtttcatgtaatttattgtattttttgaatttgaaatccttttaaatttacaatattattcttttgtttcatgtgagatgatcatgtatatatataaaatgtttgtgtcataacagtatattggaagaaggaggcactgttttcacttttgaaggaaacacaaaaatatatatgttcccataaagtaactatcaaagttcacaatccacaattttattggaaggtatatatgtacatatatagtttttttttgttattggtacaattcaatattaggtctcatttattttactttaataaagactataaagaaccgttaactaattataaggcgttacctcataatggtactataggcatcttggtgcctagcaatgctcaatgctattaggcgccttatagtggtgctaggtaccttgaagccctataaacaatgcctcaccatacggatgtagcgtgttacaagtagttagcagttttttgtattatttattaaatcaaaatgtgtgggacacaatattaatctacaccaataaatatcacctctattgtaaggtgcctagcatttctctttgataaaaatatggtataatcacaagttttaatattatatatctacactgatagattatgatggaggcagatttaggactcgcagatgcttatattaatggagatttcacccttgttgacaaagatgaaggtctactaaatctctttttggtaaagaactctatgtaggatttttaattagtaaaattttgacatattcaattgataatttaataacttcttgttgagcttgattttgtagatatttatttccaatatggaatcaaagtcctcagcctcactaaacaagaaagggtgactaaaatatgtgataatatttttaataattaatggaagattgatactagtttttatctcctaaaactcactagggtttttcttgttgttaggttgatgagggaatggtggaatcccttgttgttcacagctactattgcctcagccaaatgtttctttacccatgttttaaggaaaaatactctaacacaagctcgcagaaacatctctcgtcattacgacctggtaaaatacttatgatttcgtgagactcgtctcaacttaattggggattctaggctaaaaatcaagttggattttttt

SEQ ID NO: 297226 - DNA, 4598 bp, Cannabis indica
tatgatatgaattgaatatggttacagaattaaactgcaaatttaaaaaatgcaaatttaaaaaacccaagtaacatcactttggtgtatattgagtctactgtacaggcagtatctagcagaaagcaaatgacataatcaattatacatttgtcaatatggctgacctctatattctcaatcttcgcaaaaatttgagtttggttgagatcacctaatttagagatgaaatcacgagcctgcataagagggacaacagaaaactaataagaaaattgaaatctaaacgtgaaactagccttagatatagaatgcagcagagaaaatgaagatggggaaatccttcaaatcatctattatgtataagaagagacacaaaacaaagtagaagtagccctcacatgacgaacatcttcagcatgccgggtatatgatagcgagaggaaatctattttatttttaacaccccatgtgcttataacctgaatggcagtcagacaataaatccagaagttcataaactcaagtaatagcaggaaaagtaatttctttgaacacatagaaagtttagcatttgcaggttcatgccaacaccatcaaacttaccttcttatcattatctgtgagtgtaggaagatcaatacgaatttgagaaacatgcaaagtatacaatgatccagccaaggtagcagagttcttaatgatacaaaccacatcttcaccgcttatctcacttacctgcattggatacgagaaacttgagaaactggatgcgagaattcattttcttccctttctaggaaaatattttgaaaataggataaaaaaagagtaatttgcaaggccattggttcaagttctacagaagaagaagaaaaagaacatatcaaatttagtagtaagcagaacttcagagttccttgaagttctcatcttacaccccacatagatctaaatacaaatatttatctgaagctaagtaataacatctctgttttgtagggaattcctgcatatggttgtttaaataagcttacttggattacaaagtaatgtataagtctagtgactgttaagatgaaacaaaaatatttgataagttaatttgtcatgcctaaagtagtgtgttgagttatataaccgtcaactaaataatgaaatttagttttcaagattccttacctctaaccacactgaagtcgtttcactccccgtgaaaaggtattgaccaataaaaatagtgtcacccttcttcactgcctggaaaaaacatttaaaatgtcaataatgagatgagttcaaacaaacataaattataagcttacaaataagattgtgcattaggaaaagaaaacaacagaaaaggaaaagcaattaaaggcagatcatttcttaacataatagacaaatacgcatcaaaagtattgcagagtgacatgcaacaaatgcttgatatttgtcaaaagccaaatcatgttaatcactatacttcgtgcaatgaaaaagaaaaagagccgtaactctgtggatttaacacgacttattaatgctgccaaaaaaaaaatgataaggcaaaaaaccagagaagaaaaatgacaagtaaatagaaaataacataaataaaacctttgccagtcccctaaaatttatgggtaaaagatttgaagtggcctctttctcttgatccggtgttaggacaatcaaagtatcagcttcaagggagatgggatgctcagctttattaactacctgcaactcgggaccaactgtgtccaacaaaacctgtaaaaaaatgaattaaaaattaataatatagaaagaattttttatttaaaaaaatgagagagacgagggccaagtgtatattttgataatatactattaaaaataatatctaattaagatttttggcctttcaaaatttctcctgaatttagatttaaaatttttgtttaattttattcaattttactattttaatgattgtttgtgtaataaatcattcagactttaatatctacctccctcgaacttttatatatactaaattatgtctcataaattttactttttttacaaaaatcggacaaaagtccttaaattcaacaatttcaatacttcataggcattttttacgttaaaaatttaggggacctgatttgtaatatttcaaagggtaaaaaaattagccaaaaataaaaacaaaaaacctaattaagacccactgagcaaaaaatagaagcacccaaaagtattaatcatacaaaaaccgctaatagcaggaaactgaaaaaagcaattcagagtttatttacagatcgcaaggatgtaagaatgaaaaagggcatacagcacagagcttatcggtactcttgactgccttcctcaaattgtccaatgtctcttgatggaagtcaatatcaccccatgaaaaatcgaaccttgccactaaaaaaggaaagaaaaacagaaagtaaaaaattgtcagtaaaaattactcaaatctcagatagaaatatctacccactataacgttaaatttttaaaaagctgataaggacaaatgagaaaaaaaaagtgattagtaccacacattccggcattcaggcaatcagaaatgatctcgacagaacgcgatttcggaccaagtgtcccaacaatcttcgtcatcgaaggataaacagtctgcagggttaataatccagaccatatcagataaaaatcatgagctgcaactctttttcatgaattgtagcgaaaatattcactgacacttcaaaatcaagtaagctacacactaaactcaacttgtcaagtcaaacgcaagacatttccaaatttatgagccaataattgcttcaattctcccaaaatatataaacactgatacatatatacacgacaaaatcaaagtgcctggttgttgtcgtggacttcactaattgacaattggatttaacttcagttcacagaaaaagagaaacagatcaacaatattttcttaaaattcaaagcctgacgagagcaaaatcagtagtaaatgaaaagcaaaccaaaaattctaaatcctcaaccaactgccttgatcggtcattttccacgaaaaatcaacacaacaatttcacaaaacaaaattcaaacaaagcgtcacatattccacacgtcactcattttctttttcaaattccctcgctcttttcctcccgctttttctcacaaatcaaacgcagtagctgatcaaaacaagtataaccaaagagaaagcaacaaaatcacttacaggcttagaaggctccaaaatcgaagccatccttataggctcctcgagaagcaactgattcccgtgcattttcgctgcttttcaaattaacacaaatctgagaatgaaaatccgatcggagatagcgtaagaggaaagagaagagagtattgagaagtgaggaagaaccttattctataatgaatgatttctttcggttatgttgaaagtattgtaattggttgagttgaaatgagtacgtacggaggagtggttttttatagactttggatatgtagtgagaattggaagaaaggaagaagagttgagttaagtttggccacgcgtcgatctgagaccaacccaatgtgcctttaccttagtccgtgtgctgagttggtagtaatggccatagacaatagatttacattacaatttcttcctttatttttctcttttattttgaatattaaaattgaaatggaaccttcaaatggtaatatattcatcaaagtcaatgcctaaaatctcaaattttggtttttttttttctttttggatttttttatgttgataagtgtagtcttaaatcaataagattttcttttgtttaatttgtttatttatagtaaatgttctttaatgctttaatagagtaaaggctttattagtgagacaagtgggataaatccaattaaagtaatccttaattatcatttataaaaggttatatactatacataaaacttgggaggataaaaggtggatttttttaaaggaattgtaaaaaatatatatttattcttcatttttttttccatgcaagttggatatgtaatatatttttctttaactggtcttatttttttaaatacaataactgaatatattattttaatttacatataagaagcttgtttcaaaaaaagaaaattacatataagaagctgaattacatctcatggctatgtaattttggcctaggagtcaattgcaaaaagacaagtttaagcttctccaatactataattttaccaaaaattttaactttccaattttgtagtttaaaagactatttttaattaatggtataaattgtgtattaaatttaacttaaaaaataattaatattatattgattcaaaatttataattgtacccaaatacttttggaaaaaaaacaggaatattctaaaaagggaaaaatattacaacaatactgtgggccgacccaatgaacatttgtacaacccaaaatgaaaatattacaaaaataccacttagcccttaccttcagccgcacgtcacaaacggagaggatgaatgaagctccatcgat

SEQ ID NO: 297227 - DNA, 3683 bp, Cannabis indica
tgcaattttagatttttcaattcaatccaatccaatctgcacaagtgcagatatccgtattttgcggattagataagatcgaatacttagtgaacgcccctaatagttatagagtgcaataaaaaaattgagtatttataaatatttaaattttaataatattaataatttttatatataattatttgtaaaatattttaagatatgtaaatataattaaatttataaaatacacaaaaaatagaacacaaattcgatatgaaaatgaattggtttgtgtaagaaatacgagctgatacaagtaaaacacgatacaaaaataccaaatttacaggcctatcctttgaaaatatgggcattatataatacggcctatatttttctataacacgacataacacattttaaaaaacacaaataaatatgaaccaaactagcacgatacacgaatttacaccactattcagtctcccaaagagctatttgaatttccttcactttgcatacatcggcactagattatatgataaatacaacatcacgattttttaaaaaaattatagtttcgatacaaataatatattagatgaagattacaataattggaaaaggctacttaagtgggttagttaaacaaaacactagagaaaaagaattctgggaccaagtctaaagatcagcctaagctactgaacataagttacaccgtaagttcctaatgctcaaaatgggccaaattgggggaaaaggactaaatggccatcattcttaatcatatgcaatgcataccatcaagatcatgatgtaattacaaaatgcagctactacttcttctccatcctaactgaaatccaccattcaaactcttcttaattacttgtgctcctcatctcacatgcgccatttctgaccgaaaaaagtatctgaaaacagccactgcctagtgcctattgcctaaaaccagtaagacctgcgttgcttctcttcagattttccactgttgggtgttacagtgattctatctgcattttggtgaacccaattaccgaaaccgggtgaagaaacaagttcttccaaagctgcttttgtgtagtctttggtgaactcttcccacccctgcttcgagaattgtttcctctcatttgtattatggaagctagaagggtacacctctgtatccaatagcttactgggagttctcctgccaaaccctgaagaagaaaacacatatatattagtatctagtacttattagggtggcatttaagtggttcctttcgttatcagaaaattatatgaaagagagagaaccaaaccttggccaggactgattgatgatgccatcgcaaactttctggatgaacgcctaagtaagtttgaatcatcattgttatgaattgtgtacgtgtagtcatcgagagaatcttcagattctgtgtaatcaggcacgggtgaaatactgtggctctttttagctgctttcagtaattttctgcaacagcatttcggatgtcattagttaaacaaacaaaaacaagcataacatagtaacaaatgatacttaaattgttatagtgtatatcttaatgaatgtaatgaagtgaatttcaataaggaaccataattgagttactgaaaagaacacttaccggcaaacacgacgaatgaatcgccatcgaaaaattctccttaacatggaagagaccactattccagatactagagctactgttgctagtaagggatctgcagaactctgtggatagcgtatacttgatcaatttaatgggtcacttgtaacaaataaataatccaggaaaaatatggtaatgtgaaaaacatctgataaaatttatgattagtgataaaaacctgaaggatcataagagcagctaagattcggatggaccatgcgaccaatattgctgtactcatatcaacagatccatcttctgttaggacaagtttgcgaaccacccaaaagcccatccatgctccagcaagaataacaaaagccaggagaaattttaccagctgccataagcaatcaatcaataatcaaaaacttaaataagctctggactgtagtagcttctctaatacaataaaaaaaattgcaaaagaatttctgaaatacaaaatatagtttttttaaaaagtatgtagttttccccctatctgaaatacaaacaaataaatatattgtttatttcatagcagaaaaggtaattaccagaatcaagaaaactcacatacaggatcatacaattcttgatcgatcccaatcagctccagagctgagcgcaaagctccaggtacaaagagcttgagaaaatatgcaagaccagcctgatataacacaaaccagtaagattcaggttaatggaactcatgtaaatactgtacaaataaattgatctaaaaacagatactcacaatagatgagggaaaaaatattgcaaatttctttccaccaaacggaactagcttcatgccctgccaatgccagaaaacattgtgtcacaatagttgcagaaggaaacaattatgccaaataaattttccagaattcaatactaatgtcaaagtaaaaatattgacgtatcagcctaaactaaactgatggtcacattataaaatcaaataatgaaatacaacagcaaactcatagtacatactgtgctgtctactataagaatttaatagcggttaggaggagacattgtcctccatgagatttgcactaaaacaaattctggaaatttatcccaggccagattaataattcataagcatcacaccatcaactacacagatatctaatcttatatagcaaatataatgattgccgatgatattcgcaataatagaaaatataacataatgatctctaaggaagagcgaaccataaattgaagtccatttatttatttatttatttttgcatactttaagaacaacaaattctagaaacatagctctctactgctcaatgtctaataagcaatattagaggaggcgcagttacattacctggaaaagaaacaccaatattacaagaatgactccaactgccattgcgctgccatagtaaaatactaatgacgtgctcagaaaggaagccacactcatcattaatattccaaataccagaaatattatacgatggagataaaactctgcaaaacaaaaagatggagtaggtgaaccaattattcatataaagatttaaatcgagagtaatttatgcaaacaataagctgaaaagaattaccttcttcaatggacacctcaaaactttccagggatgagctagctgtccgtatatctagaagtttatggtcaaatggtgacatgggtcgggcccaggaacccttggaaactttctcccagtggccttcagggcacattcctattgctagagatatattcctgcagcagatcaacaaaatctcataatgcatccacatcacatgctgcgcaatctttatcttttgattaagtatgttgatgtgaagtagaaagggaaaattttactttctcagctaagaattaaaaggtagcgttttgttggaaggaaggaaaacatagtaatagtaatagaaatggaatggaatcaaatttaaaatgcattaaaaaaattgataaaaaagttattgaaatttttttcatcttgcattaga

SEQ ID NO: 297228 - DNA, 2838 bp, Cannabis indica
aaaaaaagaagttcatgctaagttttggtagaataaatctacacacaaccactttctaagttgcttcatattgttatcgtgtacgttatcaaacagaagttatagcatactatgctcgatgttctctattgtatacatctcgcaatcactgctatatatgacaataaaaaatagttaaataaaatattaaaaattaaatcaagttaatcaataaaaaaaatcacttgtaattaaattaccttgattttgtctgtcgtatcatgttgtggtcgatgacttttgaggtgaaatatctaacctgactctctgatgctgttaactaaggcatgacgatcattttatgattcttgaataggccagattggatcaacaatgttgggaacaaattttcccatgcttccatgtatatcttcaattcatcatggggaatcaattcaagactcgagtcaaatatgcttaacaaccaacgatctaagtttgcttctaaagtcacccaatgctttcggctgttgaagaagagggccatattgttgattttatggtactaaattaagtacgcgtcggaagagtttcgtattatctgattatcatcgtaccatagcccctcaggatctccatatgtgtgtacattaaatcaaaataataaaaacagtaagtttagagtatacctcttgaagcctatcagggtagtctcgaaacttttcgtatgttgtatcccttaatccagttgatgaggaatatgcaatttggactcacaccagtatcttccaaatcgatccaccacacgcaagaaatagtgtgggctattaggataaagtttataaccttgttcttgttgagttctcaacacatgaacaagaataatagagagaaaaatagagtttctttttctctctactgaattcaaaattagcagtgtaaaaaaggattctttgatttcttaaggcttctatttataatagttaaatctctttaattaaatcattattcaaagtgttgacctgattttgactacacctcaccctaggacccatacaaatagaggtattattcccccgattcaaattttcctctgaaaatggaaaatggccaggcttctttccaatgttcagaaaaggtgaaaaagaaggctcacccaaagaagaaacaatctcctttgtcacatctccaacctttggtctccacgccgatcgtacctgggcgcctccccgtcccctcgaagctcggccacacatagatctcgatgcttccaaccgagttgacaaggccccaccagcagacgccactgtatatctcaacttcgacaccggggatgggggcttttctcctaccagaaccatctcgccacccaccacagcatccccgtgcccttcacctttctcgatttcaccagccacaacggccgagaaaccactctttccagagaagcagctagcatatttcgaagagagattgagccagggtccgaataacgggaacaaaattccctggtcgttgagcaccgtgaccagagaagaaaggctacaatcccgtctttgatgacccaacattccacacaagtagcaaaaggttcccaacttttcatatttcagttggatccatttgtttttgccattagcgaccttgaaaaaacaaccgctgcagaggggcctattaacatacacatccacctgaatctgaatccacttcttccaagtgaccgacttcgattcatcaagttcaatgttcacaatagtacctgccaaagcccccaacacattagcattcaccttcgagtagtaatcattaggcaggaaatgtatttggacccaaaaccaaatcgagttgaaagataattccttagccccgaaaccagaagaccacgagaggagcaccagcatatgtccattgatacacctcgggccatggtccaggacccttttactatccactccagactcaaagaaaaattgaaaagtgtttggtccagccaaagcattatctgttggctccactctagtccgagttttccataggttggagcaagtttgctctacatcttttggagtaaagtttctggacaaaacaattttgccaaaaaggaacatctttgagaagattttagtagtcaccacacaaagggctagagaaatggatacctcatttaaagagaggcacctacccttcttattatcagccgagccaacaacctcacccatagtcataaatacaaacacagaccaaataaacacactcacacagggaccacacaaccacctaccaacccctgaaataaagaaacacaatcacaacagagagacacaaaggccccacaaagggaacacaaccccaaactaccaaccccacagacctaaaacagggacacacgggaagacaagcaaacaaaggtcaacacgaaggaggcgcagagacaagggataaaatgagcaaggtaaaagcaaaggtcaaccaaagcaataacaaaagacaaaaaacaagaaaagaaaagaaagacgctaagagagagaataatagaagacactattggattaaaaatcctatgtgggcacatatgtataatgtatatactattataaagtgtgatacaaaattaagtgaccaattatgttatgggtatcaaaagggtattaaattgttatggaaataatgtgtagataccataagtcaatttataatttgttgaggggccaaattataaatacccaaaactcattctaagatgagtctataaataggtagtggtccccaagaaacactagggttctgtattctctccttccccattagagaaaatactttagaaaatagtgtattcttggaagatcaaaaccttctctg

SEQ ID NO: 297229 - DNA, 9392 bp, Cannabis indica
gtaggaatagataaaataggctttgcctccaaagatgtaaaatgatccaaatgcaaggagcattccacccctagacttcaactttaaatcactaaccttttatacctcaacaccaccactaaatgagaaagcacgacccacgtgatccttgggaattaaacaatcctcacaaatcctaatggaatcacctttcccaacaagccaacacaccctccttccacaaatcacgcccctaaaggacacttttctaaaggaaggaagcccattttgtgaactcgacatccacaataaatcaatttgggtagtacaaacctttcatcactctaactgccaaagtctccgtgcaatcatgtaaacgaccagctttcttagcaaggagcaactgattgaacaaacccatatctataaacccccattccaccattcactttgtgacaacagagttgggcccatgtagactaatgagttttgcacttatcatcatcacccctaccaaaatcgtacacacatgctatgaatttcattaataagaccaacaagaagccaaaataaactcatagcatacgtaggaattgtttgaataacacattttagaagaacctcacgaccccaagaagagaaaagcttagacttccaaccaaaatgtttattccaaattttatccttgatggacttaaaaaccacttttactcttcccaacaaagcacaggaggcccaaatttttatcatgagaaagaactagagaaactccaagaatattagccaacacaacataaagtttttgggaatactatttccaaagcaaactaccgatttatgcaaattaacaagctatcctgaagcttcttcataagataggaagacactccggaaccatgcataactctcagtattagcttcaataaagaagaaactatcatcaacaaaaagcaagtgtaagatcatgggtccacgctgaccacaccttaacccaaaaatattgtttaagccaattttatgtttaatgagagaagataaccctttagcataaatcaaaaagaaaaaaggggacagttggtcaccttgtctcaaaccacgagtaggcacaatgttcccaataatatcatatttacatttatggcatatgaaacactagttatacatcacataacaagaccaatccaaccagaatgaaagcctaacatcttcatcatgctccaccaatcaacacgatcataggccttatccatatccgctttataagctggaaacccttatttacctttcttgtgactgcttaataatattcaaatatttaaatctaatcatagcattgtccgagataaggtgccgaagaataaaagcactttacttcatagaaataacatcattaagaaccccgcgaaacctattagtgatcatctttgcaatgattttataaatgatattacaaagacttataggcctaaagttagtaggattgagtggttccttcactttaagaataagagtaataatagtttcattaatactatgattagtacccgtcccatcaatgaacccgagacaagtcttgcaaacatcattacccacaatatcccagaatttttgataaaagctactactcataccatcagtttaagcaagttaaactatttttcttattttcaattggacaggttgataattagatatttgtaatcctatatttatattaagttgttgaaatatgttataatatactttaatttttgtgatacatgctatattaagtaaagtatgtacttaacaacctatatgattcgatatatatatattgaatagatataatttagtatactattcatgtagcttaataatatatctcaaatatattaatttcaattaaaatatataatacaccatattaaactatagcatttggtatggagtgtttaaaataatttacttatagagaatattatgaaagagaatattgtagagaaatgtgtaaatcgtgtttggttgtgtaaggtaatatattaattgaattatactgtttggttgagtgtaagaatcttatatattattttaaaattttaaaataaaaatattttttattatatctatttaatgttaattatacataaaaataaaataattattcaataaaaatatatatatatattaattagtaaatattaaatttcattgtattttttattagttaaaatgaatattttcgtatattttatcactatgtcattttttttgttcgttatctcatttatgtataccatccgtatacaatttatgtataatgcatatatatatattattaataataacataaaaataactagaccaaaaaaattgatctcacatactaaatatatatcgtaatattttgttataataaatcgtaatcttaatgtattcaaatttatttattaattcaaaaatgatattcaaattaatataatagaagggaatattcaagtccacccttttttaaggtgtccagctgaactacccctcgagggtagtcataatactaaaacaataatgcatgcacatgaatgacttttcacaagtccagattatctcttgtaatgctaaaatcatagcaattggcatgtgctcgagtgaaaaaaaaaaaaaaaaaaaaaaaaacaagagaaagaatagcttaccagctggccttgacagtagtgataaaaaattgtgagccattggaatcaggtcctgaattcaccatggaaacaacgcctggacacgatatgcaatttcacagaaagaattcaatttagaataaccattaaaatattggagctttaagaacaaataatatttatttttgtttctcctttaatttttagtgttgaaaaatgacaagcagaagaaagaatctattaaataccagcatgtgaatgttttattttgaagttctcatcaggaaaggtgccaccataaatggattcgtatccccttccatcaccgtttattatatctcccccttgaataacaaaaccagatattatacgatggaacggagatcccttgtagtgaagttcttttccatgaacaccttttcctttctcccctgcaagcaatgaatctacaatgagcatactgataatgacaacagatgtgtgtgaagttattaatatagagacaatgtttaaatacctgtagcacaacgccctaaagttttctgcacaataaagaaaaagtattaggaaactctgccattatgagagcaaaactcagggtagctgagtttagagatcattggcaaaaagaactcactgagaagatcaaacacataccgacagttttgggtacaaccttgccatataatccaatcacaattctacctgcaataattagacaggtttgcaatccatgttaatgataaacaacaaaataaggcagttttcgaagttacaagttccccatatcccagtaaagacgtaaatcaccaatttccactattaggtactgtgttgaggagaagagagaaaatgaaagagaaaatatgagctgaatttgatttgtaataatgaatcaatcagagcggaagtgcccttaaatacaagctgttaagttagttaacttaagctaatcctaaccaaaagtagttagagatacaaaagcttaaaacaaattataacaacttagcagtacatagagcttgtaactactttatctaacccccccccccctcaaactaagctgggacaatggaaccagacttagtttgtatgtgtgtaactgaaacctaggcgtagacaaagctttagtgagcatgtcagctatttgatcttgggtaggagtatgcttgacttgaagttgattgttgaggatcctttccctaacaaagtagaggtctagttctatgtgcttggtctggttgtcacgccatattatagggatacgtagctcacttagaccaacttcaatcaataaggattgaagccaaaccatctctgctgtagcattggcaagacttttgtactctgcctctgtactggatcgggacattgtcctttgatacttagaactccatgaaaccatattggaaccaaggtaaatgcaaagccagaggttgacctgcgatcattgggatcagatacccaatctgcaccacaaaatcctgcgagaattaatttagagcatggttgtagatgcaaaccaatgtcaagtgtcctttttaaatatctcaaaatcttcttgaccactttgaaatgagataccttattcactgcataagcaatttctggtctggttattactgcatattgtaaagcacccactaaacttatgtagtgatgagaatcagcaatgggatcactattataggcaaataatttctcaccacctgtcataggtgttggtaatgagttagcaaattccatcttagctctacaaagaagatccataatgtacttcttttgacacaagtgtagacaaaattcaaggtgctgcacttgaatgcttaaaaagtagtcaatttttccaagatcctttaacgcaaaagggtcatttagagctgtaatatgagaggaaattacagtagtagagctctctgttaccagtacatcatccacataaacaaggacatataaggtgtgatacttagtgacccttctgaaaagagattggtcagctctagtagaggtaaagttgaaggttttgaatgctgatttgagcttatcaaactaggccctaggtgcctgtctcataccatatattgccttgtttaatttgcagactagtttaggagagtttgtgttaataataccaggaggttgagtcataaaaacctctttatgtaactcttcatttaagaatgcattattgacatcaagttaccttatttgccaaccattggataaggcaattgtcaatatgactcgaatggtagttcgcttgacaacaggactgaaagtctctatgaagtcatatcatatttgttgtagaaaacatttggccacaagtcttgccttgtcttgaggaactgtgccatcttgattttccttttctctgaaaatccatccacttgcattgctttgttccatttaggatctttaagagttgctgccagtgtgagagattcttcagaagccataagagccttaggtttgtaagttccaactttagctctttggatcctgggatgactgttagcaggagcttgggagcagttggatgacacatttgaatcagcagaagaagttgatgttgtattagaagtgcttgttaaagctcatgcagtattagttggagatacaaaatttgttgcagctggtattatcaattctagatctggtgcaaggatggatgatgatgatgttgtagcatttaaggtacctagtataggtgtttggacttggctagaagttgtcggaatgcaagcaaagagaccaaccatgattagagggtacatgagtagaagcagaatgcatagcaaaaggaaaatgaaactcatcaaaaattacatctcttgaaatgtaaattctaccaaatgatgcaaggcatttgtaccctttatgtttgagcctaaagccaagaaaagtacatttttcagacctaaactcaagtttatgtttgttataagatctgatattaggaaaacatgcacaaccaaacactttcaatgttgagtaattatgatttttgtcaaacaatttgtgaataggagtgtcattttgaacgacaggaggggaagttattgatgatataacaagcagttctaactacttcatcccagtaagataagggcatatgggcctaagcaagaagagttaaagcaatttcaatcaagtgtctgttttttcttccagcaacaccattctgttggtgagttgcggggcaagacactttatggttaatgccattttggataagaaatggttctaatgcttggtactcacctttcccccccccccccccccccccccaataagattgaacagcaagaacagggttatcaaactctttttctacctcagttttgaagtttattaatgcttggtactcactgccccccccggcaataagattgaacagcaagaacagggttatcgaacagacttcatatttggctttcaataggaaaatccaagtatacctagaataggcatctatgaagtgaatatagtatctatatccacatgaggatagcataggtgagggccccatatatttgtatgaataagctgtaaagatttagcataaacaatttgataaacagggaaaagaaacttgagaatctttcctttgcagcaaatatcacaaaatcatcaaaggttttattgctttcaggaacattacaatgtttcatgatggattttacaatcttggtagaaggatgggaaagtttcttgtgccacaaagtaaagtaattacaagaagatacagaagaggaacaaacattaacgttttgaacataaagcaaaatatttggactaaagaatgtggcgctcttggatagttgaaattaggaaggctctatgacataaagaccttgcttaagctgccctttcagtaagatttccttcgaaacttggtcttttacattgcaatagttagggtagaactcaaagaaaacattattgtcatatgcaaattgagaaacaaagatgagattttcagcgataagtggaacatgaagcatacgattaaaaaccaaaggcttggatgaaagagatgaatgaaagtttgtattaccaatattttggattaaaagaccagtaccatcacccatgtgcacttgatcaaatcctagataaggttgcttgtgtgtaaaattggatgagcttgttgtgcagtgagtggtggcacctgagtcaaggtaccaagcctcattagaaattgtgcctgtagtggcaatttgagctgagtgttgagtaacaccggctgcatcgatgcttgggaaatccacgttgaacctttgatagcatctagatgcaatatgaccagatcgagagcagagttggcagactggtttggactgcagtcattgaggtattggttccaggattcatagaggaatttgtggtgccacggcctgcagagtaattcttcgagtttgaactaacagtgttcgatcttggattaacagcataagaattccacgttccactaccataagtgttggagttagatccagatcagtttagtatctgctatctgcgatttttggaaaagaaggcttgtggttttgcacgaaaaccacgattggtagcaagataaacaaaatccaactctttgttgtgattttccatacgatgttcttgagacaacagtaaagtctcaatttctgcaacagagtacagatcatttctcgagttgaccaagataaagtgtcataaactggaggtaatcctttaaagattgcagaaacatgttctttgacagaaactttatggccaacagagcctacacgatcaacaagattcgttattctaagcaagtattcattaatggtgagagagtctttcttatagtttttgaagttgagtagtacacaaacctattttggcagaagtttgtgtgacaaagtatacctccagtgtcttccagatttgtgcagaggtttcagctccaacaatgtgagtgaggatgccatcagacattgaggatagcaactaggagtagagaagttgatcttgaacctcccattactgaaatcttggatttagctgaccacgaacttcatcttcttgattgagaaacttgacaggagtgaaggtatcagagagaagttctgaagttgatgtcctcgaattgttgggagaacttggggacgtcaaaggagaaaattgttatcatcaagcttgacagataactttgtgtgcaaagacgactggactgaatgctagagtacccatgaacgatgatcaactaagaacagagaagagtaataatggcggaagtagaaaaaaaattgctactctcataccatgttgagaagaaggagaagagaaaatatgagctgaatgtgatttgtaataaggaatcaatcagtgcagaagtgcccttaaatacaagctgttaagttaattaacttaagctaatcctaaccggaagtagttagagatacaaaatcttaaaacaaaatataactaacttaggagtacatagagcttgtaactactttatctaacactgtgtgcgctccaaaggtctaactgtagctcttgtacagaagacaaaaatcagaacagatgaaatgcaagttgtgaattgatattgtatagttataaacatgaaagcttaccataacgttgtttatcaatatctatatccagatatactctatgggttatttcaggaacctcttctattttctccacacgttcctcctcctatgcatcaaattggtacaatacattaaatactttaccaaggaaaggttagttagctatactatcatcataatcaaatgaagctaaaattttgataaaatcagatcatacaagtagccagagcttatgatattgcaaaatattagtttagaagatgtaacactgattagtataactgaagtcttcctgatcacaaacaaaagtagtatgcttagagttagaggtacaagaaactacaagaacaaaaagctagtccttaataacaaactgcatttttcgtcagtaccaacaaaggaaaatattccattcaaaaacccaaaattgcaataatttggtagaatatcgacgcaactaaaattccgaaacccgattttgctcttcacccgttcaaatttctaataaattataatagaaacaacaatagaatcccaaacccatgtggagattcattaatacatcgcattcaaaaactattggagcccacattgtagcatttcaaagttgggtaaataattcaaaaattcagaacgagatccgctaagtaccgaataaagaaacgaaagagatagagaaagcttactcttttaggagtagagaaggcgaatatgagaaaaattgaaagaactacgaaaagaagaaggcatcttggctgaatcagaaacgagatctctcgacgcatcgttccaattcagttcgattcggttcagctctctcagtagttaaggacttatgaacaggtatatcttccttgttgatcctccatcaaaaaccgaaatcgaacagtctcagctcagtccaatccagttatggcgagagtagtcagtggctgcagactccaggaattgcagacccaaagataggcgagtaattaattttaaaaaagaaaaaaatatgaaaatttggaatagagatagaaattgggcggttaatgtacggggaatgcaatctctgccgccattgcggctacctatttatactcccattcccgtctaataactaacgaattcggggtaagagaatacccatcggttatggaaaacccatcagttatggggaacccat

SEQ ID NO: 297230 - DNA, 1662 bp, Cannabis indica
gtattatcttgaacagtgatggtgtagagaggatccttgagtttttgttctccagttgctccaagacatttgatagcaactttctgctctatcatcttctcgcagcctcggcatatcttcttccttgagagttttctcttttcccattttcatcaacgaatgcagccacccgaaagtgtacttgctgaaccatcctgctttggcaaatggggtaaccgagtcatggctgcctttatcaatactattaggctcaccatttagaggtgtataaagaccattttgagcgacaacatcctcatcactctcttcatatttacaactcttataagcacataagagtaaaacaacagctcctggaaaagataaaacatctaaagctatcttaatcgtcacttgtttgatcgaaagaccagcaaacaaggacagaacacaagcaaatccagcaaacaagcttgcgagaatcgacaacagccgaacaggcactcttggaagctgttttaccttgatacttactatcaaggccacaaataaccaagtgaaaccttgaactaaggcttgcagccattgattcaaaggcacaacagtatgatttttctttagattctgttctaatatgaagaatccaaagaacagtaatgacaatccaagacagctgttgaagacagcagacacaatctgaagaaaagaaagaccttgaaaccaagatggaacatgacccagctttgaagatggttttttaataatggtgattaagagcatgattaaaagaacaacatcaaagaagatcatcaaagcattgttggtacatgaaaaagggtgattccaaagctcaaattgtgaaccaccagattgatcagcagcacaaaacatagcccatatattctccatcttcatgttttcttagcaaaaaaacaaattcaaacataaacatattctcaaactgttgctgcatttcccaaaataaaaacaaaacaaaaacagaagcatatgtatagtataacatagtaccttaatttgcataaaaacaggatgtgtttctcctcctcttaggcctcaattgaagtcacaaacatagttcacttcacaataaagagtcccagcaaaacaggtcttttctaagctgaaaaaaatccaagagttttgtgagccaaaatcaagagtcaagtttgttaatatataaaatgaattgagtgatgatatataattaaataacacataagcctgagtattgcgtctcatctctgtcgttatgtccctctgttcgttcattgtcttattcacgtaaaattcaacacctacgaaaaactgtgaccataaataaatatagtaatctttatttcaataaaaacaaattgattatttattattattattattttattattttaataattaaaaagacttactgccacaaaaacaatttctggactgtgcatcttgtcctggcactcagaaacttgattccctcaaactctatggctctattgaaataacatataaatacatatttgaaaaatttacccaaattactatttttttggtaaaaaaaatttcttcaaatatatatatttgacattgacatttttatagtatattataaaaataataaaaaaatcaaatgaaattaataaaaaaaatatcatttaaataatatcaaaataa

SEQ ID NO: 297231 - DNA, 1547 bp, Cannabis indica
ggtgacttcaatgccatgtttgcttataaggataggtgtgtcgtaggaaaataaggacactgagatataagatagccaagattgtttggcccagggtcaagttgaagagctcaaaactttgggttcgttctttacttggtctaataaacatgaggagggaagcagaattcactcgaagcttgatagggtatttactaatgagagttggctagaccacttttcgaatacagaagcaagttttagatgggggttctctttgatcacagctactatcttattaaacacattaagatgagtaattgtggtactaagccttttatattttgtaactactggatgctcaaagatgggtacaaggaggttgccctcaaggtgtgtaagggaatgaaagtacttgatctaaagagtctaactcagtaactgtttagatttaaacatgttttaaagagctgttatgtttctaagcatgaagatgttaccagcaattatagaacagtaagagaagagtacagtaatgctcaaggaaacctggccaaaaattcgttatgtgctgctgcagcaaatgaagaaaaaactctgcctttaaatttcttagatgcgcaaaaacagtatgccagctaccttcaccagaacttaaagatttattggctgagatttggggatgaaaacactagctacttccacgctatgatgaacaaaagaagatctgagaataagatttgttcctattgtgtaggtggaattgtggaggatgattatactaaagttgtagagcatttcctcaatcattttcatagctttatgtggaagcatagctgagctacaaggagaatggaggcttattgccttaataatgggaacaaactgaacttgatacagcaagtgcaaatttctcagcctttaagcaagatggatgtgaagaaagcattattcggtattcattctttgaagagcccactcctggatgggtttggtgttggctttttcaaaggtatgtgggatgaaataggagatgatatatctagagcggtcctggggttctttcaaaatgggagtctcccaaatccctcattcccaagaatgacaatctgccaaagtgctaatgactataggcctattgcctattgtaccacgatgtacaaatgcatacctaagatgatttgtacgagactatccgaagttcttccttatcttaaacacgataatcaaggtgcttttgtgaagaacatgtagctggctcataatattttgatcatgcatgatttaattaaagggtacactcagaaaaatgtgtctcctaaatgcataatgaaaattgatttgagcaaggcgtatgatactgttgattggtagtttgtcgctgatctttcaaaaggcctttgtttcccttccaaattcatttcctggatcttaaaatgtcactactagaaaaacaggttttagtgacccacagtgagtaactctaaaactatatagtgacacttcaacgcgcgtcactaatgagggtgactggaaagataatttttagtgacacttcacacgtgtca

SEQ ID NO: 297232 - DNA, 6839 bp, Cannabis indica
taaaattatatggcctttatacatagtaaagcccctatcatgttggtgataagaagcttaatggagtttcaagatattttcattgataaatataatattagctctacttacacatgtgtgaaattataaataacgttaaatacaaaagtacccttaccttaaaaaattgcataaaaaaggttgttaattactcaacaagtgaatcatttgacaggtaaaaagcattttgtctcctaacactactcttttatattcgtatcctgcttttcttgttgccttagaaaattcgtcaatgaaatataatttgaaaggatcaactgtgttaatcactaatcagtctttcgttacttttcaataaccttcagtcaccaaaatcaaaattattcaatttgattaacatataatacacacaaatgtggtaaaatatttcaatcaaccattttttatctcataaatgtgtgaaatacacatcaatactcaaaatacccttgtaattcggatgagcataagaaatgttgacaacccaacttaataaccgatgtagataaactaatcaccagaatttgaccacaaagagaaaaggcatatctattatctacatacgtataatgggaagcttgaccttaaattagataagacataatataaacaaagcaacaagtatatcatctcttacaagggaatttaacgacacaaaagagccctttacattataacccctgtgattttaacaaaaaaaacaccttcctccaaagtttgttctgactacattggttagctttggtatgagaactttctttctttgggttactgagaccgggtagtgtcatcacctaaagacccttgtccctactacaatacgatgtaaccaatataaacaactctaaaaagaccactatttttgttgcagtatgagttaaaagtatttccaattttgtcaagataacaaaagcaacctctcacttccagagcttgacacaattgtcgtgacttgccgaagctaccaaaccagtaactttagatactgccaatgaagaaaccaggttgtcatgagcatggagagtcattgtcttgctttcatccatgttccaaatctccagagtctgcataatataaacccggttagatactcaagtttgggcatgctaagtggtatgtgagtggcattatatgattataacaaattctaacagaaagattcggttatgaaaccaaaagaaaggaaagaatggtcaaaacttgcctcgtaacagccaacaaccaataaagaaggatgcgttggatggaaaacacaagtccgaaaattgttgcctgtgcagctcaactcatggacacagtccacttttccactggggctaacactccacactctaaccaactcatcactcacagatgccagatattctccagtagaatcccaacacacagaatggacaatgtttttgtgaccctgaaatggtaattcccatcaaacaaacaaacaacctattaagggagaagaacaacttgaagaaacagtaacaaaatgttgagcaaccatagtatgtctaaaccatagtttctcaagaaatgttttcaagctgactactacatctgtagaaagcttgccagagaagaaaaatgttcagcaccaaatttgttgataaacaaatgaactaacaatcaccgcgagccattcaagcacaaagttgttctagtatattaataaaaaataacaatatttttatatatatttaaataaaataaactgcagcagacaataacatgaacatactaaatagatgcccaaatattcaagcagaagaatatatatattatatgagacgagtacccgaagttctcaagtaacaaacaaatccctgaaaagaagaattgcaaggaagcaagaattaaggaaaatgtcatcaccaacctgcagcttatgcctgcaaacttgagtctccacatcaagtattgatacagaattgtcagcagctgctgcaagcaaccttccaagagaaggctgaaacctcaactgggttgctcctccctgattgacagaaataggctgtttcaattgtttgagaagtttactaacatatattttttgttgttggacacattttggaagatgagacatgagctataccttgaaaactccaacacaactaccgttctttacactccaatatcttatttcactgttgttatcacaggagcatataaggtcctctttactagggtggaagtccagagacataacagctgttgaatgtccagtaaaagtacgaagtgaatacccaggctgcatggtgaaatattaatatgttaaatacataaaacaaatttatacaaagtaaaacgactaaacatcccctcatgactaaggtcaacacgaaagagttaactgcatatacttcaaccttctcgttactgattcagatagatcatttattatgtgaagcagcttaaagctatcacaattttgccgctcaaattcactcaacccaagattcaatataacaatggcagccttgttacatagcctcaaaaatactcaacaataagaaagtgaggttaaaaaataacgtgccgttccaccacatatgcctacgaatgcaaaattagaccttaaaaagttaaatccataaactgccctgaaaagccgcataccttgtaacagctcttgtcacttcattctaattgctttcagattaaattctattactatttatttacccggcaaactagcataatcacagatatagcatttcaaaagaaataagaatatagagcctagctaatattgtaccgactactaacatattggctcttgttggctgggcttttaaaagctgcttttgggcaaaagaacttctattgctggttgggtaaccagtgagtgaaaagcttttagctctattaaaggtattttaagaaaagccaattttagtagctttctcaggaagagcttcctaagaagataaaagcagaaagcagaagctcagtatactaacactgtagaacatctaattgtccaagagactacaagagaatgcatactaattttccaatagaacacctaattttccaagagactaaaaggagaatgtatactaacattgtcaacatcccagaccctgacagttttgtcagcagaagatgtggcaagccttgacaaactcggactaaaccgaacatcagtgatccactgggagtgctcttcgagtgtagacttcatagtgaaggaatcagtgcaccataatgcagcctgcaatttaaaaaaaaaaaaaaaaagagcaagaagaagaagaagaaagaaagaaagaaccagggtactacacatgagctaactccaagtgttaaaatgaaacaaaaatttacagcctgaacatttcaagagtttataatgttctgtcagaaaagcttacttttcgatcatgcccaccagtagccagcaactttccatcaggtgaaaagtgacaacattcaattttatttgtactagcacgaataagccgtgtttccgaaaaagagaagcctataatgtgaaacaaaattttaggaatcttataaaccagtaagagcttgtgtgatagaataaaagaaaggtcggtattcatcatacctttgctgacatctgcacatcgactaactctatctctagggtcattgtcatcgtgggataagaatgactcaacattatcatccagagaaccatcctccacaaagcggtctatatcagcctgcaaatttttgttccaataaatgatatatcaccacaccaattaaatgctgaaatataatactgctccaggaaatattattttttttcctctcagaaaaaaaacatgaatcaatataaattacaaatgaaaattacatttgtcattagtgatgatattttatgtagtttgttataattattaagagtaagtgaattgtggtggataatataataatgtatgaaataatctgttatatttaatatattatgttgtactttaggactttattatgcttgatcttctaatacagatcatatgtaaaacgtatatgcttgtttgaaagcaaacctaacacagggcacgtctgtttgcaccgtgttcttatattaacataaaatctcttgtaaagaaatattttagttggaaataccaaactaacaaaaaatcaaaaatgggtcaatattaccatgaacattatacatcaaggatgcctaatgtttaacccaaaacctgtcttttcctgaaaaagaaacactaacacaaataagttaataaaacaattctatcataccagttgatttgatgatgtagtaagtgtccccaaattatcagctccaaacataagcagagatgttgaggaaccactagtatggggcaaagttggcatggacatagcatcaccaggtgtgtgagcagaaggtgatgagggtgaactaggagacggtcccgccgtatttgcagtcccagagctattagcgggacctgaagatgaaaccggttgctttctcttccgtcctcctgtgtgactcttcaaagccttgaacaaggatactaaattagaaaccacgaccgcagtaaaggcaaagaaaaaactaaagcccaagtataaacaattaaaaaatacactgaaatccaactgacactggaagcacaagaaaagagatcctaagtaaacaattagggatgtaaatcatgaggaaaacaaagtaatagatgttattcattgctccaagtacataatataaacgaacaaataaaacaaatctgcaccttatcacttatcatatataatctaatctaatgatggaggaagtcaaacctggtcatttccttgaaaggaattagacatgccaccatctgctgtgatactgctagtaccaataattttatcttgccgcatttgatggtttgaactctgaggagattggcttgaaagtggatgctgtgaatattgttgcctttgttgattgcctttctgcagttgctgctgctgtagctaagacataagccatatataagcatacgcaaatacttctatgaagcttttatatataatcaccaagtctaacatgttaaaacaaaaacataccttgattaacatatctgaatctgcacgaggtattacagggcaacccacttgaacaggtgatccaacattagagacatcaccaacagaacctaattggccatccttcccaaaactcatactacgactattgagaagcattctaagccttctggattccaattcattggttgatggagatgctaagctttgttgtgcctggcgcagaagatgctgttgaatttgattgtaagattgagatgactgcatcagagggtttgcttggggaggaagtccagaacgcatacgttctagtgcctaaagagaagaatataaaaaacaaagtaaaaacctcacaactaatagcttaaaacatgaacctctttccagctcataaacatactagccacatcactaattaaggggaaaacaaatatttcatgtcctcctattctagtaatcattcatatggaggatatatgtgatttagaagcttattaagcatcaacatttcccttaacagcacaaattggaatcatcctcagaatcaatttctaccctgcctaacaaaattcaattccttgttatgaaatgaagcacatgtcaaatgcatgtagtagaaaattgtgagcactgtaaatgttgtgttctacatcataccgtcaaaggccatcctttcagagtcaaattattactgccttgatttggtcctgtatgaacaagcaaaactgttaaaagagattacctaaaactagacataattttgaagcaccaaacaatacaatacattaaacacatgcacaccataccgataaaagtatgataacaagtctatatcacaatggtaaagcttgttttcaaatttgcattacaagtatccagaaatgaaaataaataataaacatgttcaagaagcatattataagtctcataattccaaaagtgaaggactagaaaaaattaaactgagtgatggatgaaacaaaaattatataccgtgaatgctgccatgaatgccaatcaaggaaccttctggaccagcaggtttagagttcattatatcaccttttacatcctgcttcatagtgggagacatactatggtaaaaaaaaaattggaaacagattcacatggtagacaaccagaataaagaagatattattaacctgaattggcccaggaacagtgggtagctggttgcgattttggacttgctgaagatttccagggatgcctccaggtgtaccatgcagcatttgcctgcaaataaagcagtactaccacataaagacaagtttacatacaaaaaacaacataagcatgcaaaatatacacttcaagacattacccaggaggctgcccagcgacagtagtagcattcagcattgacacatgacttgggtccaaaatctgactcgcattttcacctattctttgctgcacaattaatatgttgtaactaactgaaagttataccatgaaaagaaacatctcagactttatacaaactttattaccttcatggtcgcgtcatcaaaagaacccttttcttgtgaaatctttaatctatcctcatacatttttgtagccagagcatttgcagtcgcagggttttgcctcataagtgaatcattgccaacaagtgcattggcagtgccatttaaatgctgagtcccatctcttctctgctgttgctgctgctgctgctgctgctgttgctgctgctgctgctgttgctggttctgctgctgttgctgttgctgctgctgttgctgttgctgttgctg

SEQ ID NO: 297233 - DNA, 7035 bp, Cannabis indica
agatcctggtaaaataatatccaacagttatttctaaaatcattgctaataggattaaacccgtcctcccaagattgatttgtcctacccaacgacctttgttcctggtaggaatatccaagataataatgtgattattcaggaagttattcattcatttaagcggaaaaaaaagaaaagaaagttttttggccattaaaatcgacttagtaaaagcttacgacaagataatttggcaattcattgaggatgctcttaagtcttttggtcctgatatttttcgtaagtgaaaatcgtagtatatctcgagctcttcaatgaatgtgtgcctcaatgggggcattgttgggaagattaactagtcgtgcgatattcgtcaaggggacccgctatccccttatctctttatctgggcggcagaaatcttgtctagacttttggaggacaccctagggaagagtaagataaagggaattaagttgagtcgtggcggcctagtgctttcacacattttctttgttgatgacattattttgatgggtagagcaaatataacggaagctgaagcctattggcattgtctagaaagattctgtacttggtcgaggcaacaagtcaataaggtcaaaacctctattttctttagtaagaatatgccagatggagttaaaagggaaataacagaggccctaggcattggtgctccgaaaagtaatgtgaaatatttgggtttgcctatttttcatactaaacagaaagatgctgattttaacttcattttgaacaatcttacctctaagctggaagggtggaaaacaaaaacgctccctaaggctaggcgcgccactcttacaagtcagtaggactggccttgccgatttatgctttgcaaacccctaaactttcaaattatctgatagcaagaattgatggtttggttcacgaattttggtgaggatttaataaaggtaaccatgaaattcaccttaaaggcttaagacaatttgtgtgtttccaaatctcgtggaggtttgggtttccgaaaaattagagaaatgaaccaagctttcctagctaagtggggttggagtctgttgaatagatgtcaatctctttgttgttagattttggaggccaaatatcttaagggaatggatttcctcaagtgtaagtttaaagattcaaaatcctggttctaaaagaatgtggtcaaagcaaaatctattcttctgaaaggagcatgcaaaggaattcattcctaatgctagtggaaggtggacacctactaaagtggttgaacttcttacagaaactgaaaattgagatactcaaaaattgaattgtcttttcgatcatgatactgtctcagctattctcaagggggctagaccctcaggtcaaagtagtgatcgttggatatggaaaaaggagggaaacggtaattctccaccaaatctacctacctaatttaagatttggagtgtgctccactgtgtgatgtcgccccttctctttggaatagactttagaacagtaagttattggagcgtcaaagatcctttggtggagtatcctatcgaatgtcctccgtattcagactgtacttaacaaaaagttccaggtggaggaccccctttgtcctgtgtgtgggggtgaggaagaaacaatggaacatcttttcttccaatgtaatttggcctttcatctttggaggtcatttccttggggcatctttcctgtttcggactcaagtactcgtatatgggattgtgtcaaatttatctggagtttaagtaacaagggcattaatacgaatgaagttttccttaatgcgtccatcgttgtggacactatttgaaaagctaggaatgacaagagccataataatagagttgaaagcattgtaaacttaattggctctatcaccttttgttatgttgattacaataattcccctattccctcagtggcccctacctttttggcaacttggatccctcctccagagtgaattaaactgaattgtgatgtcaaggtgggaatgaagagcatgtgcactgcgattgttgctcgagttcatcttggaaagattgagtgagtgggtgactacaaccaatttgcaattctcgaatgctctttgtggtgaagttatttggctcttaattttgttgttgtagaaagtgattttaaagtagtaatcaactctctcaatagtattgatgcgagatatgagattaataattactctaagttttgtaaatccctttctacttcttttgttgcgtgtatgttttcttttgttagtagatgtaatttttcagcacataatgtgactaaatgaacttttacacacaacggtttggatgttgcaactatacctttagaactccttgacttggaaggttttatatacatatgcaggcttttactttttttttttaaaaaaaaaaaataaaaaaaattagaaacgtctctattactattgataataactcaaatttcgtatcagactactaatttttcatttcttatatgcttaatagaagttctagaacacccaacttttttggaacttctactacaaatgacagttttcaataataataataataataataaaaatattcctgtgaaatcccaaatacatcttcagaaactttcaagtagggtttcacatctgccctaaattagagaaagatcttacaaatcacaatataataagaaaaagaggatctttgtattcgatcattaatatttcagtgatacttttgctctcttttgcgagctaaataaaaagttctctttggaagcctccaaattgaaaaagtgacaaccagaacttcgatagagacttggcagttcttactctttcaagtggcacttttttacattaaagtggtctactcaatgagacgtttagccgaagaaaccaaagacagcttgttctagtttacttttcacttcccactctttcggccacagagaccaaaacaaatatacagtatctctctatctagagactagaggttgatataatgatagtagtggcagccaacatggcaatccctatagccacttttcaagagcatattggaaaccttaaaatattcagtatttatattatatattaaattaaaatatataaaatcaatattgaattacatatgtcacatttttatagtaattgacacttaaataacatttgattagaaagaataaaaatgtaataataagaataaaaatagaaataaaaatgaaacaaaattcaaacaaaattcaaaatacataaaaaaaaatttgataaaaaaatcattaaatttttttcatctctttctttccgtttcaaaataaaagtcaatccaccaaaataggaaaaataatatttaattagaatgacaattccaatactttaaaatgcattcaaacaaaaaaaaaaaatgaaaattattttctttccattccattctattttattacctccaaccaaacgccgccttaaagtatctcttagcatttctttttctagagagttgcattttcctttctttgttacactttattcatttggcacttacacagaataggttacacctttttaagtaccaaaatatatatgtaagtggaggtatagagactaataagcataaaagatatccaacacaatttgttttaaaataagtctcaataaagctatacatgtttttttttctccttcagttcctttttttattcacttggcaaaccgttagttgttaaataaacaaaactatttgggaagtcaaaagaaaaccatgtctttggtttgtactccccttacaataagggtactggactatgaatatacatgtgctttaaatgaatctttagttttacataatcaaatcttattaaccagcgatgtccatttacacaatttctattttcatatatttacagccctgagttatctatgaattctcacttttgtttatttatggtaaataagccggccaaaattgtacgtctttcacaaataaatgcgactccatagataaaattttgattgaagagaagtacctagttctctgttgtacggacacctgctcaccaagtccatccgtaaaatacagatgctggatctgttaaccaggaaagaattagcatgttaggaactggaattatgaaatgaactttacatatgtgatgggtttacttacagttacagcactgccatctttgtcccgtaagcatacatttaagtatgggtagcctccttttgattgaagacaacaaattgtttagtaagcccattggtctcaccaattttaccgcttcagtaaccacaaacaggacctcaatagaataattcttcaatctaaccctacttttcaatacctcgaataatttctcccatgaaaagttggtaaggccatattaaatcttcaaaacttggtatccttttcccgctggctgtaaccagttgcagaagatgagacaacaatcaacgatctacctgaacacaaaaaacagtttcttcaagagtgaaacaaacaagagtgaaacacttgggctttcttcaaatttatggtttttagtattgtgaaaaaacacaacatccaaacttgaataaaaaacaaattgaaaattgagattatatggaaatgtgaattacaaaccttctagcagcagcagtttgtcataatctcgtccaggttagtagtgccaatcaaatttttatccaaacaaagagggtattcagcattttctccaacagctcttagaccagggaattgaaaccactataaaatcagtcaaccaacatccagaccctacggaaggatttgcattggcctcatatacctgatttgagaaacagtttccccagtcccagatcatccccactcctcttggcacaccctgaaacagagctaaatcttcaataagccattcaatacagccaaaagcacaatgtttatgactattgcaaaactgagacaataaaaaacttcaaaatatcaatccaacttgtataagaaaacatatatcttgaactatcgatgagcctagaactgcagaacaacaaaactgagctttatttcaatcaccaacgtcataattttcttctctcttcttaagaattacccatgaacaagacaaaaaactgtaaagaagaaatggcataccagatgaaagtgcatcttcttgaagaaagaggagccagaaagttcttcataatatcaataacctcgatggccgagttgacttgattgaaaattttcaataatcgaaaccgcagaccccacctcgaggaactgaaccaccacggggctgccggtgaaccatgtgccgccgatcaccggaagagtcgttgttttggtcagaggagttgacatccgaaggctctgctttaacgtcttgtccgagatctcgtaaaatcggttgttgctggttctggccaccctcatctacctcctcttcttcgtcttttctcgcgcgtttaagcccgatcgagaccccaaacaatttcggtctcatgtcctcatcttcatccttcggtccctcggggttcaaacccgacggtgctccgcccttatgtgcagtatcctccgacgaaggcataagatccagaggtttctccgccggcatacctcctccaccaccggctaccagctggctggaggcaaagtttgtcatcaaagttagtatattgttacacaagcccctgagctgagtcaactcgtggctcagctgcgagttctctttcctcaaacgctcattctcatccacaagctccggtaccgtcgtacaattggtcatacagtgcgcggcagcgactggaggagtcactggcgaagagtttgaggagatcacctgctcgtcaccggagttagccggcgaaacaagcgctgccaacggaaccgccgcaacggtaacagctgctgccgccgcagctgtagcagctgcagcagttcccgtctgcgagatcttgcgtcgttgaatgtcacggaggagtcctttctctcctctcctgaaacaatcgttcgcaaattcccaccgatccggtactactttccgaaatcccttaaaaaattatacattaaaaattcacaagcaaaaagtgtcaggaaattctactgtttggcagacgagaaagtgataaaggaaaaatagaaaaagaggctttcatacataagtgttgagctgacgaacgaagctagaaaaattgttgtgcttaaagtacttcggaagcaaatctctggcgaattcagcaggtctccaaacgatgaagcttgatccatcatcattccatgaaatcaaatcgtcaacggctggatcatcaacgagttgataagtcttggtcaaaaatggcgtcggaagtgtcctctgagagtctgctcctccactacagccaccaccaccaccccctccgccgctataaccaccaccaccgcctccgccgctaccactatgtcccgactccccaatctgttcgactggcaatggcgccatgtagcccagactcaatctcacagatctcaaccgtaactcaacgatatcaactttttctacaaattacttaggttttcctctgctactttatccattaaataatatcaacaacaataatttcctcgcttcgttttgcggaaaccagaaaaaaatctaagcttccattgtttcaactactacgtaatggctttactcagaataaccaaatcctcgtaataaagcttttctcgtttccgtatcttgattatgaataattaaataaataatactgtgtttattatcatcataattacctgagatagcgagcgaggattctttcaatcaaagcaatataaaaggttaattatactttttctcaatattattattattgttgctgtagtttgttattattttctcaggaaccaaacaggtcgaaaaaatcaaaccataggcgagcttcgatgaaaagaatagaatttgatgtttctagaagtctctctgggagttaagaaagagaaaaagttaaaaaataaataaataaataaataagagagagagagagag

SEQ ID NO: 297234 - DNA, 1055 bp, Cannabis indica
ccattcgacgtgtcacatctctaacaccatgctacaaatatgggacttgtcccttttaccaactcgcaaaaaaactcacggaaaaatgtgcaatgatctccatataggattgtcacaccactattctaacacaacctttcttcatgctccaagcaacgactcatgcacgtaggatgtcatacaatgaacagtaacaatttactgcttttagagattaaccctcatctactagcctaaagttggcatttatcttgtatttactctattagtaggctattttgtatctaaaaacttccattaggccttgatcagactgatccaaactgcttataaataggatctaccaccaccatgaaaagagttcgaacattcagattttacaaaagtgttcttgagatgaatgcttttaataactctattgctacaagtttaatattactaacacgtaaattaaggctcactaacccctcaactacataaaaatttattattttatttcttagcttcaactcttttttctttaaaaaaaaaataattttcgaaaaattcagtaaatattttagtgcttacgctgagagttgaagaattttcttaccatcattgtcatactaaaaacaatttcacaaggccaactcactaaataccaaaacataatggtgaaaattaggctttcaaccctcttaactctcttctaccgaatttatttaacaattttaaggtatttaaaatctaatttattggcatcaaatattcaaacgttacctctaaaaatacacatacatatttttttttggcgtggtgattaaaatcacacacgattaaagcaacaatcgacaaacggcgacgacacctcctcgaaccagaatagctcattgtctaattatgcatttatttttttgtctaaactcttagctggcgtttggttgggaggaatgaaaatgtaggaataggaatgagaatgagaatgaaaatatgaatgtaatagaataaaatttaaaatacaataaaaaaattaataaaaaaattattatttttttcaaatcttgcattggaat

SEQ ID NO: 297235 - DNA, 1294 bp, Cannabis indica
gttccaatgttgccgagcaccgcatgcaaaaatataaaatttctatatatgacatataaaatacattctgaattcaaataaatcatcataaataaataattttcataattaaatcctatttatctgctaatttctaaatttaaactaagcggtctttacaatccataatttttcctataaattaataacaatgtttttccagtttcattttattgccttaaatttcttataactatttgattttcttctcctatttccaatccaactcttaagtttctcttactaatttatctttaattcttaattaagaaagcaaaattcttttaatttgttgaaagaaagcacaaaagtttgctctacctctttctctacaccgtacacacaactttcgatcgctagccactctgtctcgccgaaatcaactcctattttatacagtattttctgtctttttcttttctggattttgtcttaattatatatacactattttgtctctataaatgtttttttattttaatttttgtcaaatcctaaatgattataggtagatctatatagttttggtatgagaaggaaataatcatacatcatcgaccagcaattttccctgactataccaattgaatttaaaatgtaataaaatttctcaacgtagaaacatttttgttgagatattggttgtgtattttcaagaagtataacactacaatagtcaaagaatggactattttcaaatataaacttaaatcttttataaatgtttccatatgatttgttttgatcaatagtttttttatggtgaaaaattatatggcaggtaaaagagattcattttgtgagttcttaaagcagacttcttgaaatgaaaattacttaagttctacacgattaagttcctgtgtgctacaatatttttttaaaataataaaaataaactatttctattatctctatagcagatttagagattgcattgtaagtattttatatcatttatgtgttcaaagttatttaatgtcaagtatatatattttggacgatgtatgaataagttttagataatggtaaatatattgatagtttaatacaaagacccaatggatgtttagctaattaaaaagtttttttagttaaatttttttcaaattatctaattgttttgttatatattattacaaatatattatctaataatctaatgtaataatattagcaataacggtaacgaaaaactaaaatatgttataaatattaataattatgtggatgtctaaatcttttatttattacc

SEQ ID NO: 297236 - DNA, 1743 bp, Cannabis indica
cgtttcttttaatgtaattagaagaaaaaaaaacgtttctaattttcgtttctgttttacaggaaaactcgaatttggcttgggacgttcgaaacagcagaagacgccgctcgagcctatgacgaagcggctaggctcatgtgtggaccgagagctcggactaacttcgcttacaacccaaatgcaactcagtcatcggcttcaaagcttctctcggcgactctcacggctaaacttcatagatgttatatggcttctctgcaaatgaccaaatcttcatctaataattcaattcaacaaaaccctttaataaaatcaccacaaagctccagtctttctgctacatcaaccaccactaagtcttcgccggagaagagaccggtcccggcagcggtgacagagaatgagtttgggtcaaactctgaactacatgttaagaaagtcaaagtcgaagttgatgaaagctataataacaataataataataataaccaaattcagcaatcgtttatgattcttgaagaagatgatcacattgagcagatgattcaggagcttattcattatgggtcaattgagctgtgcccaaattctgcttactagccatttttagctgatgatcattactattattattattattattaacttaaaaactagtactttatatattctactactatatctatacatatagtagtattttgactctatttttaggaacaaaattctcttcttctgattctgagtaaccaaattttataaatgttgcttcttctttctagctactctctctgtaaatctcaatgtaatgtattataatcttattattctctctctctatataaatatatatttctatgtccttaccttagtacaagaagaacagaggttttcataattttacagaacaaaacagagtattattaattccaaaaaaaaaatagtaggaagtttcaaatgaaaaatacgaaaatgacaaaatttaattttatttattttcacatactcaatgcattttagtcaaggcacaaacgtcacttgggagtgtcaggtcattggcaccattgtttttattttttttttctcttgtcttttctctaattttcttctttcaatatttgtcagtatagaagtgactttgcttttacattagggtatctaaatatatgacttattcacttttgtatacattctctagtgactacctgtttattgctcacttcttcttctttaggaaaaaaataataagagtcatgaaaaagtaacttttctttgtattggaactcctttgtcaagaactatgacagttatggtaacttgataattattattatattttttaaagtgtgaattcttaagagccaaggttgcattattgaggattatttgggttaagtttataaatcagtttagtttcccatgttcagctctatctaaagaaactgactaagaaaattgaagaaacaaaaaaccgaaaaagaaaaacagagaaaataactttgtttgaaaatgtgggtttgaaatggttctttctcgactgatatttcaactcagacaaagcttttttgttttgggtagtagagaaaatgctacatgtcatccttcacccaggtgtaatattggtattagtataagacatatataaaaatactgtcaaactcaatattaaattatataatatatatattaatatgtcattttttttgtagagtcctaatataatttaatattgggtcacat

SEQ ID NO: 297237 - DNA, 1935 bp, Cannabis indica
aaatcaattttgcaggctatttcgacttacttgatgagcatttccaagctccctattgcgatttctaataaactaaggtcgattatactccaattttggtggggtacaaatggtgataagaagaagattccttgggtcaagtgggatgttgtatgtaaacctaaggctaagggtggtttgagttttcggaatctaaaattgtttaataaagctttggtcgtgaaacaagtgtggagattaatgcaagaccctgactcattgtggtctcgtgttttgaaatatatatatttttctacaacattaacttttggcggctagggagaggaatggcttgtctcatatatggacaagtctagaatagggattggagcttttgggaaaaggattgagattattgattggggatggtagcgatgttgtgaatttttgtgatccttaggttctaaggcctagatattttcagcctactactactagacttgatgatggtcgattggtggtgagtttattggagctaataattgttggaatgctcttaaattacaataattcttcttggatatgaacattaaagtgaatttgggaattcctttagcaagtggccaaagtcttgaccgttggtgttggcactacaataggaatgtgtgttattctattagaagtggttatgtactggctttagaattgatggaggaggaggaaataactcttctatgaatttggctcattggtggaatggatgtggagtttgaaaataccaagaaggtgaaaatatttttgtggagactatattacaaagcttttccagttgcaactcaattagggaaaagaaatatacatgtgtcgaggtggtgcccaagatgtggtgatgaagagaagagctttgaacatgccttgagctcctcgttgaccagtttattattttgattgggtgtttgggcgaagctctctcctcgtcgttctggtcccttcctgaaaattctggcgtattatttgaagagtttaagattgaaatatcctccaaggtggcgatggtgtggtggtggctttggtatgataggaactctatcctctttggtaagaaaatttcaaggttggaagtggttaacgagctggcacttgcggtgctggaagatttagggggggatgagtgttatgggtgtgctctaatagctggacagagctcctcccgtccttctcgctggttaccctcggcgatgggaagctttccctttgcatagatgtgttggtggttaagggcaaaggcttttgctggttttggcgaggttatacaagatggtgagggtgttgtttgggcggcctgggttgtcggttttgttggggccgggatttggaggttgcagtagcagagttgttggctctacgagtggggttgttaggggctattcatttgggttttaagttttttaaagttgaacttgattcttttattgtgtgtaattagattaatttcccccaaagtaatattgtctttaaatttgttgttgatgagattttattttgttaattagttgctgttggtggtagtacttgttgtactatttgtaaatagtgtagcacgtatactagtaaagtttgatattagttttgtaggagtttaaatttggacaaatacttactttagatttttgagtgttcatgtaatgactgatttgtttctttaatgaaaatcattttttgaaaaagaagaaaaaaaaaggcttagaaaccaggcactacaatatatgtggtcctaaatcattgatacatattttgcatgttagacttttatttgggcttacattatattttattggttttattaaaacttgggttgattggatagttctttgctgtgttagcccatgttgttggtgatcaattgttaatgggcttagcatctgtgagtaaagtctaggtgaagcagaagtgtgg

SEQ ID NO: 297238 - DNA, 2869 bp, Cannabis indica
gggcataaaacccaacaaaaccgacattgtaccaaaaaagtattgttgtcacttctatagtctgacatgattgggcagagatctttagcgacatcatatggggataaaacccatcctaagtctttccacaactcacattgtcttatctgaggaagtcctcagcttccatagtgtgctttcctttcactctcgggaataagagatgtcatgcacactaacgctccatgtgtccctaccttgcaatggatgtatccttcgcggaagcccctcacgggagctcgggctgaaggcactaattatctaaatattatcttggcctcttctgttagatcccacgtgtcacacttacaaaaatctggacaacatttactacccatgctttcgggacgacctacggtctgggagcttacagtatttccttgctttctcttgattgatttttaacatgtggcactgcttgagatctcactatgtcatgaaaatggttgtcagctaatacgttattgatggtggatgtcattatcgtaaactggcataactctaaatgcagaatctgacaatgcgtgcatgttgggtgcgtgcctcaggagatgccaaaaatggaagcgagttgattgattggaccgttaatttaatatgcactcttcactagacatgccataatggatgttaaacatttgggctgataccgtcttctcaactccccatccgtcaaatcttcagatgctattctggtgaatgatctaggtcgttcacttcccgtgtaaggaacttcacttagtgcaaattcaatatgcagagcatcctcaaattgtcactttttgaaccagagtgcgcacgttaccatacatgatggagttaaaccatcccacacaacacccttgttcattatttagtaagtaatttcgttgctcttcctggttgtatacagcttcatgcttagtgtaaaatactagcgttgggcttgtactagtgtgtatcgtatacgagtctctacactctgtgcatattggtcttgtttgaacgatctattgcaaagagagaagcatggtggtttgacaagatgatagtgtgtcgaggggtcattcatctggttagagagattggcttgtcccctaatacaatgtcgaaggtcgaccaccacgtactaaatagatttttttattgacttttttattctgagttggcccacttaattctgcactaactgtctttgcaagtgtttcctggtttaacatgctaggcccaaggaaggaaactagttccccaaaatctgatggtgacggtactcctcatagaaagaggatgagacaggagactgttatttacactggggcttccaatgcatcttcatctactctagattcccgtggggaccaccccagcgacatggtcaaccctgcctgcaccaacaatcttctcctctgaaaattcccttcgtgggattcacatttcccatgaaaattgttcctctcaatctccctgctatgcatagagaagggaagattaaaagacctttcgaggtgcgtcttgaggaagaaaatggatttttgcacaggcgggccagcatacttttggccgtgaggagggttgaagtcttggagggcctccatgcctcaatcctaattgggccaagagttgatgtagaggccctggaaaaacacttggcacccaaggtggggactgaggctgcactctttccagcgaaactcttggatcaagtggttggtaacgtgtccaagttacctttggagacctgggcaatctataccagtgttgatgccttttccctggctcacgctgccaaacaacaagcgattggggtgaggttttgacctttccattttggtttctaacattgtacctagccttctcatttttccttgttgtaacaggtagctttattggcagaaaaggacactcaagaggtggacactttggtcgtggcattggaacaagctaagctaacaaccgcaaattgcatgatgccaattggacttttctcgctgaacttgcggaagccaaggctcagattgaaggcctggagagagaaaattagctactaaaagataactatgcctagaaaactcatctcatacaaggtacgagagccatctgtgatcttcatagaaagaccacggagaggatgcaaggggtaaactcttcccaatagtccaacagcacccaatcctgagcagctgtccgaggcagtggttcctcctgagactggggcctataatttcctccattaattctttcctctttgattttcttattttacgaaaacaattttactgtgccctaaccgcggggccatttgtaataactctatgcctttatacttttcttttgagctttactcctgatctgctagctttttagactattttaagggttgtcaccttaggtcgtcttgaagtttgtggttccaacaaccaccatttcagaccttttcatccattatttaattcctcaactgatttaggaagggtccaaagactcttgcctccaattttcaggtaggattactactgtcataaccctttttagttagtacaaactttggttaattaaatatcttgacgtcacgaactagcttctaaactattctcagtccacaagatagttgcagagccttagcacttttcaaatgtctttgataattaatttcccttttaggatgttgctcatagagtgataattagggatggtttccttcacaaaagggcgagcttctgcgttccaagcattccccaactcttgctctttgtgaagttaggttcctggaggaatggttaaaaatattatagatttcaggcttcatcccttgtaacgccctgtccaacagggacgccacgtgtgtgcaatt

SEQ ID NO: 297239 - DNA, 1852 bp, Cannabis indica
ataattataatacgaagatacctgggtgaaaaagacgaggagagtgagaatcttgaggaccttgaagagaagacgaagaagaaaaaagtaactgcgagaccatgattccagaatctggaggcgtttctggagagagaggttaggaaaggtttgaaagtacgggaaagaggaggaaaggctggctgttccgcagaggatgagcgttccgtaccatgtagacagcgcccacaatgccactttcagcagccacacctttgggtgtttcaatttttggctaatcagcccacctatctgcacagatataataaatacataaatatgtaagtaaaatgttgtacctcaccatctagtaattgaaccagagaaagtagaaacaaaaagcttatataatatataaatatatatatatgtatatacgtacgtgttgtggagtttggtccattgaagcggaggtggcgtagaatttgagtacagcgtcgtcggtggtgtggtcggaagcgtcgatggatggcaacaatgtgtcgcaaactgcagtgagggatctcatttggcgtttgctcaagagagagtttggataaatcatattactgctattcccaacatcatgattaataattacattctcactagaattaatagtagtgttattcatcataatattattccaataatgaatactactactatctaactccatctttaagtcgtcttctagtacgccaataacatgcgccgctaccttttgctccattatataagaaaatcttatatgttctctatcttaccaatagtaaggtggaaaagatgaagaagatggtggtagttattatgtattggtgcaataaggctttatataataacaatggagttagaggcccattgtaaattgaaggaaaagagtggtatatgaggcaattatctaggagtactacgtggaagtgattccaacgcaaggtgtagccaatatagtgttgatgagatggcaccacatgcaaatgcaagacaaaaaatgtgtcataattcaattttattatttaaagattgatttaacgcttaacgctacttcttaaatacttcttaaatacttactttcccctatgtctattctattatgctatttttcattgattgtttctttctatatttttctacacaaccccaccttaccatattttgaaattattatttttaattaaaattttggactttattagagtttgcaattgatactaattataaaagaaaaaagtattgttatttatttatgtttattttttttgggtggtaaaatcatttacaaagtagaaattataattttttttaggaagtagaaattacaattttgaaaagaaataattctgtattttttttttttcgttttccttaatttgtgcacttgtttagatgatatattcagatataaatgtttatttttaaatttcaaaaccgatgttttagaatgttgactaattaagcttttatctaattagttattgtataagagataaaatctttacgtcatagtttttcccttttatatttgcaactggtaatgacaaattgttatgcatggtaataaattattattattatcatgttttccactaggtaataaaatattgtcaaaaaaaaaaggcaataggtcaaacaagttgtacatatgatcacaacttccaaacaattggactcttttaaaaaagttcagtcaaataagtttatatgatcaccacaatttgaaatatcaacaaatatatatttttttaattttataaatgacaaatgaatgtaaaggtcaaatatatatatatatatactaggtgattgttacgtgccaagccacgtagtgttagtt

SEQ ID NO: 297240 - DNA, 4896 bp, Cannabis indica
gtcagattctggcattgcttttttgttttattattattattattattattatttttaattgtaaaggtctttcaagtttgtcttcaattattaagttcatgggtgaagagaagcagagtcaggcatatatttgttagttggttgaacttattgggaatgaatgtctaaaatctctttcttgccactctgaagttgtcttttttcactaaaactattgaaattcacaatataagctttctttttgcaactagggataacttgtgtctttggtactgcagataactggacttgctttctcttcaaatgatcctgactacatctatatacaaggagttgattatgaggtattgttgcaagtatttacgtcaatgtcacttggtgcttgatttcttcagcctgtttactcaatttctagctagtagtttagtacctttcacattaataaacaagttttcaccatcagttatttacatgacatgcctgtttttgtgttattataatctttgatgaaattcaggaagcatcatatcccatgcttataatttctctcgcttccacgtgatttttaggacattgattcttacgggtgtttgcaggtactttgtggtgattggaaaacaaacaataagatattctcatttagaggagactcaaactggcttggttttagcaaggtacacactactcatgctgttttgctatatcatatattgtgtagttacatacattttgaatttaacaaacacaataaataggaggttcaagttttcaacatttgaaaacatcaactgttgtattttgaaaacgctgtaagagacaatcccattcccaccccccttaaagctttgcttggattcacttttcttttagtttttgtttggaaattttccttggcctcattcaataaaacaccaatttatttacacaaatcttatggactatttcagtgccacaacagagatgttctgggtggttggtgcgattcggggagcatttttgtggctgatgttgtagcgaaacagagcgagatagattaaggttttgtcaattgatcctccttttaatctactctagtaatctcctttagtgttaaatttacattttgtgctctttcacgtgacaattttacttaaccaaatcttctacacatcatcaacaagttgtcatttgtagatttcattcccaaatcaaactatcaggaacgaaatcatacattagatttttacctagaactaattgactgttagccattatttattttgaaactaggatccctctctagccaaccctacaaaaccctacaactgttaacctttataacccacacaggagttatcaaattcaaaagccattttcttgttacaggcaggcattatttgttgtcagtttggtgaacaaacccatctgactataaatctttctaagtggaccattttcgtatttgagccactactacttgggttgagttgggtccatgttatgggctgtttttcagctaaagttgatgttttatactcctgtcagtgcttccatttttactcctattcttactgaggagattgtaggataagatttcattgacaacaagacattttttttttctgaaaatgcccaaacagtgtatgctctattctattatgaaattattttttggtgcacttttaccaccgcattagggaccatatatttaactcttgtggtccttaccttatcatagtgtttcaatgtttaataataggtcaatagtcaaaggggctcagggtatatttgttcgggaaaatttgtagtaaatctcgagctgttttggtagactctatcatctattttggtactcagacgaacttttaagtctattgttttgtatggttgtgtatttcctagttatttagggtcattataattttttttaaattttaactaatttacagtaccaaaaataaagttaaaataattgtttaccacacttaaaaaaaaatagtcacatagttctaataaattgtacacattataaatagtagtgtagcacttttttttgtctctagattctaatttagataaatataattgatttaaaaaaaatatattcttttgcttatcttttttggtagagatggatggagagatgaagagagagattaacaaaaaggaaaagaaactaattatgtttttatattgtttataatttaattaaaattatttttcttctttctataatcaattaataattttctttaaaaaaaattatgaagtgaaccaataatagagttacatgcagcattctatcaaaaaataaatgacttcaaataagcaagtaaaagtaaagcgagtgaacgaatatggttaccctttaaaaaaaaattatggccctatttggcttaggttttataaattattttttagcttttaaaattaaaaaaagtcattctacaggtgtttggataaaaaattaaaaagttttttatttaattttattttttatacttttttttttgaaaaagttaggatttatagtatctaacttttcagaagctattttaaacattaaaataatttacacaatttttaatttatttacaaagtatttttaaatgatatccaacactttgaaaataatttaattaaaaaatattatataatagttatccaaataggaaaaataaaacaatttatatttattttatacttttatacgcgaaagtaaaaatttaactaaacgaccatatatgtatgactcttattaaattcaaaggccattttcttttgttatcagtttggtaaagaaacccatcggactgtgcatataataaagtgttcataattgtttgatgggtctatctgagaccagccactgctattttaaagcttcaattcatgttctatagtttgttactgtggaatggggattgtatgattagatttcatttgacattaaaagattatgaaattattatactatgggttgattgaacaagtgtctttttaccgatgtattaactcttttgtggtcctcattaatgtgttcaatttttaatgatatgtcaagggtcaaaactcatggtagggtattaacaaaggactataaaatattttatggggacaacaaacaatgagatttttagttaaactaacacctcaccaactgccaattgattgggatttaaatgggattgaatacttgatgaagaggctcatttgcatgtgattctaatttagtattttttttctttgcaacaaaataataaaaaatggtaaaactatatttgtggcatcttaaccatcaaacaaagaaaagaaaaaactgaagtcataattattactcaaaaagcttaattagttctattgataaattggtttttttcgtttttaattagttttagtgattaacattaagaactaatgctgttaagaaatcaaaattggatagtaatttacacacacatattgaacaatacatgataaggtggattctaaagtggctctcatactcaattcggaataagatggattttatttcaaaactaattggctatgaacgaggagtaacccattcatcttatataatattttatttgtacacattagtaatgtcggacaaactttaataaaatgtgcaaattaaaaatgagtcatcattactctttccgacgaaaaggtgagaatctcaagtaaccatcttaaatgaagatattgtggctgcccatcacaagaaatgtgtaaaattttgtgcaatgtactttggtttggtaaatgatttctaagatgatgagcataaagaatgaaagaaactaaatggttaaatggttagttagctcctcatctccaaatttcttaaagtatttcaactatttcattagctctagtcttgccattttcacaacttccactgaatgatttttttcacagtcccaccaaaaggagactaggagagaatataaatcagaatcaagagaagtaaagtatcccatcttcaacctgccgtcgagcatcttcctaaacagcttctcagcctcctttgtttatttatttcgtttcaaagacaccactagagaactatagcattcttcttaagaaacaccgcctcccttaacaaccttatttattaatcaatttataggtctcattaagagaagtgtccataaaaaccaagaccacttccaaagatagtgaacttgtatcatatgagaatgtccagattaaggtaaagcaggctactcctacatcactaactaatgttattccagatagaactgagataacagaaggagaagaaaataaagatcagtaggaactaagcatctatcaactagctagagatagaagattttctctctagcggtcaagcaagcaagcatggacctagagactgaacaaatggatgtaaggacaactttcttacatggggaattggaagaggaaatctatatgcaacaatctgatggctttgacaatgggaatctagatgaggtatgcctattcaagaagtctctttatggcctcaagcagcatctagataatggaatttgagatttgacacctatatgtagaatattggatacactaaaactaagtatgactcacgtgtgtatttcagtaataaaacctgcttactactctatgttgatgatatactgacatttagcaaagcaaggtcgaagattgacaaacttaagaggaggctcagtgatgagtttgagatgaaatatttgtaaccacagaaagtattgaataagttcgacatggtgtttggtaaatttaatacacaagtatacgcaatcgaatcaagtaatataatgataaagtagagtatagtttcctcgatgattgattatcaattaccaatcaaataattctttgtttctatttgattaataaaaatattagagaaaagtaaataaa

SEQ ID NO: 297241 - DNA, 5984 bp, Cannabis indica
ttatcatttttattttttgaaattgccagacaacttccattgagaatgaacaatattcaagttctctccaaagtcactttaatttttccccaaagtcagcttcaaagtcatttttatttttcctcaaagtcatttgaagtcaacatattattaattgtcgggccggctctaagcttaggtagctagtataagagaagacgtgttgtgctggtttcaacaaaaagaaatggaaacagaacaatcttccaggaattcaagttcatgtagttctccaatcactgatacaattctaaatattgattcaccaaagtatgatgtattcttgagttttagaggtgaggacactcgaaagaacttcatgggtcatttgagagtttctttgtttgcaaaaggaataaaaagcttcatagatgatgatcaaatcgaaagaggtcgatatatatctacacaactactccaagccatagaagattcaaagtgttcaatcgtgattttctcaccaaactatgcttcatccacatggtgtttggatgaactcgtcaaaatcattgattgtatgaaaacaagaggtcaaatcgtaatacccatcttctacaacatcgatccatctgatattcgcaaacagacagggcgtttcggcgagtcatttgctgttcacgaacaaaatctaaaggatgagatggaaaggattaatggctggaggactgccttaaaagaagttactgctcttgctggtttggatatacaaaactacaggtatccttaaatatgcttaattaatattaactgatatcgttcataattcatttttcctttattttaacttgttttagatatactatctccatggcaaaaagaaaatctttgtttgttttgggattatttttatttattcataggatttattttaattttttttgtttgacttaattattttctgatttgatttgttattttaggtggtgtttggacgtttgctaatatttttttttatttgattttctgtttttaaattagagaaatgaaattattttttaaaaaacatgctctttaaaattattttaattaagaattaaaattttaaaaattaaaaaaaaaataacttttaaaatttatttaagcagttttttcttcttaattaatattttagactctcacctgaactcgattcggatctcgacctgaatccgaattgaaaccctaacttagattcaaccccgaattcagaacttggaccccaaccccgaacttggacctcagaccccgtctctggcttcgatcttcacccagatctcagacttcggggctagacccctgacccgaattcagatctggatccgacttaaataaaatcaaataataaaaataaactttacagaacatacttttttttaaaattaaaaaataaaaatattactaactgatataattacttttgtgaaaaaaaaaaaatataactatttgctagctgttatatatacatataatatactctatttttatctgaaaatgaagactattaattagaaagaagttgataaagattttggaatcagcatattaaagtagaggtactttcaagtgataactttgatgaattattagtagcagttattttctatctatgcagtggataattgttagttacttacgttaagaaagtacattcattcagtatgtatttttagttagataattattattaatagattaattaatttaatgtgtttaacataaaagggatgaagccagctttataagggatatagttgaagatatatcatctcaattgagtaacgtgatgccgccaaaagttgtagagagtcttataattccatggatactattggaatatcagaagcttcacaggagtccagtgaaaatgaagcaattacttagtttgttatgtcacgtgattgtattgtaaagcagttagtttgttaattaattagttgtaaattctgttacagttagttaatctcaactaactccttgtactgctttctttgtgtgaatatataaaaaggactcctactgcctcaagatttacattgagcagtatcaaattctctctcactccattcagttcatcttccctgttttactctgttctttgctctttttcattcttcttcatggtatcagagcttcatggccaacaatggcaatcaagatcctgctgcaacacaaactccagcaactgctcaacatcaagaagctgcattcccgaacaacaatcttctaccactcaatctaagacttgatcgaaacaactacacgctatggaggtcactggttcttgcagcaactcgagcatacaatcttgatggatacattctggggacacttccacaacctcagcgttttctaactggtaatgtccctaaccctgccttttcctcttggttacgccttgaccaatttctaatgcattggttgatgaactccataaccgaggccatgcttggtcatgttatcaatgctcaaacttcatctgaaatctggaacatcttcgagcaactatttgccacaagatcaagagctaggatacttcaaattagaggattactccagtcaaccaagaaaggttctctatctgttgatgattacatcttaaaaatgaagcaatacagtgactctcttgctgcagctggtcaatcgttaacagatgaggatctcatactgtatgttcttggtggtcttggtgctgaatacgaggctgttgttgtgaatcttacttcaagatcggaaaaactcaccctccaagaagtccaattcatgctacaaagccaagaaatgaggataaatcaacacaccactgagtccctcactaatgttcaagcaaatcttgctaatgtctcctacaacaacaacaatcgaaacaaccaaagctacaatggtcgtggctacaggggttcaaatcgtggaggcagaaccaacaacacaaactatggaggcaggggtagaggttccaacagacctacatgccaactttgtgggagagttggacacacagtaataaagtgctaccacagatttgacattaatttcacaggtcctacacatgatcaaggagcttcaaactcctccaccccatccgaaaccccacaagctcatctatctcaagccactaccacaccagaattctcaacagattggtacattgacagtggggccactcatcacatgaccaacaatgcagacaacctaaccacctccacagattacaagggcaaggcaaaggttatagttggtaatggttccactatccctatcttaaaaataggttcaaattccattcacacacagtcttttaatcctttaatattgcaagacattcttcatgttcccaatgtttctaaaaatctcttaagcatttctcaatttaccaaagataacaatgttacccttgaatttgatgatgtgtgttgtcttatcaaggacaagaacaccaagcaagttcttcttcggggtaaagttcaccaaggcctttaccagctcaaagtcctcaactcaaagtcaccccaatcttcctctgtcactacagaagtctctcccaactaatccgagtgccttcaacttcaccaccacaagtaaccctgtgtatgacaaatcaagaacttctgatgtttggcattgtaggctaggacatccctctttcaatgtactagctaaagttcttaccactgtttctcctcaaactaaatgtactaaacacactttctgtgatgcttgtcaaataggcaaacaacaccatttcagttttaaaagcactcctaataaaactactatgccttttgaattaattttgtctgatgtttggggaccctcttttcatgtttccaatgatggatacaaatactatcttagctttgttgatgattacactaaatatgtttggcttttcccaatgcaaactaaatctgaagtgaatagtttattcatcaaattcaataactatgttgaaaggttctttcaaaccaaaatcaagagtgtacaaactgatttaggcaaagaatttgaacctctctataaactatttcactctttgggaattgtccaaagaaattcatgcccccacactcatcaacaacaaggcaaagtagaaaggaaacacagacatgtggttgatataggtctaacccttcttgcacaagcccaaatgcctctcactttctggtgggaagcatacacttctgctgcctacattataaatagactacctaatcaaaccatagattttctttccccatatgaaaagctttatcaccaaaaacctgattataacatgtttaagatttttggctgctcttgctttcccatgcttagaccatataagtcacacaaagtgtcttttcgatctgaaaaatgcctttttattggctactgtttaaactcaaaaggatttagatgtttgcatcctagtggtaggatctatgtagctaggagtgtcacctttaatgagtctgaatttccctataatgaactgtttgccccacctgttcctacacaacataagtcacctatctacatagactctaaccaatacaccatacctcccattacaccagcagatataccaccaactcccccacccgatcctccaagtgaatctttcagtaccaactctgacagcaatacacccactcccatctcaccaacttccttcacttcaaacacctcttcccaacacagtaacaccaacaatcaaccaacaacaaatgctcatcccatgctcactcgagccaaaatgggaatctttaagcctaaaacctatctgtccacatctgaaccagaagtggaaccaacatcagttaaagaagcccttgctaatccaaaatggagaaatgcaatggacaaagagaacacagccttggtcaaaaataacacatggatattagttcctaaaccagaagatgctcaaataatcagcaacaagtggctgtttcgtatcaaatataatgctgacagcactatagccacttacaaagctagactcgtggcaaaaggatttcaacaagtcccaggtatcgacttttttgaaacatatagccctgtggttaaaccatgcactatccgtgtcattttcactcttgcagtcacttacaaatgggaaattcagcaaattgacatcaataatgctttcttgaatggtgaacttcaagaaacggtttacatggctcaaccacaaggtttcattgaccctcactatcctaatcatgtgtgtaagctaaacaaggccatctatggtttaaaacaagccccacgggcttggtatgatcaactcaagcatttcttgctgtcattggactttcagcaatcaaaatcagataccagtctgttttatagcaacaaaagaggcaaactttattattactcatctatgttgatgacattttagttacaggtgctgataatgatcaagtacaacatatcattcaagttctacacacaaatttgctcttaacaactcgggccagtcatacttctggttttgaagtgcaaaaagacaacaacacagtccatcttacacagcagaaatacataaaagatctcttgacaagaactaatatgctgacagccaagccacaatccactccaatgtgttcaaatgccaaactcactcatgactcgggtgcttctttgcaaaatgtgacagagtacagaagtataatcggggcattacagtacctatgccatactcgacctgacattgcatttgctgtaaatcgtctaagccaatttatgtctcaaccaacaactgaacactggggagcttgcaaacgtgttctcaggtacttagttggcactcaacaccttggacttaccttcaaaccagctcaagttcttgaccttcagggcttcacagatgctgactgggctggatgctctattgatcgaaagtccacatcagggtatagcatctttttgggtggtaatctcatcagttggtgctctaaaaagcaacaagttgttgctcgttc

SEQ ID NO: 297242 - DNA, 5361 bp, Cannabis indica
aataactctcattactcttctactaatagttgctctcgtagtatttataccaggtcaagatctgtcgaaacttgataaggaggtgggtaccacgtggatagaggtgatttttccaatcatcttaatgagatttttagagcatgacctcagactccaaggaactgcaatgataatgaagagccccgtgatccccatgtaggcaatcaatgcactcagaatgtaaacaatgcgactaatccaatcaacccactgattgtacgagctgcgatcacaaaagttgtgatccctaccaatatagtagcagtcactgctataccaatagtgactcagaccaaccacacattaccaggaggtatttaccaagagagcctcttatgagcgttaaggctaatctagcagcagagaaagcccatttacaaacttcattttacgtcaccctttacagaagaagtacaacaagcaaggctccttaaaggctttagactatgagaatcactcaattataaaggtactactaacccaatcgattatttaaataaatttaatacaattatggaactagaccagttaccacaattgggaaaatgtcgaatactcaccgcgactctagaggataatgctcatgattggtttcgccaattacttgaggcatcgatatcaacttgggagacctttgtaggccatgataacatacaaactgccatacataacattggccaatattaaataggaagtcggtgagtctttacaagattattttaagcattttaatacttagataacaaaggttgagaaggcccttgagtctttgttggtctatatgttgatcaaagatgtcctacgaagaaccaaattttggaaggaattacaggcgtaacgactcgagtcgttggtggaattctttgccatcagtgcataagagaatcgagaattctctggccaagttggaaagtggaaaggagaagcatgagtctctagtactaagaacgcgttcttgaagcctaaaagcaaagaattctaggggacaaagccctaaaagatgtagtccttctaagaaacgaagtccaaagctcgccaagtcccccaccaaaaaagaaacatccccaaagaggaaagggggcccacattttgtcaactacattgaattgtccattccctatgacaatgtttatgcaatcgaggaacataacgacattttgaaaaaactgcctctaatccgaggtaatcgtgacaagagggaccccatgaaattttgcaagtaccacaaaaatatttaccatacaactctggaatgttgattcctccaagacaagattaaggaattgattagacgagggaagttcagctagtatatgaagaatagagaaaatcatccccaagcagatgataccaataatacaagtgatttgagtggttctagagcccctcaaaatattctaactatcataggaggaccgcatgtcgatagagattctagaaaagcgtaggagcgctatgtaaaggatgccaaagaaaatccctaacaaatgtaaataacttgagtgaaagacatgaaatgttgttaaaaaagatgcaacgacattaccttcatggaaagcaatgcgaggtgggtgcaacacccaaatgtcgatgccctagtggtagtcactaatattggagggcataatgtacactgaattctggtcaataatgggagttctgtcaacctctaaatttcaaggctttcaattagatggggttgcatgaaaatgacttacgaccagtgacttcgagcatctatggtttcactggagatacaattgaattaaagggaatgataaagttatcaataactttaggaacaaaacccatactaccaaatcgatggccgacttttccgtgattgactagaactccgcgtataatgaaataataggtcagcctattttgtaaagagatgaagatagctattttgatctattatctcaccatgaaattcctcacccccacgggtgtgggatcggtgcgaggaatccacataaattcaaggaatgctacaatactgcattgaaaatcgagtaaagaagaattcagcaaatgtcatttacttgttcaaggctcctaccccctcgacatgaattttttagaattgaagaaataatgcatacagagaaaccagatctggctcccatattcctcaactacaccacaccaacactgtacaggctgcaaaagagacaaaaggtacctattgattcttttgataattctaaggtattaaaaattttctctaaactaactttttagcagcaagaaaggcttgttacatttcttaaacaaaatctagatgtttttttcttggaaacattcagacatggtcaaaataccgcccgaggtcatgtgtcaccgcttgaacattgaccttgatgcgtgaggagtacgacaatagcgccataaaatggacctcgcgaggtaccaaacgcttaaggaagaagtagatcgcttactggtacgcgacttcattaatgagtcattttatccaaactagttagctaatcctattctcgtaccaaagctaaatggctcatggcgcacatacatcgattttacagattttaataaagcatgtcccaaggacagctttcctttacctagcattgaccaacttgttgatgccactgcaggtcatgaagtccttaactttatggatgcatactcgagatataatcaaatcttgatgtacgagccagaccaggaaaatacctccttcatcacagattgaggtttgtactgttataaagtaatgccttctgcattgataatacaggtgcgacgtaacaaatattggttaacatgatgtttgtagattttctagggaagacaatggaaatgtgttaacgatatgctcgtaaaatctcaacatgtgaaataccatgtcgctcacttagattccatgtttagaatcctgcgccattacaaaatgcaacttaatctattaaagtgtgtttttggagtgggatcaagaaagtttcttggttttatggtaaaccagcaaggaaacaaggcaaacccagcaaaaataaaagccttggtggagatgtgatctccttccaagccaaagaggttcaaagccttataggtaaggtcacagctttaaaccattttgtatcatgttcttccgataaatgtaaagaatgcttttagatattaaaaggaaataaaaagttccaatggacttacaaatgtgaagaagcatattaggcattaaaaatgtacctagggcaacccacgatactttccaagctgatacttggagaggtactctcaatctacctagcacggtccccaatacacgattagctcgatgtaatttgggaagaccaaggtaggcaacatctggtatactatgtaagaaaatgcttactcaatgctgagacacgttacccacaaatggagcaacttgcatttgcattagtggtaacttctcgaaagttgcgaccctatatttaagcacacaacattaaagtactgataaattatcctttacgccaagtgtaggccaagcccaatgcattagggaaactactcaaatggtcgattgaattgattaaatttgacataaaatacaaactacgatcagctatcaaaggccaaggccttgtctaattttattctcaagtttccaatttaataggtagctttcatcacaaaagatcaagttgatctggaagtaccaccgcgtccaggttggaccttatacgtagatggagcatcaaacaatgaaggccaagggggcagaattatattgacaagtcccaaaaagtttaaagtccacgtagctctaaggtttgaattcagcacctccaataatgaagttgaatatgaatccctaatcactgaattaaaacttgccctagagatgaaagttgaatatctcgaagcttttttagcgattctcaaatcatgctttattaggtcaatcgaaaatatttggcttaaggaggacgtttggccaaatatctctcttacacctatgagttgttgtctaaattacttagctctaaagattatgcgacaaggttattactggcaaactttacgagcagatgcgatcagtttcgccaaaaaatacgacaaatgccagcaaattactacgtatgtgaataggccaccaagccatttaaattttattaccaacccgtggccattcatggtgtggggcatagatttaataggcgagttaccaaaggaataagaaggagttaaatacgcagtggttgtagtagattacttcaccaagtgggctaaggctgaagccttaacaacgataacactggcaaaactatgcgagtttttctattgagaaattatctgtaggtttggcattcgttataggataatttctaataattgaaaaaaaaaattatcgtaaggaaatgcaaaaactatgcgatgatttggcgatccaaaagaccttttcagcagttgcatatcctcaaagtgttatctgcattttcataagcatcacacgtggattctaattgaggaagaccgaagagtcattagctaccctaatctctaaattgatgcggaaaggagaaggcatcgacctcatgaaaagagtctccatgtaggggagttccctgactgctagccacataaaagggatttgtgaactaaaatcccccttccttccgagagttaaggcagtcaacctctgcaaggagcatggattggccagaggggccaatgcatcctaaaacacggaaaaccgtgttatgctcttaacccacggaagctttgccaatacgtgtcatactatagacccagggaccattctttttcaagtacaatgtcagaggttgtctcccacaacacaccatcatacagagcatgcgtgtccttgtgtactagaacaaatgatccaacgactagggatagagaaattcaaaagataaaagctcagaggtgacacgcgtccaaggcccagctcgtacgaactgacactcataaatgccataatggaaatatgccacctaccaatccaatggtaggatttcatcccaacggtgatccatccaaggcatcccatgcaaagaagctaccctataaataccccaaaaaaagcacaagagagtggaccttcctttttttggatcaaagacccattcttcaggatcctaagcaaacacatgtttgtaaccttaatattaactctagaatattcctactaagcttcctcttcttcaagaggaacacggtgggaaggagtcttagtccattgtatctttatttatataaacatctatcagccaatgtgacagtcagtagtcccatgatccgtaaggggaaatacagggtaagcggaataatatgactcct

SEQ ID NO: 297243 - DNA, 6240 bp, Cannabis indica
ttacttttacatgccaattatcattcaatctgcacaagtactaaattttaaatttttttaatccaatacaatctgctattttacaaattggttattttaataaacatctactaaaaaaaatttactgggttagagataataaaacaaaaataattacttcattcaaatttattctaaaataatacctaattaccaattacatatcactaagtataagtaagggaatgagtactttgtattttactatagaaaaaaaaaatatttgataccctgtgtttttaataatacttaattgatacttcatatttttaaattatacatatttagaactctaaagtcaaaaaaaaaaaaaaaaaaaattagaataaaagcgacattagattaataactaaaaattagacatcatggtcattacataaaatgttaccctaaagtaaaatttaatcaatatagttttttttttttttaatttaaccaaacaaatctcacttatatgtaattaaataattaaatttgaatttaaaatttaaattttcttagacagtttgatcgtactgattaaatgtattcaaaaaaaattgaatataaaatactaaatatgcatgattttaaaatatagggtaccaaattagtatggttgaaaacacagagtacttaatttatatttagataaaacaaaaattaccaaatgtgtttttatttttgtgatgtgtatttttaaaattttataaattaaagaaaacaacttattaattttttaattttttttaaaacaatatagttttaaaaatttaaaaaattttaaaaataaatataaaatttatgaatattaaaattaaacatactctcaatattaaaaataaaaataaaaaattataatattacaaataatatattaatatttatatataattaaactaatttataattaatataaattcaattaatatataataaataatattaaaattaaaattttatatatttataaaattaatccaactaccactattaaatttaataaaatattctatatcaaaattcattattttaacttaataataattattacaaaatatcaaatcccaccagatagcaattgtcatcatcacataataaattctcatcactgatagatagtctgcagttgagcttgagcagcaataattattggctgtgatcaacacgctccattaaatcgcgtagactaccccatctttaagtccacaccgtcaaaaatgcatatttaaaaataaaaaaataaaaaatgtttatttcgtctcaaaattattagattagatatcaccaaccaaacactaaaatcatgtaattaattaatcagtccttcttcaacaaaaataatatgaaattaaaaataaagccaacatacaaaatcaccatttgctcaaaattccacaatttggcaaaaaagtcaaaatcttcataaactcaaaaacataaatatcagtagccatttttgctctaaatttaactatgaaattttcatcataacagatttaaggtcttcaagtttgttgccctcaactactactcatatgttcctttctttaagctcgaaaaccccggctaagactcaccatgcgtgtggaagaatccatctgggatcccctcgaacccgaaccggttcttcctgaatcttgataccttgacccccgaccacgctcctctacgatccccttggagcttggccgaattgcattgctctacaaccaccgccactatcctgctcgtccagtaccgccaccttgcttaccttgattgtaagaaaagttctcttgccatctactaccaccgccaccaccaccggcagcagcagcgtagtcttgaccatctctacgcctcataggcagctccaatccaccgccaccagttcgagcctctagtgccctctcattattctctgcaaggattgataacttttcagtcaattggaatgctaaggcctgcagcctagagtgctcaacatcttggaacacaatgcaattagttggctgatcccaacttgcatagagttcctcgttgatcatcatcttgctcacgatgctgtgtatctgagcttccgagagatcaaacaacttggtaagctggtccaaactcagagattgataagacgaggcataggtaaagaggtaggtcctcagtgcctcttccttaatcttagccttgagcatttcgagaatgctttcacgattccttaggagcttccaaacatcgagggagataataacatcaaaagactgctggaagtcacctttgaggagggccctagttgcagccattacatggtctctgacattttcagggggaccggtgaaagtttgcttctcactaacctcaagcaaccgccggaaattcttacttataaccttcctttttgcatcgtgcatgttggctgccatgttaggcacttcaagcaacatggcgcatatcagatgaacagcttccaagagttcgagatttatatgcatatggtacggcatctgtcgtctcctttcctgtctttcctgtaaaaattaaatattcactgcataagatcggaaacaaagcactgttttgtaatccaaaagtaccaaactgaaagtgggtaaaaaactattgcagggttgttaggtgccattaaaattgtcaagggcaaaagcataacaactcataaaggtgtagaccccatatcataatattggagggtctacctgtattagtttgtagtgctccacactccaatagcaatacttattttactaatgtcctctcatgaaacaattttcttttagttctttcattcaaaacaataaaaacaaaagagacagcatgactcgattgttgtacgtttcaacagtcaaatacaatgataatgtatcaattattagattgatgatgatgatgagtactgcattaaccaaggaacctttaatgcaataacaagtaggatgaagaatgaccctactaaaccaatgattgacaaactgacagcatagcatgcctataagcgaccccatcgtgtccggtaataagcataggtcaatgcaaaaagaaaaagtactcccaagtaatatgaccccctgagaacttcactattaaattaaaaataatacattattatcttactacaattacagaaaaatattggtgtcaaaatccatttacaaacatttgatagttcaaacatcaatgtctaagaactaattagagcatttataacctctctaactcataactccaacactgctgaagatatcattcttctaatcccacctccaactgtcctacatcctaacaacacagcattgacactaatacaaatcgttcatctacgaataattaaaaaccaaccaacaacaacttcatctttcattttaaatcttttattctttttaatcaagatgagagaaatacacagaaaaatctttcaacatacaaattagatgaaacctccaccctgtaagcaataatcgaagctaattctacaaaaaaaaaaagacaatgacaataatctacgaaataatttcctactaaaaagtatatttagaaaagaagtacctgttcaggagtcttctcatgatacctgctttgtgaaacaccttgagcaagcaattcctttacccttccaccagaatatagctcggcaagacagctatgtccttcagtaactagtccaacccgaaatgcacatagaccaagttgtgccatggctctgttaaacagtatctgtgttgagatgtccatgtgctgaacattatcctgcaagtgactcatcaacagcaaatcacgggaagttgaaaactcatccaggagagcatggtggtaaatatcacaaagcatagcacgagctttagtacgctcatctccatgcttatatataagggataccaatagatccagaaagatcctgctactctcgggaaaagtgggctttcggggaacaatctcaggcgtagcaataaatgcagatggacctttactttcttcgacctcctttggcccctcaggtgactcttcaccattatcagtcactccagtatgctcagctaaattcctcatggcatcgtaaacttcttgtggcttataatagatgtgttcaacccgctttaaagctacctttgaagcagctttaaaatctccagctcgctctaaatagtcttgaacattttgagcgagaaccataaataacggctcatcccttagtctttccacatactcacgtgtatgtgggtcaatgagctgcaagctcttaaaaaactcattatccacccgttccaaaaaggccactagattaccccaaacccgaattgttccatcatagtcttttcccttctgggattcattctcatcaggctcaatcgtgtcatcaaccactatgtttgcattctccacaagaatgtcaagtatgagaagcatgttctgcacacacttcttccacacagttataggcatgtgtccattgagccctgggttgacatcaaactgagcagaaacaacactaaagagtatttcaagcttttgagcaggggtcttagcaacctttgtcaagaaggtaagctgctctacctgttcaaaccttccggttccctttctgcccctagcagccacaacctccttaaacttcttgttaactatgtcccatgtgatttcactaggatccttcatgagttgcttacccatgagcctttctctcttgctcaccttagtctcccaccccgcttcagctaagttttctccatcatcctccccatccccatcctcatcttcactaccagactgaacaatcttggtaatatcctcttcaatttcagaatctgtttcttcctcctcttccgactcgtccccaacatccctatcctcttcaacctcaggattctccctatacttattgatagcatcctcatacagcttattgttcttcttcaatttttgtttcatcgagttcaacgccttggcattgctactgctcatcttcttcttagcctccttattagccaaagcttgagtcaaaaaatcctccagcatcacaagagccttgatatatagcgtaggaaccttcacagcctcggtaacacgcataaccttctcaagctgtttattcatcttgtcaaagctctcctgcaagctgacccaatcattaatcttcattgcattcttcatctgatcaacagttaaagccatctcctcgaaacgcttgtctttcgccgatctaacaaccctcttttgcccatcagaatcatcactgtcactggcattttccctaaggtacctattaacagtaggctcggaggttggctcaccacctccaatctcaatttcctcatcaatgtcactctcttcctcctcagagtcacttccaggctgaaattaaacacaaaaaaaatcatattttcaaaagggtttcttaatttaatttcattttttctaaatccaacacaaaaattaggttttcattcaaaaacaatacctgggtccagaatcgcgatgccatattttcgcagaagaaaaactattcaaaatcaaagcgcaaaaatctgcattcggaaaacaagggttcgattgtttcaatcaaataagcctaaaatatgaagaaacataaaaacttggttcctaaatctgaagaattacaaagaacaagacgaccaccttgtttgtttttgttagcgaaaaaagagaaaccaacaacagataatatatagcaacaaaaaaaaaacctagaagaaagggctcaccggagaagagagaagagagaagagatattagatctggggagagcagtagtaagaggaggcggcggcggcgagaggtgtaagagtgacgatacttggtgagaatggagataacagagggtttcgcggtttagctaggttttattggttatgtgccttttcttttttcaatggaaatgattattgttttattttttatttttttttaattatttacttggattatttattgtttttttaggctaattagtaatttttcccccgaactttacatgtactaaatcgtgcccttgaacttttttagccgttagaaattcccctcaaactattgagattgttaaatttaaggatttttgtttaatttcattcaattttactgtttcagtgattatttatgtactaaatcatgctcctcatactttgatatctaccaaatcatgccccttaaactttgatatatactagatcatgccccttgaactttcatccatgttagaattttttcactaaa

SEQ ID NO: 297244 - DNA, 5431 bp, Cannabis indica
gtaagtataccttatcgcagattatcatgccagtactaaattcaatgaactgacaaatcatgggaattaaacttttgaacatataatcatgattatatttcactgtgctgacaacactataatcaatgaacaaatatatacatatttatatatgttttggacttaatagaattcatacattaaatataatcatgaaataaatcatgtgaaccatgcaacataaaagcgatttcttattaattagtaaatttgattatattgattttggttttatttagagcacaaaacccaacagaaggatctacaaataatgtttaagaagtagttcatagtcgcaaaggattatgacatgggaccaaacgatggggcaaagctcaccaaacttagtctataagaacacttgaaagaattcttataaactaggggcaaatgttgacccccaaaattttctaagtgtaaattttagagtccttagtctgggcaagtattaatgcaagctatagcaggcaagtgttaatcctcaaaatttgccaagtgtaaattttggaatccttagtccgagtgtgaatcaatacttgaaaagctatccaaaaaatactaagtcataaaacacagattgtcccacacgaagatcaccgtacaaagaaggcttcaacatgaggagcgatgagtcgacaaggatctccgcgcgtaaggctccttgtgctcgcgcactccctgggccaagtatgctccctgctccctgcgcccagcgcgctcaccagaccaagcacgctcctcgcgttggcctgcccacgtgttagcctacccatgcgccagcttgcgcctcacatgtgctggtcatgtgttagttggttgtgcgacagctagtcgtttgccaactggtcgtgcgtcagctagttgttcttcagttgatcatgcatcagttggttgttcgtcagctggtcattcttcaaccagttgtgtgtcagctagttgttcgtcagttggtcgtgcattatccggtcattcgtcagctggttgagtgtatgtctcatccgcaaggctccacgccgcctataaactttaaattagatattcacttctttctcacactaaaatctccccactccctcgtaaaatatgccatcctcatatgacacactactaccttagtacaaaaataaggggacgtagaacgatcatactaattctaaaaacttatgacaaatagactcaacccttagtgaaattctcctaatgttaagttgacctatctttttgaaactttagttaatcatatttaacttcgtttttatatttgattttttgggcttaatatagttgacgaatttttatcgtcaataatatatttgaaacactttttaatgggtaatacccattaatgattacttaaaaataaataactgtaaatatcaattttaaaaataataaaaaaattaaatttttataacatgtaataactaataaataacaattattgtaacttaattatcccagcctctgaaccctctcggtctctccttggtcaagagggctatggtaaaagcaagaacagttagaaacattttattgctagcaattatgagtctccataaacatttttcatgagttcatcatctaagaattcttattaataataattataatgaaatgcccatgaaagaacgtaatacatctaaatttctgaaaaataaatagataaatgaatattattccccttacatatatgtgtaatttgtttacataaataaagtactaattaagcatgatgatatatagactatcatcaaaagcgaagtcggctgaatcatacattacgtaataaattaattattactaatcatgcaatcaatgaatatataaagatacaaaatttaagcatgggcaatgattagaatatacatgatcagtatattaattcttatattaaattgaaatgatagctacggagctttatcttaatggtgggcattgggcaatatattatgtttttgtagtagagaaaaggagaaagagtttaaagaatgtaggtcttccagtagtcagtttatactacattttatttaatctaatatcaagattgagttacaaaaatttaagtgtaatatacacaattaaaaaagtaaatagtaactcgtccaataaaattggtcaatttagtcggattaacccgtccaaactgaccactaatattttttttaatttttattttatttttatattcaattgttatattttagttaattataataataagataaatatgtatagattataaattcaaagttcaaatcaattaaaaaaaaatcttttaatcgggttggtcgggttagtttgggttgattgtacaggtttgcattatttttaacctgcccaatataaaaaattggacatattatatttttgtcgggttttatagttagtattttttgtaagttatttcaatttaatttgggcaagttataaaagttaggcggtttataaaaatttatctaccgccttaaaagtaaaagtaaaagaagtgaaaatatcataaggtgttaaaaaaaataatgcaatcatttaaaaatggtgtggaaaagagtttaagcttaataaaaaaagaaatgccaaatgtagagaatataagtttattctttaagatcaaaatgctatataccaataggctaccaatatcaaagctatttaactaaaggctattacaaagcattatttaaaatgatttaatttttgttttggtaattaagtttctttgaaacccaagttttctttttgtgtacttgataaattagatgaatcctttaataaactacctattggctattggattgattaggaggcatggccaaaaagattaataaaacagatctatggccatgattgacattgtttggaagcactttaccttctagttgttaggttggatattaggagccaatcaaaatttatatatatattccaaaaagaaaaggaaaattaaaaatttaataaaataaaacaatgatataactgaaagaaaaagaaagttggctgatatgtatatattaattaaggtgtgggtgtaggtgtggccaaacattttgtaacatatataatttcacaataatgacatatatggcagcatgcatattaattattcatgacgataaatatatccctagttaggtttatttaaaataataataataataataataataataatgtattcttaagtaataagaatttggtgtcatcttatctagacaaccataaatgattgacagagtaaaaaggaaaaactttttccttaagacacgacaaatagtattgtagatatataggttaaatagaactcgtcttgagcttttcatgtgaaatggcctaaacgtggttaggaactttattatagtttctagagggattaggtggtgatatgtaggaatttgaagatagcttattaaattatttataagataacttagaaacgtttttttaaaaaaaaaaacaaggaataattttgaaacgtttttctaaatataataaacactttggcctttaaatactgtttttttttttttcggtttgtagactgattccagtaccatcctcagctagctcattttcccttatgaatctactttaatgcaaggtattttttttattaagtttccttaattattcctttgtcccaatgttgtatttgataaaaagtttcgctgtttatgatttttgttaagttttatatggcttataaaatagtgatattaatgtgtcattgtgtaatttaaaatttatatatatatatatattttttattaactttcaataaataaaattaaatttcttttaaatttttttattaattgttaataagaaaataattttttttaattttaaaattaattttatttaattagttgatgtagcgcggcaataacacatcaactacatcatcactttattagacatttggaatgaaacgtaaaaaatttatttatttcagttgtaaacaatgacagagttaagggatggcgagtgtcatagccacttttataaatttttttaaaattgcaagcaaaaaataattaaaaataaataattctttacatttttacatgtgttatgtgttggctcggtcagagaaaattttttaaagtaaaaaaaaaaaaagaggacatgatttggtaattacaatagctttaaaggataaaactcctaagcagcctaaaaagttagtgagttacgtgggataggttttttttgaaaaaaaaatatggtattagaatgtgtctaatccgacttaaaatgtctaatctcttgaaagggctctgtttagtaacagccatttaaacgcatttatttattgtgtcataataacatattattattaatttaccttaaatgtagcacttttttttttttttggacaaaaacaaaaaacttgtgtagtactttagcacctatgtattgggtcttccattattattgtgaactgatttttgtaggctgaggatggaagctactcaaaaaatacaattatattgcaaacatttattatacacttttatgttttggcttttccatattgaaattgaaaaagcctatttcataattcatatttttaattttgttatgatttcctaggtcaactaagctgtaaactatttgtcctgtggatcaatttgtcatgtaattcattgattcagttatcgtggtcacttgcatttaggtagcaatatacaatgattataaatatacaaatatagaccaattttggcttttctttacgtaatcacatgacatatatgtaaacactgtacacaaacctaaacaatctcactgttgactataaacaaaaacactttacatatcaatcattaattacagatgtcaaagccagtccacatgaatcctacatgatgggagtctgtcattctctaactgtccgagagttgagcaggattggaatatgcgccaacatttctgatgcagggacaaattacacttttatcatatcaattatctcgttacacttcccatccacatctccacaatctgatatactaatccagttccagcattgcttatgaactagcttcttgggatagtacctctctttgcctgctgctgcttataaggttagattacaaaagttttctgggcaatgatagatttacaaatgcaagtttggcccctgacattaaggttaaacatcaagctcaagttttataagaattaatatatcctgtgtctcttaaatcatacaatctaaaagcaactgcaaacaataagaaattccatccgccaacatagtaaatccaaatcaaaacaagaagacaatgtctataatcgtcaatatccttatggtatggttggggaggcaaactaaaattgctcaaaagacttgcttacatcaacaaaaatatatatatatatatatatatat

SEQ ID NO: 297245 - DNA, 3069 bp, Cannabis indica
tgacgtactcgtgtataagagccattcattccgtgggtgtaaggacccaatggagacttgaagcgggaacgttacaggaatggtattccaatagttttaaatgcaaccaaacaaaggaatggaatgaaattttttcatttccattccataccatttcattacctccaaccaaacgccacctagtctttttttataattaccatctcatgagaaataaaaactcgaagtagacgtagctctattaccataacgacatgagaagtgaactactataaatagtctaaattttttccttaaactcattatttatctcactattctaacgagctagtgttgactgctttgtaagagtatgttcatcgtgacaagattttgacattgttaaaaatatttttagtcaagatttcaagcagcggatatcaaaattggtatgttcgatcacagctgtaaataaatatcaaattttcactaattatctttactaaagaaataggcgattctttattcattagttaattattgtataatgatatacaagagatttcattttgcactctagattgtatatatattagctgggacttgtatcttcaagccacttattttgatcctgtataaaagaataagaagaaaaaatacagcacaaattgtaaacctgctaaatagagttgttattaaatatatatcttaattacatatacccaattgtcatagttaataatgcatatatattgtaatgcatggactgtaaactgctcagatcacacactagtacaaaatatttggagcccccaaatagtcgggaataaattgtaacggcaatgcattaaacctatcctgttatggtgacactactggcttagattgaccataatttttatggtattacctgtgtcccaaaagttaggatatgcttctcatttccaagtagcttccatgccaacactagctattcacaaatatcttcagacagcgggagaaaatgagcttggcttgggttatattttaacagaaaaaaaaaaaaaaaaacctgaaacactgaaagactggacttgttaagagtgaaacatgacccaccactgcctaacaacatgaagctcattccatactgttgcaactttatccaattacgtcagataatactccgtcatgttatcaacagaaaatcatatggtgcaccaagcccgtaaccaaatgtaccattagttgatggtactctgttagtcgtcgaataaacatttccaacaccaacctttgctgtgagtttcgctcttcccttgagatcgcttgctctcaggggaggggaactcagcagaaagtctacccatctgcttctgcaaatcagcaactgaatcatttgttattttcgctttggcgttttttttcccatcagccagtttcaattccaacctatacagtgcgcaagcatcacatttgttgatctcatattcatacaggtgccactcaatatgattcaagggttgtggatccatgtagtaagatctcttcagccctccaaattcgttcataacttgcttccttgattcatgccaaccacgtccactgtaatctggcagagatctctgctttctgttaccactttcaaacgctctacgaggcttgtcaaagaagagccattccctaattgtttcaccttccaaaaccaaaagatcaaagagttctgcaatatgcgacacaataatatgttcataaataccaaattaaaattttatagggtatcttctctttctaaatgaagaattaaactccaacagcgtgaatgaaataaaaaaaaccttaccaggtgcattccatggagattttgcagttgcagccccttcacactctggtatacctacatcttttccttgtgcctttgcactaagagcagcaaaaagcagtccatccttcagaccaattcctccaggtcgaagaactggagccatgccaggtggtccttcattcaatgccagggctgcatgaaagctactgcagtagtcctgacaccagtccagcccctgagcaggccttggacaatcccaaagtgcacatttgggacccaagaaagcagaaggtggagggcatatacttggcagatagctggaaatatgcggcagtgcatcttctccagaaacaccggttccgttaaaatcggagtacaagttgtggccaaattcttgatgtaactcaaactgatgataatcaaagtgggtggcaccttccaaattgttagctgaaacattgcaaactcttgaggtggagtttttgcaatcaaccaaggggaagccatgttcctgttgcacctgattcatgccaaacccctgaaacattagtcacagctgccaataagtgccaattttaattgtaatgtaacagtaatgatgcaacatgaaaatgctagtcctgtagatggtgaacacatacaaagcataaaggaatcgttctccagaataaagaaaagttccattaaaataaacatgaagggaagaaaattaatatatcccctctggttgttatgatgccatcattataatttaaatctaagacgtatgccatcaccgcaatgattcttaaccacaccaaaccaaagtataaagggtcttttgtgtacacaaatgaggccaaaaagctcaattgatatttgattttcggagattatcaatgtaactactctactatctttccatatatcagtagtggacaattttggccaaagagcaaggcagtggcaacaattctctaacctctacatagagtcgtattataatatacagttgaagggggcatcatagtaaaacgaatatcataaccagtaacccaattgatgcatctataaaccctgaaaccatttagaaccaccaaaataaaaagaataaattccacctcatgaaagaccacagtttctccaacttgaaagctttgatcagtaggctcgggttttggggcagctaatggactagtggcatcatcttcctcctcgcacagctgcaacagccgacaaatgtctgaggagaacgaaccaggattaccaccctacatgaccaatttataaatacaaaaaaaaaaaaa

SEQ ID NO: 297246 - DNA, 3480 bp, Cannabis indica
attttttttttctttttttatagctattttctatttgtttttgtggtgtaattataaataaataaagtacaattttgattctctctaatatttgttctcgttgtaatcttatagaatttgattaatgtagagaaaacaggaaaattaaattaaataaataatttggggaggatttgtatggataccaactaaaggtattagctttcaagctcttcatgaccttgatccaccactgaaactattcaaatctgattttttttttttaccattttagttatgaattacaatttcataattatgctagttatttgtttattttgaatggtctcaaagtaagattgttggtactgtgaacattcagtaaattacttgtgatactgttgtctcacatgacagtgtcagaaagaaaggtgttggttgtaagctaggcatgaatgctttatggttcaatatggatgattatatattcgaaagtcattaagatagttttggtcataaaaatgtattgatgtgagaaaataggatagtcaaatagtaaatgaccagagatagaggaagagcaggaggcaagtgattaataattaagcaggacatatatcttatcttttgcatattctggagatattgatcccttaattggattggatttgatagcaaaaggtatcacatgtggcttcatattccattttttcatgataatttgtgtaattgatcaaaatcaatggtttctaagaactaaggctaattcgtgttctgatctatgtgttatgctcatgtattctttggtgaagaattttttatgctgtaagtgatgataatcttattgaatgattttaaagtctcagaggaacatcaagtattctgcagttgcttagctgtgagttttggcaaacacagtcactctttgtttggtggaaaatttgaaattatgcaaatctgcatagcaaatgatttattccagaaggaagatttatattctttagggacctagaaagtcaatgttgtaatagatactgagtgcttgtgatgcaattgtgtttttggtttttctttgacaatatatgcattttagaaaatgattggtactgcatgatataagctttcaatagttgaagtttttataagttatattttccatatattgttcaccgaacaatttaaactttaaaattttggaatgaattatttaatatggtattagagtgggaaatcttgactgttgagtttaaatttctacatttgcagttttttcaacttgacatgtggtctgtctctttttatcttgcactgtaataatagagtgttttacttaaaagtgaaaatgaatgtcattgacaggagctctctttgagttaaacatgtatttgcttaaaatgtttagttgctgttctccaggtgacatctccatatggtagtaatctccaccatgcggaaaattcaacgcatggtcagtttgcttttacaactcatgaagctggcaactacttggcatgcttttgggtggatggttataatcatgataagggagatgtgagtgttaatcttgactggaaaacgggaattgctgccaaagattgggaatcggtggcaaggaaagagaagattgaggtgagtgctttcacatattttcatgattcttttgagtaatattatatttgataggaaaacaaaacaataacgcttgatccagaagatgaatatcaagacattctagtgctgctttattttgaaatcagctccagaaatggtagccaatgaaattccatttaaaaatatgtttgacaaatagacatatccttctatgaacaataccctagtatgattaccacatgtttggtttttgaaccaatggagggtttcatggaacattagttgacaggttggatagaagcattaatgaagaatactcacaagtcaaaacctacagggttaatcactggttgcaattctatctcgttccttagttgtactgctcactaatctgtgtaggattctactatccttaagttcccacacattaactaagtgcgggattggttagtagtatatgactacttggacaccctcctcccttaggccagcttttgggattgagttctacctaagtggttgtatcagtggtatcaaatctatgcatcttcaagtgggaccgacattgtggaaggggcgccctgtggattaggctgccacagactaggtcattgtagagtgggtcgcccacattgagcaagtataagattagttagtagtatataactatttgggcacccttatctcttaggctagcttttgagagtgaatctgtcctagtggttgtatcgcatttcatttctaacatgacatatcattaatattcgagaacactacacaccaactatcaagttttggtattgaaatgatcaagtaattaagtcaagaaaccagtttgtattgtttatctgaaagtaccttatcctttataaaagcaacacattctcgtaactttcttatccatgctattatcacaaaacgaataaaagattcttgtttctgtgcgtgtgatcagttacatgtataagttgaatgttgccttttccttaatttgtctgaactgttgattgttagtcttaaataatttcactgttgttcatatcttcctgcacaaagggtgttgaacttgagctgaggaaactcgaaggagctgtggaagccatccacgagaatctgcttttcctcaagagcaagtaatatttatctgcagtgctagttggataaattttcatttaaattgatattttctattgtttcttttgtgtaacttttaatgttttttcggatacattacagagaagcagagatgaggaatgtgagcgaaaatacgaatgcaagagtggcatggtttagtatggtgtctgtatcagtgtgcatcgtagtttcagctcttcagttatggtacttgaaacggtttttccagaagaagaagctcatctagaagatggtggctgcagttgtcttttaacattttcacagcattttttgtcttttaacttttacctttgtagcaaattttgataccagacaacttttaccccttattttagagaactaatgttgcgactgttgccttttctgcttatttatttgaggataaatataatttttcaatttgcaaaaattactgattaaattttttgtttttgtgaaatgataattcagactctatatactaaattattaaaaattgaattcaggaattattttgtacaatttttaaaattacagaatttaaattatcatttaacaaaacattccatccataattttttattctataaattatgtataatatttaggaattcttttttaagaaaagtattgctactggaactaatatatagtgcaatcttactgggtattatctatgaatgggtaatattgagtttttatgtttaatttttctatttaattagaaaaatctctcatatgttcattatataggtt

SEQ ID NO: 297247 - DNA, 3374 bp, Cannabis indica
tatatatatataaatatctttttatatattatattgaaggcttttgttttgtttttgccaaatttgtaggtaatatgaaattacaaattgatttgataaattttgtttcattttataattgaaacaggtagaattgtctcatcccgccgcagagattagattgcttgaggttttctatcacaagatttataaggtaccataaagaatttatggcaattggtagtcatggatttcatatgtccttaaattaaatttggctgtgttgcttatttttgaggcttttcccatgctctaaagtgaacacagtggcgcttttatatataccgtggaatggttggatactcatagttctttgtagagtcattacttctcccattgcaatttctaccaagtcatgtaattcttcaactgtctgcctgcagatttttccgcttaatgaaaaaattgagaatattaatgatcagtactggacattacgtgctgaagaggtaggcttagctgttgccaaatggagtttcttgggctctctctttttctctctctctctctctctctgcacttattaatttattcttatgcagatccccgaagaagagaagaactttggtcctcatgaccgcataatccatgtctatcattttatgaaggacacagctcagaaccaggtgggttgacctaccttttcttttgtagtagattatttaaaagaatggtccttgtatgtgactatctttttgtacgtaaatttgaaaatggcagcaagttcaaaattttggggaaccttttttcttggtaattagagaggatgagactttagctgaggttaaagtgagaatacagaagaagttgcaagtccctgatgaggagttcgcaaaggtatgactattatctatctcccaagtagatatttatcatactgactactgaaacaaagaaacacaggttgtctatgatcattttctgcacattgcgttgcagtttgatttttaaaagcataataactttctttatattctgttgttttcttttcagtggaagtttgcatttttgtcacttggtcgccccgagtaccttcaagacagtgatgttgtggccagtcggtttcaggtgctgagtttctttctctctctctctctctctatatatatatattcatctctctaatacccacacacaaaagtaaatatgaaataatttacaagtgatcgatcactctggatgttaaatttaatttttattttatttatcagaggagggatgtttatggcgcttgggagcaatatctgggattggaacacaccgacactgctcccaaaaggtcttacaatgccaatcaggtatataacttccctgtccttgccacagcttttagattcataaatacatcatgcatacctgtacactggctgatggatgatgtagaaatggttttaggtgatgctcattttagtatagtggatcatcttttcagctaattagcacacccatcttaatagcaacgcccccaaataagcctcagccttttttttgtcttttttgaaaagaaggcaattattccgcctaatcaaactaagtttagtgtacaacccaacttttgacttagcctatgataaaagttcaaggaggacaggaggcaatttcacattgaaatggagttcaacagaaattgagtccttgattatctattgcgaattttcatattcccaccttttttggaccacatttttttatggtctcatttttctcagctgaccttgcctcatgaataaagatgaactttttcttacttagattagagcattgtcaactttaccttactttgaactaaccatagccaattcatgtcaataaatgacttgtgaagatggatttttgggtagtgtttggaaaactaaccaatatggaatagattggagttgattataattaattaattggagtacttgtcattttaaaggtgtgatttgcgagtatgagatactgactagtgctttgggagctgctttttaaacttgtcttagtatatagactcatttaaagttttagaatcaatacaaaacaggtgctatgaagtctgaatgaaacaaaatatatggtagtgtcaaagttaatttactagcttgtacctaattttcatttggaatctttcctcaattttgcagaatcgtcacgcatatgagaagccggtgaaaatttataactaggaaaaaggcgagggtgaagaaaacagaactactccagctcacttgattcagtcaatttatagtagcctgcgcgttttctgcacagagaaagtgagagggggctgaggatgcttgcgctgtttggcttaataattcacactgctcttgttgttgtgtgtagttctttctgtgatagaagtgattggttcacatttatagtgttaaaaaagaaatggtattcttacacatgtgggtgggtgagtaggtgcgtgcttaagatgaggtaggtgagaacttttgtcttcgattcgtttgtaattttagtacataagattttggattagcgaatgtatagagtataggtggttgtttcttccctgttgttatattttcatatgattctcccatatcattaggggatggggctttgtgtataatgttctatcatctgagtttacagctcctcccgctttacttctttttctgtaagtttactatcccctccttactttcggagggaatgattagtttctcgattttgacaaaaagtaatgaactattttttttgtctgctttttaatttcattttcatgtcgattttgcttcaaaaacttcatacttttaattgtttcgagtgtcaatttgaattcttgatgtgtcagttgatggcagaaggttaaaagtctaagcatgattaggaaaccaattaggagtttattgttttggtaaggatatcatattttatttgtaaagtctccgaaaccttcatctaatatacattaatgtttttttttttcaaataaagaatatatatgtatatatacattaatgttgcgtacatacctttttgccacatttattttatgaggtgaatactattaactttatttatggcacttctaatgatgaaattcacatcaagcattttattttctaagatctgaaaaataccgtctatctcagtgtgtaacatcctcaaaaaggttcttggcaatggtgtcgtaatatcaagagttactaacaatagcatctaaattgacttttgaaacaacgacacactatctctactaggggtgttcgcggtgcggatggtgcggtttttagccattttttcaaaccaacccgcacatgcggtttttctaattttccaaaccgcacccgcactgcaatattaaaaaaccgcaaaaaccg

SEQ ID NO: 297248 - DNA, 941 bp, Cannabis indica
aagagtgcaattcgatacaattagtaattgtatcagctagtgactttagccacgcccatagaaaacagggcttcgacaatcaatcgatgtcttctgcaaaatatgtaggatggaataagttaccatgcagacggaaacagaatgcttaagggtcacaatttcaccttttctataataaaaattttcagatctttgttctttctaatatcatatagataaccatgatgattgttattgtcaaagaacataatttgatcaccattcccaggatagaaataacacatatatgaattcaaactagttaccacgtgcttcataattaaccaatgaccccaatctcgctttgctttgttgatctaacatcaccatcatttgtatttaattcccaaaatgacatgaattttcttgtcctttaaggtatcgtcatcaactgtaaataccatagctaatgacacgaaacgaatttgtatctttgaagggatccatagctattagctccattgtttgcaaccatattcaatataccagatttgaaaagaaggataattttgctccagtttttagtctccgaacaaaacaaaagatccccttgaaaactagtaaccaacaaaacccctaaacctgatatttgtaccattcatacaattacaaccccatgaattgtacttcgttgcaacacttaacaggttcaaacacaaatctgataaaagcagggtaaaatgatctaagggaaaacatcaaacctatttgttgacattgttaaatattaattgtttggtaaatgggatacatatatagtaatcgtagagctgtttcgtggtatattaacaaatcattgtaggtagccttagagcatgtttggtattgttttctgtttttttgttcaaaaaattgtttttagaaatgagatcgaacaaaaatagtttttgaattttttaaaa

SEQ ID NO: 297249 - DNA, 3913 bp, Cannabis indica
tgtagtaagggcaaggctaagtttgagcagccgtgagaggaagcatgtgaagattgtaactgtcggggcagttaggcccgaagggtacggtctttgggacagatagttgtattttgtatagtcgctaggcgacaacttttgtagtacatactttgtaacagttgtaaatattttatactcgggatcccacttatatatatatattattttggtatttataagaaattaaataaagttttaattaatcatgttttccaataaactcgttgattagcaatgagctacacaattaagttaaaattacgataacacgcctaaactagtagggtgttacatgctcgtgaaaggaactcaagtcgaggttcccactattgtatcccacccagaggtggctcttaagagcatcctggaggatgaacctctcacggaggatgaaccctctattaaggataaaaggaaaaggagggccaagacccctcccactgtccaagctttcaacgactccatctgggagatagaccaaaaggcaaactatttttgttcttacggtatgttagcgggatatgccaatggtgtcagactacacaatgttctcgagttaatgtggcataggatgtccgccacaagagaatttgcgtccatgaccatggaggtatttggtgcttagagctggtcccatatttccaatggagtgcactttccattgaggtcctactttgcaaaccttatttccaagattgggatagctccaatttcagatgaccccctcgtcctacaggctttatgctaggtggtatgttttttgcaagatgagcaaacttgaagttccttcccaagaggaaatattgtactttacagtctgaaggccaacccaatgaggacaaataagaagaaactaggcttctatagactagacaagcgtcttgattctcattatcctgttaatcacaatgattgtactcacgacctccgcgagtactggttcttttcttctgggtttccagtaaaaagggtgccctcactctagttgaacttctagttaccagatattgttgatgcacaaccttaattttcccatttctcacatctcttttgtcttggtttatttattgatgatatttttgtatacttttgactttttgccaggactctcaacccagagtgttaaaacttccaaaataaccaagaaaaaggctcagtacagatcctttactgaggagtagttaaaagttgaggagttggtaacaactgagttacttcgtaggtctatcctgattgtgaaatcttagagtatcaaccctattaaccgtcggggcaacaccaagctctaaaataggtgaaagaagttagttccacggacttggtcgttataataactgaagcggcttaagaggacaagatcctagaacctgatttgttggcccatcatccaaacctcttaattgaagaagaattaattttaaagaggtttgttgtagcgtacctggacgtggggactcaatgagctagaacttcgggaagaggtaatagtgccttccacgtctttcgtatccctagcctctactgcatgtcttgggggatcatgggagattcgataaatattttttgagcttagaccatcataaataccccatgaaatactatatagacatgggagaccaaatcgttaggcgccctagtaatcctgaggcatcctcatataatgttagtgtggatccttttatgaccatatcattgcctgacttgagggaatatggcagcttcattggtgaaaaaaacataatttattttgctcgcggggaaccttatagctgctcactgaatggttgcacccacacacatgcatttttagttagttttgttatcttataactatttctttattttctttgacttggcttattctttcttgttaccgatattgtggttgtgcatgaagatacccttgaatctagaattttgaagtctttgaacgactagatcgctgtgacccaggccaaggcgggagagactcaggaaaaggggaagggtaaggcaaagatgcaagcttctaggacttaaataccacgaccaccttcaaccttatcatcatcatatttctgggaaattgctcctttcatgaaggcgagtgctacagctctaggttcctcggctctccctgtgttggagaagactcctgccactatcagggaggcatctaaggaacctattgctctgagggagcaagccttggaggatactccactagtggaaggagtgacttctgccattccgatgaatgcgagaggttcagatgatagtctggatgggcttgtgtttccccagaaggattcccccgcaaagtctaaacgcaaaggatcaacctcttccccgagccagggtgccaaaaaggcaaactcttcaactccaactccaacttcattcagtctgtcatctgcaacaccatcacaactgcaataacaatgaaaaccacaacatcatcatcaacaacaacaacaacaacacactccacaacaacaacaacaatagcaaactccacaatagtaacaacaacaacaaactccacgaaaacaacaacagcaaactccacaactcacaacctaatagttatgtctcgacccaatccaccatagacatagcctttacccccttagaaccaaacacagcaacaattttccaggccaacatccttcagccatccacccagacttggcacttctttgtgcaggatcccactgttatacttttctttccccatgaaactagtcgttattagctacaaagttcttaccaagatgggtgaaactactatcaccttgaaaaggcatcatgaaagggagcagttagtccttcagataaggtctactaggctatcttccgtgaagacaactgagattatgaaagggatctgtatgacttttccattaggcccggtgatggacacagtggcagtgagtcaaaacctaattcccagggttgggagagaggtggcaccttatgtcactgagatgctagaacatgtgggcatgagcataagtaaactcacgtctgagaagtggtctgttagcagtagcccagatttatacaccttatttgtggcaacaaaacaataggcagtaggagtaacttctggttttcatgtatcatcaatgttgccttttggttgtgcacagtcatctaattgcatttgttttatgtcagatggccttattcgcggagaggacttccaaagaagtgggcataatgaccaccgagatggggcaacttcattcttggaaccaatctctagttcgagaacaaaactcttcacgttgaggtagaacaaattatgtccctgaccacccaagatgtaaaagaaccccaagacatgcaatgctaagcaagcccagatgggaaaggaaattagtcccaaatactagaagttgtatgaggatcacaaatttgaggttgaatagaaaatccagtccactctaacatctctccatgaaaaaattttccaaactagggaagacaaggaaaaagttaaggctacgctgttccctaaggcgagaccttaaaaatccaaatccaagaggttggttccttacaagaggagggtcacgagaaatacttggtcattcaaggcctgcgtaatgactacgaccagttgaagaagttgaataactcactgtcagtcaagtatgttaacttggagttgcaatatacaactatccgtgcgaccaaaaccactcgctaggaaaccatagaaaaactatggatggaggctcctcaaaaacttgtcaatggcacaaaagctttgattgctttggcggatatgcaaagagtgagggagaatgtagttcagactatccaagatgcggctgactgggaggtcagggcagctagtgtaatacccggaattaagaaatggatt

SEQ ID NO: 297250 - DNA, 5198 bp, Cannabis indica
actattagctcagttaactgttccttgtcatgaatcatacctaactaccacacaataactagctaacttcaaaactttggcagcgccatcagaacgggcaattttgtagttggaaactataaaaaacagccgccgatatcagcagaacaagcactgccaagaaaacttgcttatagtttaatattcctgcatctattctcctcaccgtctctggtcccggcacacttccgactaatatcttaccggaagagacaccttcgggagttttctccatctgataaaatgaatataaagaagcaaatgtcaaaacaagttttcagtgactgaaaagcctttctcaataacaacaacctagcatatttttttcaaaaagtacttgcttaaatccaaattaggtaacaaaaactaatatttagcataaattatacaacaagaatgcattgaaaaaaatttacacaacacaacaatgaatttcttgtactaccaatagaggttttctttgggaaaaaactatgaaaaagtactgaaggtagcatgcaaaagattgtccatcctaaaaaataagacttaaacatccacaagcctgcctacaactatgcaaataaatatgatacactaaaataaacttaaatttcacaaatgaaatattcctgtgaaaattaaacactaagaatagattattatgtctaagcaccatcagacttttatcaaacaaaacaatgaagcatgaatcacctaccttagaactgatagtagacaccacagtatcttctttcttaacttctgagcaagtagcagtactcaaattatcctttggctgcataaattctttatcgtgcctcataactgcgtgcttgttgctttcttgtaacttcatccccaaaatcttattttcagttgccaatgaagaaatctgcatgtaacacaataaacaacccaccatgaaacttttagtgccatgaaggaaatttcacatcacccctctgtttagtttagatcttggatttttttaagaatttcattgctcttgtttggattcaaagaaaatattgagatcaataataaatcataaatatttataatttacaaaatttagagcaattataaataaatatattaacaaaggtcacaaaataaagaaaaatatattcattatttttccttactcttttttttctcacaaaaattttccatggtaaaatccatgatccaaacaaggcttacacgaccaagtacagactattgatgtacaacaaccaggtatatccattcccatctcaagaatatagaaagaaagaaaaaaaaataactagcacaactgtggaagaaaatgttaagttgtggaaacatccatgattgataactgtaatacatagtttattaaattgattactcctgttaataattcaaactggagaacagaatgcaatatgcaacaaagtatctaaaatgttaagaagttcaacgagtcataaagaaaagaaagttcatgatgagaaccatcaacaaaaaaatatgaaattaaattaaaagatgaaattttgtgtttggtcagttgttctacattgaaaattttcttttatccaaaagtgaagaaaattcatcatatgtgttttttacttgccttattttggctcggacggtaatatgtaaagtaaatccaaccctacaaaccccaacttcacaccacatataggttagaatatcttcctcctattgaactataatttattgctactttcttaatttactttttgccagggtgggagtaagactatcagaataaaaaggcattttaataaaaccagatatgtgttcggtgaatacctgcttatgaaggcattctcgttcaaaagctagttgcatcaccaaatttgtaatgactttggtctggaaactgatgccctctgcagcagtcatctttgtttcatcagtctgttgtaaaaccgcttccaagctttccaatcgtccccttaagaagttcaattcctcatttagctctgcatgagattcagataatatgatgcacttatcctctgcactatcagcccgattctcagatttcaaaaccttcagcttaagatcctcaatcaaattctccatatcagatattgtagaatacagtaggctttgcttctcttgactggcttcggcagatgcgattgcacattgtagctggatatcagactctcttaactgcctctcaagggaatcaaccctgtcagaagtgccagcaccactcttaagaaggcccagctcttcattaagttccatattggtctctgttaataatttacacttggtttcagcattttcagcccgactttcagctttagatattctctcttcagaatctgcaacaacattttccatttcattgattctggaacatagagcattgagctcttcctgagtaccatctgcagaagattttgcattcagcagccgaaacttagattctttcagctcgttttcaagcgaactgaccttttcacccaaagtgaaggcttctgaattggcaagaattaacttatcttcagctgctctcaagttggtttttaattcttttgtctgtgcaacaagcaagtcattaaattttgcgttgctgctttccagcttgctcaaagaattttctttagccttcagctcttccttggaaccttcaagctttgatcttagctgagtctcttgttgagatgaactgttcaaactgagctggagtatctgcaatcgacccaacagctctttcgaaattcccattgaaaccacagccgtgttatctgcctcaaacaatctttcccaaacatcttctgttttcatctcccatgcagtatacttctcgttctgaggagacccagtctctgatttagctcttcttcaacttgtcttaactctgtcattttcttttcaagatccatttctcttgccagagatttctccagcatcctcaaaatatgtctttgttgttcagcagttttgcatttttatttctgcatttgcattaaagaactgatcctcctctaacattttatggccagtccctgtcaacgtgtgcattcgacagtgagaacctaggataattaatagttctacttgtttataagcacacaacattaagtctccatcaaaagagagaattcatttctaaatgaaaattaaaaacaggagaatgggatagagccagatgcttttcattacttctatcaaattgttgaggaattaaattgtatggacctaaaccagtatatcaaacaatagctcaaactaattgaacaaaggctcatccaaaaggtacatatccgagctaagataggaactgaaggtccccatcttgaaatcctggggaaaagatatctatgactggtctgtggctgtgaacttgataaattcaagatagcccaaacagaaatcaacttcgatttaattaccacaattttgtcttaggtcaaacacaactagcttagctaatgatcttacacaaccatcatattaaggaagtaacagtgacgattatatttcaaccataataactacaaaatcaaattatttgataagtaataagttgctcaccattctcttgtcgatcgaaacatgataaagccctctgcaagtccttcgagtgtgtctgaagttgagaaaactggtctaatgactgtttaaaagattgttcacaatcatgtaatttttcttccaatcctctagaagtttctcccacatacgaacatgatgatagtaactctcgagcattaacaactcccgattgaagtacagccatgaatccatccaattctctcacctctgattccaaaactccagataagaaatcaaattccaaagctttctctaaagaatcatctgataaatgatctttctccgaagccaaagcttcaaagtcattttccctagttgacacatgcatcataagaacagttgtgttggctatcttctcacaagtgcatgctagatcaagttccagctgtgttagaaactccccagcatttcctaactccccattcactaaaattctatcagcaaagtcaactttacccatctctgcttctaggtcaacagtatagccatgatcagcagaaacactaggtacataaacatcattagaatccatctcaaatgctcagttattgtccaacctggaattcaaaaacaaaaaacaaaaaacaaaacagaatcaatccaattcaattttagataacaaccgcaaacacaaatggaaaaactatagaatttctgattttcatgtttaagacttcactcccataatatacatataaacatatatataaaagaaaacaatataacatataacataaaaaataaaaacattatttcttcacaagggatcaagcacaggcccccaccatgctgatccaatagtgatgtatgtatatcaacctatattacaccattggagaacaaagacatactagaaacagtcattagcccgtattatgtcccatcccaatataaaaaggctaatttatcgatcacccagttgaaaacatatccataaaaccaatttacaaatcttgaatacccatttaagcattttacaacatacgacaacaaaccaacaaaacattggaaaacagactaaaaaccacggtagttttaggcctaaatcttattgggtaatggaggaaaaagaaaatgaaagattatacctgtttatgttttgtcctgagaagcttcttgggttttaatgtaagtttcaaaacgatgaaaaatccatggagaacaactatgatcgtttacaggtgaaagggaatgtgtataaataacttggacaaactaaggttagattcctccgaaaaataaaggtgtaattattaattaatgtaagagaatttgttcatctaagattagtgcgtgttcagttaacgtaagcagcggtgcgcaatgcgcataatacgtggtggcctgtctctacggcgcttggttggctgttggatcgagtattgggtttgggttataatatatttgggcttttattttgggccgatatgtcaaatgtattgggcttttatcttggtgtatgttgaggaaattacactccatacctttccttttgtatattagaggaaattatacaggaaattatactctatttttataatgttctcttttatttttattttcttttttaaagtctatcatttttacctcttttttaaatattgtac

SEQ ID NO: 297251 - DNA, 1899 bp, Cannabis indica
gcgtgtgagggtaattttgtaataaagtgtgtaaaaaggatttttcatgtaaaaatttctaaaatttagggtcgtaactaaacgaatctctcttccctttggttaaataatttttatttcatctttaaccggttgtttagatttagtttgttctaagtaagaattttctacaataaatatatataaaaatttaaaagggacactacttggagttcgtttttgtaatacaggtggtctttcaacatttctaacaaaaattttggcttttggatgggattggagttgggtttgttattggtctgcatgataaattagatttgttgtcgctggttttattgttgaattatgttagagagtcccacattgctaatgtgtggaaagaaaatagaatatataagaggaatgtgctactcctctcattgccaattggttttgagatggaacctcattcatcttattcccatatcgtaatgagttgggcatctttttcttatgtcatgcactttgactaaacaatgagttttttttgtttttttttttttttttttgtaattgtacaatgtagctttttttgggaagtaagctactactcccatttgtaattcagtttcagtgtagttctaatacaatattttattcttgacaaaaaaaaaaaaaaaaatactaaatcataatccaaatccaaaacagctctttcaattaggtactgctgcagccaaacctgcatcaatcaggatttggtttattttactaaaatgaatattaattgcgtttctacagctaaaaataatatattctttgagagaaaattgtataccttattaatatggtagaattttattcaaaagatgtatcttagagcatcacagcgctgatgaagagaagcgctcagcaactcttggtagccactcttgaaagtaggcctggcaatccatctcagcacgagagatggcgttaaggggagtgacagtaatctggaaaatgaaatcataagaacattgttaatcacaggaataacctcttctataaattgaagtaaccaaatatacacacatatccttcttgcaaaattcggtgatctgtatcatcctccttatctgattcagcacccataacctacaaaagcaaaaacgcgtttattattcaatatttgtcaaaaaggatgcaattaaatttaaaatatgaagttagaacacaaggaaaagtaaagttttcccaattcattttaagcgtttacaatcaagtacttccaaaaaatacataatcataatgcacaaacagcagtcatttcagaatctttagaaccgaattcagcagcagctattagcttcaatataagtattcttcttttgtttccaatcttaggagactcgaaatatgaattctaatgtgtaccacacacaatatccaagcatagaaactatcaaacttcaaggaaacatgaagaatagaaaaatatacagcagaacaatggcaagaaacaaaagtaaattaaatgataatacaaaagctgcagaaagtaaaatgataacaggacatacttttctttggaagaatcgatagtctgttgacacagctgaagtatcaacttctgcagacccagctgaatctgattccattgtcatggttgacaacattttggctccttccatatcagaagaaacttctgtccatcccattctgaatatggtcttaccctgcttagttagcttatatcccttcgaaggcacagttagatagaaattagcattgaagacacacaagtcaatcagactcaaagaatagatgatggggttatgggaggaaaagcaggaacttcattgtatagagaggcttaaacaggtacctagttgttttgccttctttctttctttactttttttacctctctctctctct

SEQ ID NO: 297252 - DNA, 1440 bp, Cannabis indica
aaaattatacaatttttacactttttgaaagtataatatgtttaggaatatcagattttgaggagtcctcaagaaacaatataatgattactgtaaaatgatacgtgtaataacaggcggaaaaagttgtctaagagtttgtgaatcaataacagaattatctaacctctacagtaatataatcgatttactttccacagtaagagaatcaattgcacaacttaactggctgctctaacaaccacaacgaataactaatgaactcgtaatcattaaatattcataaaatattcaacatacaacatacatacataatgactaaataatttaacttaaacactgcgtcaaactagacaatgcaacatacatagctagtaattactgtgccactaaatgaaacatggaagtatgaagagtcctatgatcatgcaacgttgatgtttgacctatgatcatgaaaagaaatgtattattagatgcatacctacgaaatattaagagtcctatgatcatgcaacaatttagttatatcatgtaaggaaagcgactgtttcaatgctaataaatgtattattagattgtcaatgcaacattgaaatatgaagaatcctataatcatgcaacaattacgttatatcgttgtaagggagctaattgttccattactaataaagagccctatgaccatgccctatatacattgaattgattttctcattatacactaccttgtacgtctagtagtttttctgtaagcatccatcatgtttggcaaagcctactttgtgttcttaaaagcgaaggagctggtgtgtaaaaatcatatcataaaacagtcatggagtgcaccaaggtttgtgataacataatccttggctataattgtagggaggttgcgaaggttgttttttaagttattcagaaagggtttgtttgacccaatacttcaaaaattatcaattgcgattgtctagaagatcaccccttctacgaagctcactgtgactgaccccctcgtccatgttcacagacaccaaggaagcaccaataaaaattagggaacaataataatattttaatgtgttttttgctacttctatggctgttggggacatcaaaggaagggatacactctttcttctctggtcatagtcgcaaaccttgatggtgtcccctttcctatgttcggtccgtggctctctactgcatcaacactactacaagaacccccattagaggcagtttttaagccctttcaacgtcgattttggcaaaatttgctactgacgctgatcagggtgaagctaaaggcttttaaaaaatcgacgatgtatataccctatagtgtcagtttttagcatggaaccgacgccataaggtatatatggcatcggttcctagctaataaccgacgccttatgtggcataggaaccgacgcc

SEQ ID NO: 297253 - DNA, 4984 bp, Cannabis indica
atacaatgtcgatggaaccattcaaacctataaggctagattggtggccaaaggatatagacaaaaggaaggaatcgattactttgaagcttatgcttctgtagcaagaatcacttctattagattgtcattttctttgtcatcatacataacctacatgttcatcaaatgggtgtcaaaatgacattcttttataaaaatcttgaagaggaggtttacatggaacaactagaaggttttgttctaagggacaatgaacacaaggtgtgttgacttgtgaagtcactttatggacttaaacaagcactaaaacaatggcatgaaaagtttaatcaagccattactttcaatggtttcaaacacaatatcgtccacaagtgcttatactctaagacttgtgaaaatgtgatcattttggtatgtctttatgtggatgatatgttgataataagcaatgacttaagaggcattaaagaaaccaaaaagtttatatttttaaattttaagatgaaagaccttagagtggttgacaccaacttagagataaaagttaagaaaacccaagagggatatgcattaagtcaagctcattacattgaagagataattaacaagtttaatcatcttggtattaaagaagcaaacactccattcaatcgaggagagaaaataaaaaagaatgaaggaagagtggtggctcaagttgagtatgcaagtgcattagggagtctaatgtatatcactcattgtacaagatcagacatagaatatgtggtcggcaaacatggtaaatatactagcaaactaagtggccaacattggagagtaatgggaagagtctttggctatcttaaaagaacaaaagacttaagcctccaatattttggattttctaaagcacttgaacgatatttcgatgcgagttggatattgaatgtgggggaaaataactccataactggttgggtgttcaccttaggtggaggtgcaatttcttggggttctaagaaacaaacatgcataagccactcaactatggaatcaaagtttatagcactagcgacaaccaacaacaagacctagtggttgagagatctcatgttagatataccactactcgagatagatgttactacaatatccatacactgtgacaattaagtcacccaagcaaatgtttataataaagtttataatgggaagtctaaacacattagtcaagaaatgagtatatctgatttaaagaggaatcatatcgatttcatatgtgaaatcatgtgaaaacttagcagatccatttacaaaaatttttgcaagagatccagtacattctacatatagagggatgggactaaaactccttaagtaatagattcaccaatgatgacaacccaatttgctatcccattgggtaagaaattcaatgagtaagaaaaattctttgataggttgatagttttaacattaaaaaaatatataggtcccatctaaggatggttaatgttggttgatacggactagagggttaaccaaaaagtttaaatgaaatttagtttgtgagaaacaagcatctccaaagtagcaaagatgttgtaagaatttcacatatatgaacttagaggtggtgtcatctttcatgggagtagagttttctccttggatggttcatgaatggactagcgtaagaccatattagtgctaagcgtgtaaaagtgggagtaacacaagagaacaagtgaaggtgtgtggaagttcacttgagcacaatactgccagttttatcaattaaggacttggaggttcaatccataggaataccaactcgcgccgataaggctttgcaatgttttactaaggcaatattcaactcaaaagagatattgctttacgcaccaacactttctatttagaaatgagaaaggaataattatttaaccaagtggaggattgttgaaattagttaaatacttaagggttatacaataagattagtagtaggggtgttcgcggtgcgggtggtgcaagttgtagccattttttcaaaccaaactacatatgcagtttttataattttttaaacttcatcagcatcgcgagatcttaaaatcgcgaaaactataccacgaaaatacggtgtggtgcggtgcggtttgagcggtttacactatcattatcaaatattataatgaaaatttaaaaagctttaacaatacagaacaaaaaattcttattaaaattttaacatcataacatgtataataatcatcaattcattatattgaattgtgtcaaaaataaagtaatatacacatatattatatatatatatatatttgttcttatatgaaaacaagaataaatatcatattgtaaaaattggtaactttgcaatatatagtacggtgcagtttgaattgcaatgattaaattcaaaaccacaaaccgcatcgcgcgatatagtaaaaatgcaaattacaactacaccgtaaaagatttcaaactgtattttttatgcagtgtggtgcggtgcaggcagtttgtgtagtttaggcggtatgatgaacacccctaattagtagagactaatcaatgagacttgtataagttaataatgcaaatgaaaagactaaaacacattaagtggatgtgtactttaaacttgtatttgtaggatgtgttagaaactatcttaaaatcctaaaacttagttttgagtatattaagtcacctgaaaagttctgtgtcatttgaaagtataaatgcaaagtttggaggaaaatgcacagtactaggcaacatgtcgcctagaatatttatgaaattacagaaaataatcaccatcaaagtcctaagatatatgttgcctacttcaaatgatatgtcgcctaatatgaaggtgacatgtcgcccaatgataggcgacatgtcgcctgtgacattatgggatttgagatttgtgattttgatttttctcaatgatgtgacatgtcacccagtgattggtgacatgttgcctgaagcagattatgggaaattttaaaattttgtaaaatacaagaaatgacccaaataacctcattaagtatccttataacgtggattagggttaatgatggttcctacagtatataaggggttaaagtgagccaaaataaattaatcactcattttgcaatctctctctaacactctcttttttatctctaaataagttctctagttctctccataattgtcttagggttttactaagcctaagaaagtcaaggtttgaagtctcaaatcttattttaaaagaaaaagaagccattagcaatccatgggacgttcggagtaaagattttttggataagcgttatctaacccaacaagtctcttttaaagattcgatctcccaatccaattttggttatctctaacctttgtattttttttatttaggttttgatcctccattgtttgtctcttgagaacttttgtgatttttttcttttcctttattcattaatgaataattaattgttagaatttcataaagtcctccttgatcccaacacaaaggacacccctctttaagactcaaaatcgatcgtcaactagggaaaacttaaacaaaaacatattggattcgagagactcaaccttaaccgtgcctttaaatttccacatattactagtcgcacaaaccactgactcccaaggaatcaatttggccgaagtaacgtagcccacaagaaattttgcaaccttattaaccccttcagaaacaattacgaatcaagatctgccaaaaaagcatcattgatttcgtcaacctctaaagcatactgtaacactgccaacttgtcactgtctatgactactaaagagaaaatgcaataaccactttgaactcagatttattgtgatagagacttaaataagagagagattccaaaaaaaaatatttattataaatgattactatatagcatagaaatcctaaatgctatacagaccatacgagtactcttgtccaatattaaaatctatatctacagatttatagcatatttaattttcatttttaaattttgaattataaacattaaatcacctaaatggtgatcaaatactcacaattattaaacacaaatttcaaagatcataaaaatgaaaaggaaaattaaaaaattacattaatcaataattagtttcaaaagactccattaaaactctaaaaaaataatttagttcatgttcatggtaaaaatatccatgaaactacaattaacataaaaataaaagaaagagaagaaataaaactctaaagaggcatccattctcctccacggtgttccaagaagtctcccccaagttttagcctttaaaaactaagttttcttgataaaaaacgtaataatctcattgtttttccaaaatgaaaggacaataacagtcttaattaacatattttaaaaaaaaatgacattcgagaacacttatgcggctgcaccaaacatctctgcggttgcacaactcctttagaaacaatattttttagctttttaaaatttttggctcaatcttctatatttttgcattatttctacttcaagtagtactgtatccatataaacttgaaaacagaataaaacaagcgtaaacgcacactaaataaacttaaatcctaagacaacctaaattaacgccctaaagtgagtctaaaactatcactttatttattttttctctcttcaaatttttctttcctcagtattataaacacttacattatagggtgaagggagaggaataaatggattgatggattcttttgtttagtaagagggagaaagaagagagatactcttcctctaaacacgaaaattttaatccttctaaaaatagtagaattcaagaaaaagataaaaaaaaattatataaaagtcttttctatcatcttaaaaaataatacaatggtaattttaatatttattttact

SEQ ID NO: 297254 - DNA, 2700 bp, Cannabis indica
tatatataaatatataaaaagaaatcgggatcggaaccctaatttgtgattttgggatctggagattccgatggctgatcgggaggaggaggatcttaaaatggctatgcggatgagtatgcagaattcgccgccggaacctaagcggagtaagcctagggacgtacctgatggaattccgaccgatgagtcaccggagatcaagagccgccggattcagcgagaactcatggctgccgctgccgagaagcgaatgttagccttcaagaaagattcgcctcctccggcttcttcaccggtaccggtttctgctggctctgtgatggtacctattatgggttcggattcggttccggggtccatttctgtcaagaaagagaaggaaattagcgttggggatttgaatttggggaaggagctaacggaagctgaagcgaaccagctgttttcgatggtgtttggagctggagtctccaagggtattctttcgcagtggagtaatcagggtataaggtatgtttgacatttgaatttgaaaccccaattttggtttcgaattttttatttttatttaatttttaaaataacaatgcgattgactgattgagcttctcatgtgataataaattaaattcatatccgcaaagtgttgttggtagaacaatttgattgccctgtctcaaattagggttaataatttgcattatattcgattgtacaaagtacaatgtcaagtggatagatacctgggtagagtgaaaggcaatacacattattaattgattattttccctttatttttattgtatgcacatgtgattgaactctgaagcatataattccatgtcaaatgtacaaataaagatactttctttgttcttgtaaaacaattttttcttgataatgacaataccaatcaacacaggctgataagtattgatgccttttacactatatttcaaataataaggtccttagatgaaatatttttacttttgccacctgcaaataacttaataacaaggacttgtaaagcattccatgaccatttggcattgtgttgatgaacaaataaataaatatggaaatagttatatatgctcaactgtcttaaagtaatttacttccatacccaattatctctcaatttttgccatgtcaggtgctgcttggttcactatgttttactgctgcaaagacaattcaatttgaacttttcataataaatttgtaggttcgtcattttagaacagacatttatcaatatttatgttcacctgtgttgcttttcatttttcgtttttttaagctctcccttaatggtttttatttatttttgtaactacggaagttcactggagtagcaactacttgttttaaaaaatagaaaaattatgacactctatggtagcatctcgtcagttgagaaaagtataattggctttgttttcactaataatgcttatgcttttatggtgactggtctacttaaacactttctctttgtcccttatacaacttacaagtaaattcttttctataggtttagccctgatccagagacatctatgggtctggtgcagcatgaaggtgggccttgtggtgtcttagcagccattcaagtaatttcttgatttctcaatatatagcatgcttaggttgttactgcaatttgattgaatttccctacttgacgtgtctaatcctagaaaaaaaattatgatgtggatacatatttagctaactacatatttacacttccacgatagtttcaatattcaaccaacctaattctgaaattgagttagaaatgttttaatttatttgcatactatgttggacctttaatcaatttagattgttttattagtttatggtacactcctctgatcgcaactaaaattttcccatattttcacaagtcagttgcagcaatattcatttctcttgcctcagccatgtaaatccaaaccattgcccatatcacatttcaaatatctttgacatgtgagatttattgaacctcttgagctttaagatgtccattgttgacacagtttctaaccacattaaataagtattaactttgtagaaaataataaccatcctctatgctatattgtgcagtagattacactacttaagttttacacactgtcagcttggttccactattagttttttatacattgccagtagaatctactgtactcttattttgctgtttggttaaatatgggtgacaactgtgtacatcagaagtcttaacgtgccagggatgaaaagggccatcctttacatcttattgtgcagtagaatctactacttttgtttcatatttaaccagtaaggtttcactatgcataacctagaggattttgagcttcacatgctatactttctctcatttttcttatcaacgtgtagtgtggccatgttattgttctgcatataaactatagcttcagcggtttggtcaggaaaattttcctcagaatacagtgaattattaagttcacagtgctattcattgtttgtctgatgaaaatacatgctttatattaatttaatgtcagttgattaaactactataccacaatacaagtcagttttgttggtttttcagttgcagaaacttggcttgtagtgtgagttttatttgaatgtccttaactctttttattattgtaacgggtttag

SEQ ID NO: 297255 - DNA, 548 bp, Cannabis indica
aagaaaaagagagctctaaatcttcatctcctctttccctaactttcctagtctgtctttttatatgactttctccctttattttctctattctctttctatcaacgaaactagagattgttatggatacttgcacaattgcatttctcgtgcaagggcgacgaagctggtggagtagaaaccttatgtttccttgctattttgagcattgataaataatttttacaataggatatacaatacttatttgagtacatctatgttgagcttcaacaagatggcatgtacttccgcgtttcattgcactactacaaattacactattcacgtcggtcaacgctactgttcgaggcttgttaaatgtggatagattcaaaattagagtaatttttatttctatcttgatatggctttatcctctaggctctagactatagcatgtctttttcttttcactttttaattgtctagagtaatttttaattgtctttttctttaaaggcaggttaaatagcaagataacaaataagagatttttacgtggttca

SEQ ID NO: 297256 - DNA, 1405 bp, Cannabis indica
gggtaattagggtcaaaaagtagaaacgtaccctgacactcatttaatgtaccctgagacccatctaatgtaccacggaatacattctgtgaaagtacattacgggacaaaatcatatccctaataatatatttaaacataaataattaagttgtggacaaaatgtgaaaaggaatttcttatggggtctaatttccacaaattctatagtgttgtccactcaacaaaatgggatttgatatgattatgatacaccctatcaagggattatgttaattatgtcttttctttttcatgaaaaaactttctaatcaactttacattttggctttatgcatgcatggacctttgcattttcaattcctcccaatctaaaaacatggtaattaattaataaattaattttaggtggtatctgttgtgtgtgtcgggacatagggaaaaatacaattctacaacatgataaaggagaatattaattaggttaattttaaaaaataaaaaattaattaacaatgactttatatataaaaaaaattatataaaaaatcttggtggggtaggagagctaatgtactcctttttaggctctatttcttcaattacaagagaagagggtattattatcttaatttgcaagagagaaagattaagttaagagaatattaattggtatctcccttttgatgaggcttttttaattattattcgtactttttattaccattaattttttttttttgaaagatattaccattaattaatattagcttttgataatgatgcttacatcgtttgattgacttaatcatttttttaaatgcaaataagtttcacgacaaaattaacatataattaattatcatttccatgcaacgcgtactagaaatttgtataatttaatctgaattttatgaatcaagggtctttgacatattaccttacaaagttaaataaaaaaaatagcagtcaaataatttacattaatttaattacataaatgatgccgcccctagccttttcttagtcaatttttaaaattaaaatttatcttttaaataacgaataaatttataagaaaataatcaagacttttttattcaaattaataaaaaatggtaatatcttttagattaaaattattttagaaaaaaaaaatagaagtaataatattttgaaatatattttttatgtaataaaacttatatttattgtttcttcataaaattcgtatggacattgatagtttcaaagttagttattgtttgtttataattatatatataatgtcatataatagaaaaattaactagcattttactataatgtaatatatatatctttatatattaaaagtgtctatctaacggcatttcttggtttaacattcttggtttaacagaat

SEQ ID NO: 297257 - DNA, 7516 bp, Cannabis indica
ttaaaaatgtataactaattacaatttaaaagttatttataattgacttaatttgttgatttaatttttataataaattaaaggttatttttaaataatatccctaaataaatgttctactatatttatcgcccttaattaaaaagatatcaaataaaacatgacatgttttcttaagagcattgctattgggcaccaatagtgtttagtacctctacacatgtcgtcttgtgattgactagcgatactccttaaaagtaattatattaaattatataggactcgatacttaattaaactaattataataataacatataagataatactaggcagcactaatattatttttttaatggatatacgtttttcttttttgaatgtgaatggatggatataggttttggtttaggaaataagaaaaagtagggttggagttgaagctcataaatatgaatggttaagatttaaatataaggattaaatagatggcatgagagttggtaaagccgtaaaaggcatttatgagctgtattatgatttgtgacttatttgtccctttttatacccaaaatgttaacatatttgtcaaccatattcattcattggttttaatcatatacaatcttcttcgccacatatttcatatcttctctatgaactaataaaactatcaaaaactaatgtaacctttaataagagattcaacgccccaacctttaaaattcatttaactgctaattattttttttaaaaaaatataaggtgtttctagaatacactccattaaaatatgtgtactgatgtaatttttaactgtttcggtatttataagaatatttagtctaattttttttttttattttttataatcgtgtatgttatagttatttaagatattctgtaaaattttgaaaaatttaaagtaatttatttaaaacgtctatttcacatgcgtataaaataaaaagtcacacgtgcaataaattctttaaacattgttttcgacgtattaaatttttctaaatttctcaatattttatcaaatgtcttaaataattataatgtatccgatcataaaataaaattaaactaagtagctttttagataccaaaataaataaagtacattaatatactcattttaaaaggagtgtattataaattttttcaatatatatataagcaattaatccattgccacaagattttaaacttgtattaaatttttgtatattacagcacagctcagtacagcacatatgaagaagatcatacttattattgaatgacatcaaatttgcataagcatatttttttttatagaaaagttaaaacaaatgataataatagagatcgtaaacaaggagtcactgacctctttaattatccaaacaaccaattgccacgtggctgacacactttttttttaaataaaaaaatatttacttttctgagttgactgtttgagtgtctgagactgagatgagagatgttgttggttttttttttaatataatatttttggtagatttatacagtggtgaatggtgatgtgctagttactcacatgtgtcacgcgtgcgaagtgaataggtgaataaagtgagtgaggagagggaagagagtggtgggaaaaggcaattgatggcgttaatgcggtagactagtgtaatggccttgtatctgagtttttctggtcatcggtggggtctacttcctcccaagccggacagctattactgattctacttccgtccccacccacacaccctctttcaagctctcattcatggcttcttcttcttcttcttcatactctctcctcctcctcgcctatattttattaccctgtaaccttttctgtgttgtctttcttactccacattcactcgtttcaaagcctattactttctaaccactcttttcattaattctcttctgtctttcgcctctgtctttccaccatttgaatcctttttatggtttccttatttgggagctacttaagtcaaggcatgagaaaaagggtatctttaagactcagtcacagtatcatttgcttacaagtgcttctgctgtccttctgtgagtgtttttactcttttctcattgattaattaaatgggtttttgttgttttctatgatctgcttgttttaatttttatgggttattcttaaatttccttattttggattatatgtttctgggttttgcttaaatgttgcggggtcaactgaaatgggtactggaaattaatgggcattattgttttgtaatccaaataagtttcttgtggaggttctgtaaattgattttggttgttaaagaataaggtgcattggttattcttctaatattgtttgtataattaaattcattatgtaactctaccattagtattaagctttgttctcttaacttttgacctaaaacttctcatattcgtagacaccatttagttttcgctagaaatttacaccaaaacggaaactttatgtagtggctgactgacgattaagatcttgttgtccttaaactatcaattcaacaaattttaagattttcttttgaataattggattcttgtacaagaaaattggtagaatttaagcataagaatgaaattcctcacttttaactatatatatatgtagttagtttattggcaatttccttgactgtgtaactatgtctgtttcttttcgtgttatttgtcctagtaatttgtgagtgtgtacacaatgctccctttgggctcttgagtatagcattattgttggtttatatcgtattaggtttcaattttaaaagatttaatatttttattcatccctgtgaatgcattcccaatctacattcagaagatattcctacgctctgctttgaaagagggtctccaggtaagtgtatatattattaatgcatattacatgttaacgttggtaggagagttgttttgtctgtatactcttcctctacattgcagttctaacttcttgacgtttcagtttaaaatgtggttataattctaatcgtaacatacatttttttttcttttgtagttaaccttgagttatgttccagccataatagtaactatccagcattggcaaatcatcgaaaagatgatatgttaccacagatctcccccagtggagctcctcagccttttcttccccttcttgcgccatcacctttggcaccgttcacaaatacatcttccccgaaattatcaggtttttccttcctcgaaagctcttaagttgtattagatcttttctgacaatgattggttgaggagttaaattttctatatctctctctgtgcagggctatgtttgttgaactttactgctgctgaaaatttgatgagtacaacatcaatagattgctggtctgtgtttgcaccattgctggctaatgtgatttgctgcccacagatggaagccactcttgcaattctcattggtcagtcgagcaaggataccaattcacttgctttgaatggaaccgttgctaaacattgcttgtcagatattgagcagatcttagttggtcagggtgcaaatgacagtcttaagcagatatgctcaattcattcatcaaatctaactgaagcgtcctgcccagtcaaagatgtcgatgagtttgagagtactgtggatacatctcagttgcttgctgcttgtgagaaaattgatcctgttagagaatgctgtgatcaagtttgtcagaatgcgatatcggaagctgctacaaaaatttcattgaaagcttctgatcttttgagcatggatggctctaatgtgttacctgcacactcagcaaaggtcagtgattgtaaaagtattgtgctgcggtggctggcaagtaaactctctcctacacatgctaaggaagttcttaggggcctgtctaattgcaaagttaacaaaggtaagttttgaagtcaacttttagccatgcttcaaactttagttcctttgtgggtttttgttttttgccttttttctttagttgtaagtttgtatctagagttagttatctcagatttcacgtgttatgtgatccagtttgtcctctggtgttccccgacatgaaacatgtcacaaagggatgcgggaatgagatgagtaaccagactgcatgctgcaccgccatggaaagctatgtgtcccacttgcaaaaacagagtttcataaccaacttgcaagctttagactgtgcaacatcattgggaatgaagttaagaaggtcaaatattacaagtgatgtatatgggctttgtcatataagcctcaaggatttttcccttcaaggtttgctttggccttatttattttctttttgtgtgtgttagttcacaatagcaactaaaagcaagtactaattcatgttctttatgtcattttgcttctattatgatatgacgtccaacatttgatgtgcttcagtgggaaatcaaggtaaattatatctcaatttacataatgtagttcttcccatataaataattgctttgattgtattttgcatatttgttctactttgtcaaaaaaaatgttttgtatccactgctaatgtctggatttcatagttgccacttataggtgcagtccgtgatagtttactgaggctgtactagaaatattagatccaatccaagtggatggagaaataggctcatgaaattttgtcatcttataggagaaaatgtaatctagactaatgaaaatgtggattatggctggtgggagcaacaaaacagctactctagtttgataggtgtcgaaaatagatttatgtatgttcaaatgtccctattaatattcctgtaatcactttttggagcagaggttggatgtcttttgccaagcaagccatccgatgctacatttgatgtgtcttccggaatcagctttctttgtgatctcaacgataatattcccgcaccctggcccaattcatctcaattttcagcttcttcgtgcaagaaaagtatgtccaaccgattatgtttacacaataataaggaattatacgttttggcttctatgttatgtcattagtgaattaaacctcatatgttttttttactctttccgtaatttagatgtgaagattcctgcacttcctgcagccacatctgcacaaattggtaagatcatccagtaaatctaaccttatgctaatggcttaatttcttcctcgtgatatactataatatatgactttttcatttcttttgcatgtattgttggaagaatgaattgtataatattataaatttttcttgtttccaccacaccaaacactgttgtgttgaaattatacaatgtagtatcgaatatggtactataaccactgaggtttaagtaagatgggattgtagcgagaaaggtgtactttgtagtgatgcaattctatgtgtgttttactttgtttttctatataacttaccaagaaggaagattgatcatagcttgaatattgacatggcaggtcttcgcgttgaccaaatggttccattttcattggttgcatcctcaatgctcctatggaagaagctgttgtaagattgcctaacaggaaaacaatgttagatgaaacacaagaattaaaatcggattttgagtcgtcaaacaagtctcgtccgtttacagaagtcatctcagcccagcctgctagtgaagggaacaacctttttttgtaccatgaagagaaaaaccgatgcctaaatgtgtcgtgttttactaatatttcgattaatgattcttgcttattgctttgctttgttttctttctttttgtataattattataataataagtttcttgtaaaggaatattaggaatgatcagaaatgctataaatttgtaactaccacgaagattatacatatatattcagcatgtaaaaagtttccaatctaattgataccccaaatatatttatattaagaatttatcacaaattagtgtctgttttgcatgagtgatataccatattgacatttttgttaatgtttatctggctttgatcattcacagggaaagaattattgaaagaaaaaggtaagttgaaacttggtaattgtataatataattattaatttcgtatagtggattgatgaatggattaaaattccagttcttagcaaattgcaactttctttattctttggtaaatcaataatgccaaaattgaagaatatatgctccttttatcatcccaaaatattccaatatttttatgctacactacacacatctttttctgtatgtgctccactttcttcaccttcattctgctcattaagatctctccctttaatttctgtacatattaatttcgtacaaattcaacaaaatgaaaatatctgctaatgtatatattgaaaagaaataaaaaaaatatcattccgataaagtcatagctgaaaagaaagtgtatataactgcatatgtatttgaagaaaagtaataatgatactaaaaaattattaaaggcatagttgttcatttcatatggaccatatattatatataattaaaatgtagaagatatacctaccagtcttctatgcactatatattgtaacattcatttatatggtttctggaaagttacaatgtaaagtaattaatttgaattatacaaacaaatacaatgaaatggcatcattttcatcttcatcaatcataaacaagagtggatagtacaaattaatactaatcatcaagtgtgagtaattctagcattatttttatacaaaactacagaattagccaatcttgcggatttcatatatgctgtctagctatttttctattttcaccaactcatattagcagcctaattggtattatggtgtcattttttaatacaatttctcaatgagtatgtttggctaatttttcacttttagttattatagttagaagtataagataattagtatatttgactaatttttattgtttggataattattatatgaagatatttttttaatgaaaaatattttttaaagtagttggatatcattgaaagaaggtttttttttattttttttttttatgtaaattatatgttttaattttaaaagtaacttcttcaaattttttttaggagaagctacaaattctagcttctactaaaaggacttttaaattaaaaaagcttattttttttttttttgtagaagctaaaccaaatatacccaataaattattattataataataagtatatatattaactaataacgcaaaacaattatatttttgattcatgaattattaaatagcaaaaagagagttaaaagaagatgaaaaaccgatggagcataggaaattgatttttagatagatatactttttttcaattttcatttgtttttcatttttatatacaaagttttatttgatgctgaaatttttgtagctattttgtagaaaactttcatgagtggctaattaaaaataataatataattattattattat

SEQ ID NO: 297258 - DNA, 7156 bp, Cannabis indica
atatttttataacttaattattaatacctgaaacacggttttgtttactagtttgctaataaaattaggtttaataagatttttaaattttctttattccagattccaacagagataaatagtacttcaaaaataaaatgtgaggaatcctttgcatggggaactccatgtcggcttgctgatattcaggtgatggcggattctcagatctcggcagcggatattttcactgattgtcaagtgctggcccgagcaatgggaagattcctcccaagtaatttgcctttttcaatttttagatgtttttcaatgtctggactgtttcgtgattcggatccttcgattctaacatctaggttcatgctcttgcaaagtaggttgaactaacaattgttatgggagttgaattcacatttggaggttactcagcagaaacaatagaagaataaatatatattttgaaaataatgaaactgatttttaaacttcaattattaagtataataaagaaaaggccagaaaagaaacacaagacagtttcatgcgccttttcataactgcaatgtttaatatatcttttcacaactgcaatgtttgattgggaaactcgacttgactagacgtcactaatgatttagctttaaaacaagtcttaaactgcgagacaacgacgaccatatacataccacgactaaaatactcatcaccaaatattaccatttttcagtgtcactatcacaatttttatcccatttctaaacacctagtaccagtttccattaaccaagccaaactcagcttttccccaaagctttctgccacaaaactctggtatagcttaacccaaccattatcagttgccacctaaggaaccgcccgcaataccaattttgatagctaacactgattcaagagtttaatagataggaacggtgagtacaccatttttattccaccaaattgccggagacatcagccccaaaaccaacggatggcattactattaaacacgtttaattcaccccagataaaatgcttacacttcttaggagtttcgcatcatgattcagatctctgtatttcttcacccttccgagagcatgaaagctcaatgaaatctgtacacaaaacaaaaacacaagaaacggtgtaatattagcgtaaaaattatttgattgcagcccatgcattgccatccacattaaaagattaattattcgctaaagagcataaaaaatctcaaatcaatactcataggtgttgattctcacccaccttgccttgagttagtcaaatttaaaataactaaactgtgaacccactgaagaaaaaatatcagataccactgtaagatcattaaatgataaatatgcaacagaaatctgcatatgggcccagaaatattgcttctaatatgaacatgagatgttagatgcacttcagatatgcaaccagaaaaataatgacacaaaataatagaagagaacaaaggcaatccatggtagaatgttacccgcaaaaatacccaatcaatttttcaagtatagccagtacatcacaattttaaccagaaaaacactggtccatacaattatactgaggcaacaaaagaaatcaataaaataatatattcttagaaataaaatgttatagtgtggtgcataagaatattttagctcatctttataaaagtgaactctaagcagacaaatttagcacatactagaagttgtgtcaaatttaacacaaaatatagtatgatccaaatttacactacaaaatatttacttttttatttactctttccctacttagtataacttataactttttacattttatttataaatttaataagaatttatatactttcaataaagatttaatgtttttgttgacttttttacaccattctaaaaaaaaaagttaattttatccctaatgcattggagcactagagcactattgtaaaatttaggtcaaatataacatttactcattttttgagacaaatttagctcaaattacaccatccattggagatggtcttagaggacaatttctatagtccagcaaaaatcttgtagcatattattttcacctaacaggcagcatgcaaaacaaacataaccataacacgttggagaaaaagagtatttaaaaaagagcatgaaaacggaaaaagcaagaataacctgtgtactagcaacttcctgcacgaagccaaggccaccaaacctccattaacttcaacactgataaggcttcaaatttggagtttaaaattggcagcaaaaggatgcagtaattaccagaacaattctcagaaccctaacaataataacaggattggtcagggctattgcaaaatgtaattgataagatcaacagacatcagaggactacaaagaaaacatgaactcaccatttatactcctgtattgacatcacacaaagtaacgaccggtccagccagactgtccttgatattgctctggtggtggattgaggtgctgattcccattagtgacttgttgttgctgttgctgcagctgctgttcatgttgtaatttaagactgtcaagcattgagctatcttgccatccattttgcttatctgattggaattgcatggttggaacctgtttcccagggaaagggaagttcatagttccagacaagccattgctaatggagacagaatgtgggtttgaaggataattaattgaattattgaggccagaactttttgtggacaagggcacctgatatccatctaaccaactatagtcatccatgatgggactttcacttgccagatcagaaccagaaacagattcattcacgtgcttaggaagaacacggctaaaaccaggaggggggccaagatgcctgctcggacgacttacgggattttttcgcaaacctgtggatgtagcagcagatgtctttacagaaaaactatttgtgattgctccagaagatgcaaagatatcatgcatggatgggattaaagtatctggagctgcttttgtgttattgtaaaaagcactgccattagtaacatttaaagactgttgaactggaactgaaggcatgggaggatgattttcttggatttcagattttactaaatgtccattccccattaatctcaaaccatttaagttgttagcaagaaaagcttcttctcccatcatccattttgatacataaggttgaactggttgaaaatgttggggaacagcattactaacaggcacagatgctaggggatgaccatcaaaagctgtctgatggtaaatattatcaggaagggctgaaatggaactaccactaaaggccacatcacctgcagaagcattctgaatagacttcagaccatcatatgtagcccaattagaatcagcagcttcggatcgcttctcggccactattggcttgaagacaattacttcatcctcctcatctccttctataagaaggtgcctgttggtctgtgaaattgccatatttgttgctttgtcagcagcttgattttcttgtcctagattattatccctattcggaacgcctgaaaatgcatgtaccatgtcatccataatttcaggatcagcaccaataacaaacttctttagccttgaatcaaacctgattgcttttttatcaaccctgacaacactggcaagagccttccctgctgcaaaagtccttttcatacgggcctttctttctttctgaccatcacttccaaatgaatgttttctggaaaaatctaaaagggtttgagcaggaataagtggcgcataacctctcaactcaaagtcctcccacaaagccaagcggttttcagtatttccttcttcatacctactcatgttattaaagcaagtatcatcttcatcatcatctatggacactgaaccagatgacaagagcttgttcaaaaatgatataaagacgttccaaaactttgatctaatagcaccatgtttatcgtccacatcattaccagctgcaacatctggacagcaagctaaccattcagcaaaaactagaatgccaggtaagaggaaacttgaagaaggatcatgcagctgcacacatctttccattatgtggctcatcaactcaaaaacagcaatgcatgcattcattagaagaagattcctttgtagaatttctgcatatgtctgaccctcagattccctattcacattgtgaactgtgaatataagaatggccacaagcctgacaactataagtccactctcaacagcatctgcaccaaaagtaggctcttcttctggcccagatgacagcaacttgcgcatgccaccactcaccaacgaaagaacttcagcaaatgtttccaagctaaagtagagaaaaaaaaaatacaaggatcaaaacaataagacagtcttccaagcaacagaaccaggatttttctatgattaccaagttagaagtttaaacaacgaaaaccaaattacaactttttttgttcacagaaaattaccttgtgcgagtaaagagaatgccatttagacgaacaaaccggacacaaaatgatttatatctctcttgactactagatgctccttccttgacaggtttagattcagcatttggatctttggaaacatgctttccctcccctttccctctagctttgccagataatttcacaggggaatccttgcatcctcgtgcaatagcatccccagagagttgagaataactatggcggttctgaaaataaaaacatgtaaatctcacaaaaacagaaattatgcaacaaaaaagtgaaactttatggttagatatctaaccatataagcattcaacaaattattcaaattcatgctgtacaagtagaagtctagttcattaaaataaacatcccaaagcaactgacttcaaatggaattatcatatcatccaatttataaaatgaaaaaccaatgtctgtaaattcaaacacttgcaaatattacgaaactgaaaaataaataaatcctcatatatataacaagtatattcaaagaaagctacatttgaatgtaatattttgaccaagcatttgaagctactaaatatatacctccctggctaaataagtttaaagctggctgtttcagaaaaatatctaaaactaatggtgaaaccattaacaattgaaaagaatgtgaatgctttcaatacaaatatacattaatgtgtatatatatttatatacataatatatatatataacatccacttccagataaaacaaaccctaaacaaaattccaaaatccttttcaaataagaacggaaaaagaattgaggcaattaacatgcaagtcttataaatatacaagtagaatgatatacttgtttggcaattatacttaaccaaaccacatagccaagatatataaagcagtaagcagctgattctcaaaaccaaaaagcattatgattaccaacatttctagttgaaagtattaaaaatccaattgatgtgatgtaataaagaagagcatttaataccttttcaaatgcaacaattaagttttctctcgcagttgagaagggactatccactgcaagactacgaaaatatcgataaacagccaccaattcatcccccgaataagaagccaaaattgcaagctggagtaataagaggattagttagacataaatatgaaacactacataccgtccaactccagagatgtaaacaaacaaatagataaatacaataaaaagaacctgatggtgaggattcccactagatggcaaaagagaagcagcttgcatatagtaactcgaagctgcagcgaactcacgagtctttgagtcaccctctccatacaatcctttgtaacgtgcaaggtcacccaagtatatcaaactacgatggcaggatatcagacctttcttcacttcagcaaacttttttccatctttctccttgaagctttggttatctgaatcctcagagaaataacccagagacaacccatactttgctctgattttcactattaaatcatggtaaaaaccactagcttctgatagaaaagtcttgaactgcagccttatttttgtcactcgatcaggtcttgtggggcccttcacattttgagcagaatttggaccggaagacgaaagggcagcattgaaatgtgctcttagttcctcaattctcttataatgcaactgccacaaggcatattcaatactgtgctgctcagaaaatgcatggtcttcaagaattattgcctcataattctcccgaatctgctgccatgcatttggatctgatggaattcgagcctgggctgacctccgacgcttattctccaactcatttatctataagaaaaatcagttgtgagtataaatatgattcctgatatgttctcagtgaatagcaatctaaaggtaaaagaaatattgcagaacaatgaacataataattttgcccaaattacaataaattaacatataaatcaaggactggcaatcaggaaaaaactcaacatcaatctcacatgtaatttatattaagtaaataccttatcatacagctgctgagcacgctcccttgaagaaggagcagacattttatctacctgtattatcatcatccatcaaatatctctaacaaactttcaagagcactaaatctggagaaaaaacatagcaacaacaacatcagctgaacaaacctattaagaaaaataaaggaatacaaaaaatttaaataaataaagcaatccaaattccatgccaaattaataagcattaataagacaattgcactgcaaagcattcaagttatggcaacttctcacttagcattacgaaatccaccacgagattaaaaataataacaaacctagccagtgttccatgttaacaatgtctccatacgtaaaaccttcaaacctgaacccagaaaataaaagccttagtttccctgatcaatctgctttcttataagtcctccccatgtcgtaatataatagactactaaacttgagcacggaaagtgtaaagttaaaacacccattcatattgccactagttagacaaacttcaactctcctatataagaattagaaaagactttacgaacatcaatttctatgcaagcc

SEQ ID NO: 297259 - DNA, 1071 bp, Cannabis indica
aataataataacaatataattgtatcacacttaatataccaaataccaatatatgtagataaactggatattacagcaattgcggttgatcacctttggacaaacaaaattatcaagctctttggtcttagaatattcaagcactgagtgtaatctctagattaagtagttaaacatgaagtttgaaatagaacacatgtttagattgccaaaaaaaataatactttagatatggattggattgttcatttgtaaatatagcagttgaatttgcttgttcttgaattttttcccttttttctttcaggtctaagtggtgctactagtttgtaaatattgattgaggcaatataactttcctgattcataaaagaaaaacatgtattataatattttacttttttttttacggtggtttttagattttatttaaaaaaattaaattgtatggctagagaatttgtacattgattagctcgggatactcttcgggtatgtaaagaattcaagtgtataaagaacttatgtggttaaatataaggtgggacattcgtatttgaaacccacctacgcaacctgaataactcaaaaaacccaaaaagaagagtttgaaattataaggcgggttcgggttacactcggttacccaccgagcaacaattcaggttctaaaattgtgacacctcaagaccagagtcaaatccgaacccacctgagaaacccattttttttaattatatataatatatttatacaactagacccacacccatttaaaaattaaaaaaaatgaaaaaaaaacaaaaagtgatttcttcaaaaacaaaaaggcccagtccaactccaaacccggtcccaactcacccgggctcatcccaactcgcacctgacccatccgaaaactcggtccctcacacgggcaggttcggcacttataaaatacagacctgaaattgaaaactcaaaactcgagaaaaccaacccgacttgcacccctaattagataagttattaaaataactaatgattatttcacttatatataaaaaaaaactaattaggatttttgcc

SEQ ID NO: 297260 - DNA, 3642 bp, Cannabis indica
taatatgactccttccgtttagatggtcttattgtgttttttggcctttcttgcatgctgagtaagaaaccctagtggggtaaagggtatgtcgttacctgcacatgtgcctataaatacccctatttttgtatagagggtgaacaattttacttacaaaaactgtgctaaaattcctagagagcttttctcttaaaaagagataaaaggaaaacatagattatcattgtaaacacttgtaatactcaaaaatttgccaaaggaggctaatactactgactcgtggactagggatcattaatgccggaactacgtaaaaactgtatttgtttgttacataatattttaaatttccttaagcttttattaatcaatttttaaaaatctcggtaaatattttggtgctttcattaagagctgaggaaggtttattagttgttgactaactttaactatggtgaatacgcaaaaaaacaccagcaagaaaactccattggacatagtcatggaggaggctaactcccatgcctctaacctctagacgagaggcgtcagagaagaaggtatgacccacgctgaaaactgaagggaggatattgagaacatgttagacggccttaatgatggccaaaaccttgaaggaggagatgaagaaggtgatggtcacgactatgtctgagatgagtattacaaagatggttattactatgaccatgacccgaactgtttatgagtgaccaaatacttagaggcaactcaggtggagttggctgaacagagaaggctcactgtaaaaatgaagaagatgatggagcatttgtagagtaagtttagggatctggcagaatccgatgatgaaccctcaatgaaggtggtggttgaggaatgagcccgaaagcaaatagaggttgagatctcaaatcctcgtaatgataatggcaagggtaaggtgggcgagccctcacaaaaaccgacacccaaacctccttaaagggatacaactacagtcttcatccctcaagggcgcagaaggccactagtgcttttgagcctgggtgcccttctaaccctagaggcaaagctgcaccacgaggacaaggtgcaaaggtacccacacataaaaggtgaaggaatcaccccaacgactcagttaaccaagatggtagaattgccgtggggcattctaaggacaactggtccacgacagaactttgccggtggttagatgccaaatatgagaaatacaaaagtgagaaagtaagggcacatggaggtgaccttaggaaccatctgagcaataagatgagagggtgtgacctccctaagagcaacatgaaaaggttagaggaacaagtttctgctctaaccaagtttgtcaagaaacaaagtggaattttatcgaattcgaaacatgaggatctggaaccctgcgtaagaaggattatggaaactccactcttgacaaacttcaagatgcatcgagttgtacgaagggagaacagatccatgagcacatctggtaaaatacaataagatgatgcaagttgttcgagttagcgacgatgcaaaatgcttgtgcttctctttaactctgaccaagtctacaaaggactatgaaaacggttagctccaagatcgattgacagctggaaagacctactacaatcaacctttttgtaaataattcatcattgcgcaggacaaagatatggaagttggttcatttaccattgttatatagcagcacaatgtaagcctaaaggcttttattcaaagaatgatggaggcagctgccaaaacaaaagtcaacgatgatatgaagttgatggccctcccatccaaattggttgtagtgtccctactatggggagaaatgtagaggaaaagagctaaaactctgagtgagttcatggcaatggcactaggcatcatcaaccttgaagaggcctatatacaagctttcgaggttcctccagctccaattccttccaacaccactttgagttacacaccttaggctccaactcaaactttaccaatacccagagctcagtttatcccaacttttatggacctaccacttttggtctcgcccctatgtagacccacttttttgggtacggggcaacacatactggacgtaatgtagcacaaagataggcaaagattgaggtcccagagtctaatacaagccattcctagaaaaaaagagggggaaagagccataactgcaacgattctttgaagaaaccaaggaaggaatatgactcgaaatacactgaatacacaagcttaataaatacacgggagaacatctataaagtggcctacaatatggtccactacagaaaaactctgcatatgtcacatggaggaaggaataggcgtgaccaaattaaagagtgcgagtaccatggagagaagggtcacaccacaaaagagtgtgattatttgaaggataagattaaaatgttggtcgaagcagagaatttaggacactgggtctgtaccccaatcatctatcctgaacagggggttgcacaggggcatatgatagttctaagacagcagagcactataaatcctctacaaaggtaggacgctctcaagctccaagagcacattgcccgcccttccttctctactagctccggctggtgtagcattacttgcccgggatcaaaaaccccatatcctcccaaactggcttcgctgcctgtggacgggcatgtggtgacaatctttggtggaccccatctcactgacactacccgcaatgcacaaaaatgatatttgagggaaatagaagatggggaagtatgtgctcttgtgaagtctcctactcagtgcctcatgatattgaatctgtccatcaccttcaccagggatgatattaggaatgtgtgtttccctcgcaaatcccactcataatcgatgcacatatcactaacgaacaagtctctagggtccatgtggacaacaaaagctctattaacatcctatttaaatttgcattccaagcggttgggtttgctgaagtagatttaacccctggccttattcaactacagggtttcaatagtgatgccttagtgccaatgggtaagatcaagttgcctgtcattctcaagggggaaatgaggcgagtgcttttaagcactaacctttgttgtggtagactgcccaattgcatataattccatattaggatgatcaatactagtggattttagggtggtgattttatctgtcatttgtgcatgaaattcccatgtgactatggatgcattggcatgataaaaggcgatcagaaaagtgcaagaaattgttacaatgttttgacgaggaccgtgttcacagtctgagaagagacacttgttgctcctagaatagaagaattgatggacactgagactgtttaggaacagtttctagatgaactagactccaaagttgggattgaaagaaatctggaaccgatggaggaggtagaggaagtaagcattagtgaggaagtctgcacgagaaccattagagtgggacaaaatctacccccgtccataagagaaaatgccataaatacggtcaagagaaattaggatgtaatagctgttgggttttatgccctaaataaaactcttt

SEQ ID NO: 297261 - DNA, 2285 bp, Cannabis indica
atttgttctcgctccagattgttgtactacctgcaacttttttctaatttataatagtttggggatttctcaaagaattatgccctcaaccatggagtagtggtgttttttagtaggatcgagtggtttcctgtgttttaggggtttgttttcttccatcttggtggtagtactggagtagtattcaatatgtttatctgttttagctttccaccttaacctgcttttataattattattattgctttgtcttttttctgttgagtttggttgggtggactcctaacctgtttgttttcgggacttttttgtgaacatatattaggtcgttaggaatgtgaagaggaaatttagctgagctagctatggctcaatcattcatcatggagtcctgcaactgcattgaaccacagtggcctgctgatgaattgttgatgaagtatcagtatatctcagatttctttattgcgcttgcctatttttcaatccctttggagctgatatactttgtcaagaaatccgcagtttttccatacagatgggtccttgttcagtttggtgctttcatagtattgtgtggagctacgcatcttattaatctgtggacatttactatgcattcaagaactgtggcagttgtaatgacaacagccaaggttctgacagctgctgtgtcgtgtgccactgcccttatgctagtacatataattcctgatctattgagcgttaaaactagagaactcttcttgaaaaacaaggctgcagagctggatagggagatgggcctgattcgaacacaagaagagacaggtcgacatgttaggatgttgacccatgagattaggagtacccttgacaggcatactatactaagaactaccctagttgaactagggagaactttggccttggaggagtgtgctttgtggatgccaacgcgtacaggtttagaacttcaactttcatatacacttcgacagcaaaatccagttggatatactgtacccattcatcttcctgttataaatcaagtctttggtagcaaccgtgcattaaaaatatcgccaaattccccagtggcaaggctacggcctatttctggaaagtatgtccctggggaggttgttgctgtacgagtgccacttcttcatctttccaacttccaaatcaatgactggccagagctttcaacaaagcgctatgctttgatggtcttgatgcttccctcaaatagtgcaaggcaatggcatgttcatgagttagagctggttgaagtagttgctgatcaggtacggttttaacctgttaccatctttgtattgatgctatcactaaagaatattaataagcattgcttacaaaagcttcatgttggtgttttcaaagaacaatttaagtggctatgatgcacaaacaatcaatcttttgcttctaagtcatatttggcttaattttaagtccattagtttttatggaaagattgttgcttttttttaattttaggattaattgattatagaaatagataatgtggcaattatcacagatgtaaggtgcactaagtaaattgggaatataaaaaacatgttttttttataaaaaaaaattgcaactattattgtcttggacatttgaaaccatgtctctaggcacctggaataccttgattatctggatatacttattcatgtctcatttcaattgcttgggatttttttatttcacaatattaaagatatttgaaatgttaaatagttttttgtgggtgtttgatttaattacgtgttatgtgttgttattggtaaaatgaaaaataaaataatacacaagtagatgtaaagatataaataggtgtaaattttgagattttgtaattagcatcaaaatttaatttaatttaattgaatttagattaatacaacgagatatttaaacacatctaaagatatggaaagaaatttgatattttttgaagatagcgaaaaagagagcaaaaaataaagtgggtggtgttacgttgccactccctcaagctctgtgcgccaattagcaggcaatttgtcgtcctatgtcgtacaggatgacgatacatcatcatcccctcagatgactatgttgccacctaacaggcaatgtgtcacctgatactgcggcaaaatgttgccacctagaaagcaatgcgttgcccaacgacatacaaagtggcaatgcatcttgtgcgcatgttcttgatttttggcttcaaattttgtttttgaactaaaataagtgggaaggtcaaaggc

SEQ ID NO: 297262 - DNA, 2335 bp, Cannabis indica
gtaacaaatttaatattttaaatgtttacgtcacaaattttttaatagtaaagttaaaattttaatataattttactaagtaattatttttaattaaaatatacaatttattttttatatataatttaaaaatattttatatatccgccgcgaagcgcggaatgtttactagtttaaaataattgaacatacaaaatatcaatatatataatgagttgtgtttgtcagtccatttcaaaataataataagcaaaaaaaaatgtgaatcatattaaagtattaactttgtaattgattttgtctattttgaaaaaaaaatatattaaaattgaacaatataatctgaaagttacaccaatataatgaaaattgaaaaatatctacaatcaaactctcaaattacttgagcaagtgtaagtaagctaagttataagcttaattatcttacaaacttgagatatagagactccaaattattaccaaagtacatcactcaatcaaagggagagatcctatattattaattgtcattctatcatatagaaccttacaataagtttcaattaaaagagatgggtaaacaaatatgtagcttttgacactaaaatagcatgaagtaaaagtctagccttacatttaatagaatagatgaaaacccttataatattgaaactgccccaaaagctacttactatgtattagaaaaaagagtcgttcgtacaataaaatatatgaattttgttttcgacaatgtaaacgactcagaattgtttgaaaatttacaaatagtcataaataattataacaaatagtcataaataattataacatatataatcatgaaaaaaaataaactaaaaaattctcctacgtgctaaaacagatagatgatctaccaaaacacccctttaggatggtgtactgtagacttaccctaaaattttatagctcgagtagaataatgggtatagtttcgagccatgacaaggctcagatggggccttagaaactcgtgtatcacacacgagctatcctaaggctctcagatatataggcatgaaggttgaaggagatcttgagccacgagagagctcatttagcgttaattagaaggtgcaaagttactcaagtcatgagaaagattcgagtgagatatcaagaaattatcatgtgcgacccgagcattcttatggctcgggtaaggctagggtttttaagcctcgtgtgaagcatgttgaaatactcaagtgcatcagcacccttaattatgatgatcaatgagcgattaaggctcggctaggtcttgggacactataaggcagagcctgtccaagcattttaggtgtttttagggacccaaaaaaaaaaaaaaattaaaattagggtctacatatatgcacattttatagagtagtttaactaatagtttattctatacattccaaaaaaaaagtttattctttatattataaaaaacattacacttgcaacatctaagatcaattaaaaaatatgaaatatattttaaggttaaatttaacaataatttaatagtttgttcaaaaaataattattatttattacttaaaaataaactaaaaattaggctttgtacaatagtccaagctttccaattctgatagcttgggctgatcctgttataattcaaggctccaagctgcccaatgcttaaaatctatttattttgtgttcaatttctattttaggatgttactatattaatcgaggatatcaacaataaatatattttgaatcccatatatttttcatggaaatttttttacatctaacacacatgttattacttctaatgttcccaatgtttctggtgtttgtatacatttttggtatttgtatttctcatatgaactatatgaattgtgcattattgtggcttctgaattttttagaccgttaaaaatggtccttaaactattcacggtgttataaattaatcattctgttaagttttgtcatacgtggcaaacaaaataatgacatggttgcttaattagttgtcacgtcagggccacatgtataatttaaaattaaaaaaataaaaaatatgtatttttaaaagattattttttaaaaaacttatttttaaaagattattaaactaataatcaattattttttttaaaaaaactaataatcaattaatgattaaaaaattacgtaaaactaaatttaaaaaaatatattttttttcaaattaattatatacatggtgtaacgtccccgcttcaagcctccattgggtccttccacccacgaaataatggctcttatacacgagtacgccactctagct

SEQ ID NO: 297263 - DNA, 1717 bp, Cannabis indica
aaaaaaattaattattagagctttaaataatttttatattatgcatgaacaaattttttatatgtgaaaattttaagaactataaacagagctactaaattggttatttatggactagtgagaatgtcgaacttagagactataaccacaatttttgagattaggacttattaaaataaattttttcgagatttatctacattaaagtaattttttttaaaaatttgtgccttaatttaatatcaacatattacatattagagaaaaattaacgggtttgttaaaaaaagaccaataaacttacaacaatctcaaacttatatcctattactgttatttttttaaattaaaaatttatctgttatcaaaataaatttttgaaaaccttttactgtaattttctaattttatttgaaaaggattttggtatttttattccggcaaagtgaaaaggattttggtataaataaagacacaaattttaatttcttccgcttgattccaaaccgggcagtgtgtgtggcatgctgaggcagccaaaacgacacccaaaatatgttgccacgtaagcattcggttgtaacgcccgtcagtgagtaaaaactgtaaaacaaaaatttcccgtcgttttccccaaaccactttcacccacgcctctcatcaccgtttatcatgaaatttaacggtggtaattcatagcatatgaatttccgattctaccccgaatcacagcacggaaatgcattcagacattgtgacctcacctgatcaccaccgccttaacttttcggagttccgagaaaacgagaacagcgtgtgtgttgtcgtttaaacgggttttgagtttaacccatccacccatatcgacggttaaagacaaatccttcgtcagaatccaaatttgacggctcagattaaaagttcaacaaccttgctttatctcaatagctgggccccgctggtccacgccttgacaggtagctttctagtctctttctccattttctcttcgtttaaattcccagtattcttcccttctcttcgccaactttgctcaacgccgcaaataatctgtgagtaatgcctttgggcctctttcaatattcattttgtgctaatgtcttcttctaattttttctcctatgctttcaatgttgtttttctcacattttcagttattttggctgaataagtgtcctttatgattggtgcaagttttccttttctggaaactttttaaacattttgttaaacggggtaggttttgttatccatgcaggcttgatgttgtttgttctttaatgttttatccattaaagttccattttttttttgtaagaaaaaacatgcagcttagttcgcatgatgttttgttttgtcccatctgaaaatttcttttttattttttattttaagaaataaagttgggatttttatcattgaaacaaatgagaaaggttcactaagccagtgaaaggaaaggtatgttatttgggtttggggccgttcttcattcattcatatatttatgaatgtatcatgtatgtttatatttaatgttatgttgttggtctacaaaacccagtttttgatttcaatctatcttgaagtaaatgtggctaccattttgttttccatttttcctgtttaaatttgttattcttcagtaataatgtagcatctgcttacatattttaatttgatttttttttttctt

SEQ ID NO: 297264 - DNA, 1769 bp, Cannabis indica
atttttgtaaaaaaatagcaaaagttagtataccacgtaaacttccctaatattttagggatagaagagtgcggtttacaatttaagaatatttttacaaaaatactatctttaatatttatttgtaaaggaaaattaaacttaaatatttgtactataaattactgttaattaaaaaaatgtcgttatgatcatgttgtggtattttggctagtagacgaccacccacttcactgtagatttaatcaagtgcaactaggttatcctcacctatttcaatttggttatataggttactttcattaaaattacacataaagataaagtattatattatttttaattagtatataaatgattaatgtatttttttaatgaaatttggagctttacaatggtgagtggtgacccatttgtttaacaatagtattagtaacatgttgggttaattagttgagtcacaaaatcacttcgacaatgaatcattaaaaggtaaccaatggtgaccctttaagtcacataagtagattcactaagggaaacaagttactattattaaaattagtcttatattgttttcttttttacgagagtttttgtcttatattgttttcttttttacgatatttgttaaggaaaatttcatttattatccataaataatacttttataacaaatattaaaccctctactaatttattcaaaacaatgttaatgttaactaatcaaatccaaaagaggtaaaaattggtcggttatgattaggttttacaaatttataactgaccagtcggttacagtttttattttacaaaaattgtaagtgaccgtttagaaattataaccgtataaaatcgaccgtacgatttttgacgatttttagtggttttcaatttggcagttttggacaattttggcaattttgagcagttttttgatagtttttagcaatttcagtagtttattggtttaacaatttttttaaattcaaaaatcgaaatcgatcgccgtgtcaaaaaaatcgtaatcgaaaccgactgccaaattcggtgatgacgtggaaccgaaaattcggttgcagcctagttagtttcggttttttagtttttatgaacactcctacccaaaataccccttatgttttgatttttcctctctctatctgtctctccctctttctcgcactgtcttcccagagactcgaaaattgactccttagtcttccttcttctctatgtctatctctctcttgctctcattatctctctcaaatccacacaaatagcagatacccaactctgctcaaaatcgaattaaaattgactcctccctcctgctacccacttttgctcgaaaactcaaccaaaatggagagaaccaacactcggaccaaacgaagagacacaacactcgaccaaagacccaaccacccaaccatcttttttagctgcataaatacctttgaattgattaaaaaaaaatgaaagtaaccgtagctacatgtttctatccaaacttaatgatttagaattttattttatatgtgcccctttcaagaaaataaaagagtttgtatatactcacgaaactagaagaaaattacagttttataaacattaagtattatgccacttagagcatctccaaagagacatcaaatttggtgttacactatcaccaaatttggtgtcaaaaattatttctactccaaccacaacaccaaaaattacactaaaaaatattccttattatatattaatttttaata

SEQ ID NO: 297265 - DNA, 1818 bp, Cannabis indica
agctcaagattctgaaaaaggaaaaactcaaaccatgttaagcatagctatttttgtttagatgaggttgttcagagaaatataaatacagggtgagagaaagagtgagtgagagagtgtgagaagatgaccatttacttgtctttctttttacaaaaacgtaagaaaggtcattacttgtggggtctgctaagaaaaaggaagctactataatgtgtacaaaagcaaagcacacactgtcataatcataaatgcatacataactgtatgggctgtagttgttgatggaaagcacggcaacggcaacggcaacttaaccaaccatcatctctaaacggtgcgttgcatatcaacgaaagaaaaaaaaaaaaaaaaaacaacaaacaatatcagtgtcgcttgttagagagttcgctagagttctatgttcttaatatgtggaaagataatgagtcaaagttaaaaaatacttgtgattcgaaaaatagtgaatcaaaaagagccatcaaaaatctaaaaatgttaatctaaaaatattagaatttgggataaggtgaatggagtttcatggagtagctcatttctcttatatattatattatattttcataattagcaatgtggaactctctaataaaaaaaatagagcaaaaaagagccacgtgatcgaagatagtgagccaaaaaaaaattatttgtgatcgagttgtctaaaacagcacattatttatgtgtaaaaaaattagaacatatataaaatgtagggactatttctcccaatacctaagtgatagggagcattaattgttgtattttagcacaaaataagtgcaactacacatgtcattacttatataaatataggtttgaaaggcttgaaaacaagatatgtttttttctttggtgttagctcattattgcaaaatccaaatggtgctccactaagaaagaagaagtcagttgttcacacttggccacagccacagctaaggtaagtgaattaatgggcaacacttagaagcaatcggccaagaacaagaagagcccaccaatccattcacacttaacacatttttttctcttcgtgaatagaatagaatactaaacgcatcaataagggaaaaaaaagaactttaaaaaaaacaattaaaacaaagccaaattacgtattaactataatgacatacagttctactatatcacgtctgactttttggtatcacaacaacatcaccatacaaacacacactcataaacagtgtaaaggttgtttggactatattttgaatttttgagtgttttgtttttaatttattaatattacttaatgttagttgatgtgaatattttagtgttgtagaaatctgtattgggaacgcgtgggaattgggtggtattggtatacaatattagtcaaccaagaaaaaattgcatatgatgtgaagtgtggtaggaaatagcagtagtttatttatttatttctattattttttttatttgggggaaaatagcagtagtttaattgcttgtgaacattcttccattaaaatatgctgtaatattttaatctatctttatgttttttttcttttcaatgaacttcacttgtatggattattttgtccatcttttaaaaattatgaaattattataagtacattgctattaagtactatggtgtttaacacatttcggttagtgatcgtttagtctagaataatagttgactctgaagtcaactatattctattagtagttagtgttgggttttatgttctaaataaaactccatttcaatgtaatccattttattcaaca

SEQ ID NO: 297266 - DNA, 1934 bp, Cannabis indica
tactttgtgcatttttcagaaatcgcatgtggcatgaacaagatgaaaaaaaagtggtgaaccacttgaggctagcttaagtggctataagtgggtgtgtgttggaggtccttcgagtcccaagtaaaacatgattgtaatatataaatgcttaaaataaaaaaaataaaaaaataaaaaaaagtggtgaaccaaactaaagtttcctacttaattaatatattcttaaaatattccaaacttcgtggtgcttatcttgcttgccatatcacttttttatgcaattaatcgtaaaatatataaatctatacatatattcatatatgcgtttatagtatattcaattaagtaattacaatgtttaacattagttaaatggtaaataagactttgaaattttatttttttaaaatagaactctaaactaattttatataaaacttaataataatttgatctaaaagtataacaaaactaattatattttctgtatatgttcatgttagatatttattttcaagttagatatattaaaaatataattattaaaaatgatgttgaaaatactattttatattattaattttggaaaatataaaatttaatttattatttaaccaaataaaaaatttgattgttaacttttataaaatttaagattcaaaatagtattaatgataaaacttttttttttcttaatttatacatattaaccttacgtaatctggaaatgaagacacgaaaaataagagcatagtgataaatacatgtaaatgtaaggatcatgctatattatgcaatattttaatctaatttttgtaataatattattttatatttcgatattactattatttacaactcaacagcactttcttctacgatttgcggacaacttacttaataacaaagcctttattatactaacatccaaaataattattttatttattccattgattaataatactacatagctttatattttttgatattgtaagaatgaagtcacaattattatatatactttatcattataatattttcgtgatatactttgcatcatacaacttattatattatatgaattatttctttaggtgtgtctttgtgtatatattgttattggtctactaaaaattcaacattattttttgtactatgatgagaaaaaaaaaagaaaaaagaaaaaacaaatgaagggcagcaaaatatttatcttttagcattagagggtccttatataataaattgtatgaccaattcaaaaattgacttaaatataatataattatatatatatttatataagttatatattcgatcgagttggaccgtgggcaataatattcgattatgcagatgatccaactacatagtatatgagcaataataataataataataataataataataataatggaaaaattctaaattgtaattgatattgcttaactactagattatataaatggtttagttgttgaattggaaagattattgggtaattatgattgtgatatggctactaccaactttgttattatttcatttaatttgttaagtgcattatgttagattgttaggtgtacttcctctaatagctggccacctgtgccattttctgcattttaattgtgatcacttttcttgccattgaaataataataattaaaattttctattacaaaaatatatgcatattaatttgtatatcacgttttaagacaaaagaaagttattgcatgtgtgagttaaacttggatcgtatacaaataaatgaatacttataatatgatcaatattgtatatgcccattttaatatataaatatatatatatatataaatgtattgttataatataatataacatagtatagaatatatgagaagaaagaagaagaagaaagtgaatgagaatttctgagt

SEQ ID NO: 297267 - DNA, 4345 bp, Cannabis indica
ttatcttacacatattatagaggtcaagagtttaaatcctacaaaaaaatatttttacttttaatatttagtttattttttgctcttttcataaaaaataaaacagactataatttagatttttgccctctaaacttttcaggtcgttaaaaattttctccaaactattaataagattgctaaatttaaaattttttgtccaattttactaatgaaagtctggcatggatgaaaattttagagagcataatttagtacatgttatagttcagggagcatgatttagtaaatattaaagttctgcggacatgatttagtacatcaatcgccacattaacacaattgaataaaattggacaaaattccttaaatctaacaatttcaatagttcaaaaaaaaatttagcagcttaaaaactcagggccggagtatgatttgatacatctgacaaaaatcctaattaccttaaaaaaaattagaaccccttaattttagttctgggtctgccactaataaaataggtagattaattccataccaaacaacatcaatcataatatgttatgttctaaagcgtcgtataatcatgcatgcaacaaaaaattgtgataatagccaagctatatatatgagtatatatatatatagatataatatattagcagaatcatgataattatcactgctacaaactagggctcgatgaattaccatgtaaaatttacttcatgagaatgtgggtcccaaaattgacatttgaataacttatatatataaatatttcctaaaaacattcaataataatcaatatatatctccaaattcagcaaagatggtcatcatctgtattgtcatgtaatggtgtactgtgtacatatcttgatatcatatatatatataatataaatatatattatatataattccattattataataatgcaacatatgtgggtccaaaaactctatacttgagacttgaaatgtattttaaacaagtgatgacagtactattatctatatataacaacacagcattagtcatcattagtttagcccttctctacatctcttctctctctctctcttaaaagagaataataatgggttttggttgttataattaaatggtttcaatattagggtttcatattgatttatatatatatatacatagtgttttgattgagaagtgagtaagtatagtaagatggctttagaagctttacctaataattcaaatgagcttttcaacttcgttatgatctatgatactatctcagcaactccaatcaataataataatacctatcaaatctcttcacccacaaccacaacaacaacaacaacaaattctactactaataattggttaccaccacctcctcctccttctcaaggcattattagtactaatactagtactttggtggtgacccaaaattgcgaaaaagggatggaagaagatgatgatgatggtgatggtgataataaggaattagggcaagggcaagggcataataatggggatagaatgatgatgatgatgatgatgaggacgagggcgaggaggcggtttcaagagcaagagcaggagcaagagcaagagcggcgtaataataatttgggaggagttgttaggaagaagagaaagagaaagccaagggtttgtaagaacaaagaagaagctgagactcaaaggatgactcacattgctgttgagagaaatcgaaggaaacaaatgaatgaacatcttgctgttttgcgttccctaatgcctgattcttatgtccaaagggtataaatatctctctctttctctcacttttcttcttcatataattaattataggtttaacaaaaaaaagggttattttttagttttggttttaaaagtctatagaaaaagttttaaagattaggggacttgaaaataataatacatgcaaatatagaaaaaagttgcaagtagtgtatatttggttatattgtcctttttgattcccttcttcaaatattgggaattcccatctttaaaattaattaatatgaataaaatgaaagggaaggggaagcatgcatcatcatcatatatgatgaaacttttggcagaaactaagtacttctttgcatagaagggtctctatctatcttacatattattttcaaatttttgctacctcaattcataaaataataatgacaatagtaatagtaatacacacaatttatataatatcttatttgtttaattgttcccaaatattgttatttatataatatgtgttattatatattatagggtgatcaagcttcaatagtaggtggtgctatagaatttgtaaaagaacttgaacatcttttacaatcacttgaagctcagaagctccaagcaatgaacactaatagcaataacaacaacaacaacaacaatagtggagaagaaccaatggtggataatgctaatgctaatgataaagataatgataatgataatgatgatgatcatcatgatgataaagatgatgagatggtagctcatcatcatcatcatcatgatcatcaacgtgcagctccttttgcacaattctttgtatatcctcagtacacatggtctcaaatctcaaacaagtacacttcaaaaactaaggcagccatagctgatattgaggtaaccttgattgaaactcatgcaagccttcgaattttcactcgtcgaagccctagacagctctctaacctcattgccggattccaatctcttcatctcactgttctccacctcaatctcaccactctcaatccctttgtgctctactctctcagtctcaaggtaacaattaattaatagtactccattatatgataattctgagtcggttaaattatacttttgtctcattctgattctaatcctgtctcgattaaattatatttttgtgataattttaaattatacttttgtttcatcttggatttgatcttgactcggttaaattatacttttgtctcatcttggatttgatcttgactcggttaaattaccaaaagattttgatttcttatcttgattctgatcctaactcgattaaattatacttttgtctcatcctcgttcaattaaattatacttttgtctaatccctattttattaattatttttttttactttatatagtaaaatgatacaacatacatgtacatgtatttttaactacactcaaataataattctcaactcacatccatttattactaactaaattctcaaaataattattgtctttgtgtacttttgatgagaacatgcattttgtgctttggtggggttatgtttggacataaataattgtgaagaagaatatggaagatagaattaacacatatgtatatcttttgtaattgcaaataataatttcattcctttttgtttagaaattgtggtaattttgaaaactctaacacaatttttttcaggttgaagaaggttgtctactgagttcagtagatgatatagcagcagcagttcaccacatgcttacaataataattgaagaagaaactactatgcctatgtgttgttaatccaatatatattcatatataaaatcatcatcatcatcttcttcttcttcttcatcttcttgtgtaaataaatgcccttagatcaatgttgaaattaccataatgccattcaatatctttttgttgtagtttctttctttcttcactcattcaataatttgttgtaaagattctcttgttaattaatttttttttttttgttgtctgttttgtagtaaacatttagctacagtagtactaattaattaatttgttgtgtgttttatttgtaagtttgtaatttcattttttcaaatatgaccaaaatgcaaagtggggatgtgcttaggattctatatgggctctctaaggcccggcccatgctgatagtgatagggactacttgtgtggttgtgtttctattattaattttatcttttaatttgtctttttggttgagcaactactttccaagtttttaaccactttgtaattttctttttttttttttaccaacaaccctttttgtaacagcagctgggacaacaagtaaagctttgttctggctccacattttttaccttattttttggtgaattaattttgagtttattgatatcttataggatagtagtttgagtcatcataaacaaacttaatgacatatatatgtcttgagtacatatgaaatttttctcattgttatgagtaaataccagggtgttttattattccattataattaggattaataagataattataaaataataataataa

SEQ ID NO: 297268 - DNA, 1078 bp, Cannabis indica
gttgggccagatgttgaaggctttctagtggtctactttgttcgtgccatcattttatgtctgggcagaactttttcagtagtgtgcattgcaacagtcacagaaaacttgacaacaaaggttcccttagcagttggggttggacaaccctcgggaaagtgtcaacgacattatctttggattttgaatgtccattagcaggaagataatgcctccaacctttctttagttcctatatgaaacacctatgtccctcactaggaatttggtcgggataccagtgatgctgcacctcgggctctggggatggtgtgtgctcgtttctcacttctcagtctgcaaagctagaattcaagagattgtcactagacaaagatgagctagcacgaagtcgagggtgatcttcgattagaagttggagcaagtcttggtcaatgtaatgcttgcctctccaaaaatcaccaaggttcatctacaaaaggtgggagacaagaaaataagaattggttggaggaagagatgaaaaaacaaattttatatgccgaccagccagattaaggataaaaagaaaagatttcacccaaagtttgaatttccaatcctagaagttcaaaacatcggatgttacctggtaatttttagaatctaatgaatgaatgggaacgaatgagttcaggtcaaaatcgatacgcagtcagagaattagatgttatagttaaacgttggttaaagttccaaaccctagaactatctatgctacaattagtcaagaacaacttaagaacagataaagttcaaggcaagaaatccagaaataatgcacattttggttgtattgactattaaagtatcaataaaaaagccctttttttctatcttaatgtttcaagtattcctttgttttaaatatgatattatttagggtaaatactattttggatcctgtattttgcaaaagttatcgattggatcttttgttttgttaaatgacaaaatgtaccctgtattttctaaaatggtaaaaataggaccctgagcttaatttttgataacttttttaaccaacttgaagacaatt

SEQ ID NO: 297269 - DNA, 2188 bp, Cannabis indica
tcagagtcagagtcagagagatatgcagcaatggcacacaagaagattcttttctaacatcctataagcaaacctttggaacagtggagcatcacgtttgtagacaccatggccagggagaccaacacgtggcatctcatgattagttaaattccgcttatgtgggaccttgatccaggacgaccaaccaacacgacctaaacttgaacaaaacgacaaacaatctcgcccaactctgcttgatttttctttctttctcttttttggtttttcccatcatttcaacacgcttaggggcccaaacctagtctttgactcgctagatcacacctaacctcagctagtccgaccctagacttggctaaatcaaactcaatccacacgttctgctgatgatgatgaccaatcacgaaagcctcaattcccaaaaggtcagagttcccaaatgtgaagcagtacaccgaatcactgccctttctcataccgggtacccggtacaacagcttatcgcccgaaacactcatctctgcgccttgaaaaatcaaagtcaccgccggaaaatcagagaagctccgccgagtcggtggtatttggtagcacaaatccatagccccttggaaaacaaaattttggtcttttaaaagaggagctaaactcttcgtttgctgtgcaaactcgtttctcaatgccgtgtaaaccggtcctagtaggaatgtgaactgagtcccagagtcaaccatggtctgacctgccccggtatggtccggcacgaaaaccgatttcgaaagctgtaatagcttgttggacactttaatccctagtagttggactgtgtaagcgactcggtcgtagtacggtaatggttgtgacattttaactaaaggagtgtatttcaatggtccgagccaagcgaaactcgcctcgccgaagagtataaaaccagaagagtcacgacccgatatacaataggagaatttagccaatcccatttgagagacgaacgataaggagccacggttcatgccgataagcccagttgttttcgaatcctcttcagagttggagctgaacccggaatccatgcatccgaaaattgttctgggtcgaggcgaagacccaatatagaaagtttcagaggcaaggtttccttcaatggaggaggcgtcggcgtaggagagcatggcgtggcagagctttttcgggtcgcaagaaacgggtatggtgaaatcccgggtctgggtccggcatattgaagaggagcaaggaacaggggaataagaagatgaagcgagtgggttaaaaacagaattgatattctgagcttttttgcaatggagccatgaaagttcactcccagtgtcaagcaccatggttacggtctgtggaggcgagccaacggttaacgtgacggtcaacgtaacgttgtggtggaaggagagtttgctggatggcttcgtgaccgtctggagtttcaatggcaaaatgagagtgtccatggacgaagaagaagaagagataatttgtgtgatgagattgcaaacaataatagtgataagttggagaagaggaattgaaatattcatggctaaatgaattaatgtgggaagagtacgatgcgggggttttgggagaagttggaagctctgttttttctgatttggtataagactttaattataagcgtgtgtgtttggtgcttataagtaataggttataatataatgtaagtagggaataatgacaatagacctataacgacaggacatgccccctcttttttgttttcgtctttagattttggtattgagctacaaatattacactactcttgttttagaaaataaatagggaagataagagttttcactttcagcttcattcaccctctctttccaccatgttttatttactgttgtaaatacgggtcgggtattttaacacattacgaaattggcacgaatacgattagacacgaaaaaatgcggatttgagtacggcacgatacgatactacaaattggtacgaaatgacacgataagtatgtccttaaacatgacacaacatgagaaacacgaaaaatacaacacgtaagtacgaattgactagcctaaaaaacactacatgccacaaacgcaaaaaacacaacacaacatattaaaaattttataacttaataataataataata

SEQ ID NO: 297270 - DNA, 3121 bp, Cannabis indica
tttttatctacagtttctctagttctgtgaattgatgatgatatggctattattatctacacttaaattatatatataaaagttattagtatctttcaaggatttgaatgtgaaaatgaagtaatgaagtttttgattttgatcatttgtaattgtcatttcccaacaagcctataaaaagcctatgaatatatatatctttgggtggttactctttggtatgtatgcttttcctttttaatgccacaaaactcttacctcttttttcttcataaatcaatatagtaattgtcgaaccacacaaatttccactgaaatgttatgatttctaatgacaaataataaatatacatattgtacttgaaaaaagtatcccaaaaaatgtcatcgaagttattattaataatacagtatggagatggtgtggtacaacttttcatatggtgttattaacatcaattaatcgtattcatgtaacatctgaacaacactgttacgatataaacctatctaacaaaaaaagactttatggtatggaagaaagaaaagaattttcacaagaaagaatttaagttaaaaagagaataaatatagcaacaatgtacgaaccattttcttttttattattattattattatttatctaccggcatcgaaagaactgtaagagatagcaccaagagatgaagacctgtatgatctaattttatcattagaaattccttgcataaactttgaatctaattcactcttacgtccagaatcaaacacaccccaattctcaatcataggaagctcttcttcccaattcaagtacctaatcacttgcctcatattgggccgacattcgggcctataatgagaacaaagcaagcccaacttaagaaccaactccatctctttaacaacaaactccaagcccaatttctgatccacaacatcaagcaaacggctcttttcaaaacactccataacccaatccacaagcacaaaatgaccagacccaatgggccttttcccagtagcaacttcaagaagcaaagccccataagcaaaaacatcagtagaagtcgaagcccttccaacacgagccaactcaggagctatatacccaatcgtgccaacaacaccagtggtgtgagacaactcaccatgatcatgaatccttgctaaaccaaaatcaccaagccttggattcatatctaaatcgattaaaacattactcgatttcacatctctatgaatcacaacttgttcccactcttcatgaagatacaaaagcccagaagcaacacctttgatgatgttaaacctttgttcccaactcaaaacgacgtcgtctttggggtgaaatataagcgagtctaggctaccgtatgggatgtagtcgtagacgattaaaagattgttcttttttttacaccaaccttgaagattaaccaaattcttatgccttaatcttcccaaactttcaatctcagctgcgaattctttcataccctctttagaacttctcgtgatctttttaacggcgatttcaactccggtcgtcggtataacacctctgaaaacggcgccgaaaccaccaactccgacgatctctgtttctttaaaaccttttgttgccaagtaaagatctttatatcgaaacctgtgtggacaatccaattcccaatcttcaagacgctcaaatggcataatttcttttgtaaagtgtgagtatgaagagaacccccaaaagggtcagaaccagagtaaacagaaacggcgattaaggacaaacagtacttgtttttaaaagaaactgggtgtgttctcttttgggggttttggaagtaaggagagatttaatggcggagcttcaccgtttaggaaaaactccaacccaaaacgtaatgagaactggatttcattcccgtcgatgaagaaaacccaacatacatatttggcaaaaaaacctctgttaagtttatccagtgagacataaggggttggctcggtttcttgtctaaagattcaggtccaactgttacattaacgaaaccagttttaccatcgtaatcaatccacgcttgaatcggatctccgctctctaaatcaacctcttcatcacttcctcctgaatggtaagccgccggtttagaagtcaaagaatccatcccatttttgttgattccgacatggtttccactcgtgtcagtgagttggttgtacccattaactgtatcgaattcgacggcgaatacatggttggttgagtcattatcgtttctggagttgaaaaggccgagaaagtggcctgcttcagctccagggaatcgggtctttggagcaatggtgaaagcgagaccgtacccacctgggtcggagccccggttgacaatggcgaatacgaaatgggtactgaaagaagagacgtttgggtaagaagaagagttgggattaaacatttgaatgggttttgaatagaatgcatggccgatgacgttctgtgatcggtttgtgagtctgagttcaccattgtttttgatgatggaacctccttctcttttgagatcggtttcgtttcctttgaatccatggaagacaaagcttaaatcttgaggctgagcagagacgattagagatgagaatattaggaaggcgagtgaaaattgggttgccattgtcatttgggaattttgtatgaataggaagaaaagaatgatatttaaagtgccgtgttgtgtaatggtcaaagtttgaagaaaatttatgtagaaaatattggctccaactttgagagttttaaaacttacgcgtgattctatgatgcacttccttaaaaaaaggaatgtactaatgcactcttaacaccttaacactcttaatttgtttcggtatctaaaataattttttaatctaattttttttcatattcatgcaggttatatctatttaaattatcttacaaaatttcgaaaaatttagaataatttacaatataaaaaacaatggtcaaacaacttattttacacatgtataaaataaaatagtcacacgtgtaatacactgtttgaacgtaatttttggcatgttaaacttttccgaattttttaaaattttgcagcatgttttaaat

SEQ ID NO: 297271 - DNA, 2644 bp, Cannabis indica
tagagatttgagtgggaggagacatatattccgatgcacccaatgtaagatttctcttacttttatgtgtttaattttctatcattttagaagttcatatttaggttgttaaatcaacatacttgtaagtaaatctaagttcctggtaaaataattccaacatatctaaccttgttgtgatgataatttaagaagctctgttggaaatatatccaagaactcatatacaattctaatgtccaaaggctatcttggcctgataatatctattgccgttactaattatcctccgcatccattccatgatggattcttatcttttgtcatcgcaaaaattggagttttaaaaatcccgccctaatactataatacaaatgagccttcattactagcagcagattaaggcaataattccgttttgagtaatatctcatattctacgatacccaaaactacgatatttacaacgataatcggtataaacctgagctacccttttggagacaactaatgcaccactaaataacaaagttcgaagccttatttcatatctatcacatgttttatccaattatcaatattctgactatcacatgttgatgggtaattctaaaatccattaacacaaagttaaataaaacaattgataatgaactgacttgacaccactgaagaattattttcaacttggtttgggtactatctaacactcaaacatggagggaaattaattcttgttccgacccttgcttctgtaaccatggacagtccctcttgtaatgtcctacatggccacaacaaaaacatttccaacatggaagggattttgcctcaagttcttgtcccttcttttgtatccgtggacaatccctcttatagtgaccaggtaacccacactgaaaacatactcgccctttacactcacccagatgatgtttcttgcaatggatgcactttggataggtataaaactttcaaggatacactgttggcaccccgtccttatttcctctaaagtttctttctctgcttacgaacccactgatgccgacagagctcttttactttgatcagccacttatttcatcactaactacagtccctcaagaatcttgaacaaatgctatagagtacacaactagaggagtattcatctcagctaggtttctcaaaagaactgaaggtccttccatcatatttttcccaccagatagctctatttagttaccagcaatactctgatctgctgagaacaccgaaataaaagcaattggaaattgagatagaggtataatatgagacccttattgtctcaatttcttaatgttctcatcttgtcgttgaattctagcttccatttcaacggacctttgctccaaatctaatggagcctacggtggatttttataaccacctccatcaatctattcatgatcttgagtataagggagaacctagtctctccatccgccaccagttttatccaccttagcccaactacatgagtcttaccaggcgtccattctataggacaaacatacacattcatgagtcagatcagtcaggtagcgattgtaattgaaatctaactaccgcttagatgagaacttaatatactcctattcagctatcaatctactaacatgctttctatcatattttctaatcatgcataacaaataaaactaataaacatgtaaaaacttaccaaaccatgagtcaagcttatctcaggtgatgattgtacattgacgatcttcaaaaaaataacatggcagctctgataccaaaattgtaacgccttactagattagacatattattgtgctttctaaatacagtgcacgcctttactaattaaagggtttaataaaaacgtgaatgattaaaacttaattaaattacttaactttaatatttaaacataataaattacataattcaagatcctgtttaaaaattacaaaagtttataaattgtttatattttgaaattcatcgtctagcgaccaacaaaagtgagccaacattgtcctgaagaccctgatgtacaatcttcatccttagctttatactctcaacggttcagttctagctcatacctgcacatgacgtaatagttgtgagtcgacagactcagtaagaaaagtataatcataaacataaacatatatccaaatcgtaaccaagcgcccataaacttaattacaatgctaactggatcaggaacgttcttgacaaagtatgactaactataaatctaacctatactcagtactctagtcgtactgatgtggaagcagttaatttatactatctaatagcctagcatatatctattggcatctctgtgcaactttatgtacacttcattgaaactctgatatgctaatttgatggctattgattttcctaacatatatatattggtatctcggtgcaactctatgtacacctcactgataccctgatatgttattctgacggcaactaacatgtatgctaaacatgtatacatatatgcaattattatactaatcttaccttgattctgaatgcaagtatatcagtaactctaagtggaaactgctgcttgacgatttacaggctcctaagtcacaacatacgtacaactgataagtgt

SEQ ID NO: 297272 - DNA, 5518 bp, Cannabis indica
aaaaggtaaaaaatcatcaatgatggtcagcccttgtagttccatcactacttccttacaaactccttcactcttaatcgattttcccgatcccaaagtcactccatactcccctgttttagttaacggcaacttgttcttttctattgattcttttgaaatgaagttgtggcagccccagaatcgataagtaccgtaactccatgattccctaccactccttgaattttcatagtgcgtgggttgctattcctgttgctaaatttagcgagacttccactgtttttgtaatctcagctttgtctagggccaattcatccttcagtcctggttcttcgtccttattacaagtgattaccacactcaattccttcctagcacaacgatttcccggagcccatttgttatcacagcggtaacaaatgccctttcgtcgtttttcttgcacctcggaatcagtcaaccgccgaaattggccaatgggtttctgatctttattagaaaggtttgttcccctcctatccccattgctgcctggccctttgaaatggctccaatttgagtgagaaccaaataaagaattgttcttgctctctatcttagcagcaaaatccatggccttgttcaaagtattgggttcaaataacctcaactcttccttaatattcttttttaacgcagtcaagaattggctgagcgccaccacctcggagacatcatctaagggtgcaagcagttccaaaaaaccttcacaatattcttccacggaaccttcttgcggaactcgcaaaactgttcgtggagtgaacccttgaaggtgttgcgaagtttattcaagaccagcaaccttaggtcttcccacaagacgatcggatggcgctgcaactcccaccggtaccaagtaagcgccttcccttcgaaactgattgcagctgcttccaacatctcctcattactgaattgttggagggtgaagtacttgtcagctcggagcaaccacccgtcagggtcggtaccatcaaagatgagtaattttagttgccgtaagcgacaagtcccgtcgaagctcgtaagcagagttggtatttcccacgtctggcaccgttgaaaatcccatggctggttgttgagcccattttctagatttttctggagttcttgaatggggatgttccgtaatgggctctttattctggttcgacccactttcatcagcttgcttatttaataattttccaagcatggctgtgatctcctccttaaactgtcgcatttcatccttgacagattcgattttggcgtcaacatgttcctccgtctccagcaactcctctgggcgttcttgatcgttcttcgcagctttcttggtgggtgccatgactctcctgctctgattctaatttgatgtatacacaatcaccttcttgtaagcttaaatcaaaaatagccaagccatagagtagaagaagaaaatctggtattattgatgaatgaaagacaattacataatctctttcctaacttttcgagacagccaggtatttccctagagtattatttacgctgtacaatttttccctagccaaataaaagaatcagactttctatttatacccagcccactaaaattgaccccaaactaaacacttgctttgactagagttgccacatcagcagttacacttagtttcttttgtttttatttcttctagaatacactttaagtggcagtggcagtggtgtaacaggtacctaaattcgaacggtatagctgttgtgtatttggtagtctttttctgataattatgtggttatgaagaaaatagtcattttctgattgtagttttgtatgatattcagaaccaagagtactggttggtggaaatgatttttatgccttccctcgattggaccagaaaggtgagcgaattgcatggattgagtggagtcatcctaacatgccatgggataaaacagaactctgggttgggtatatttctgaaaaagggtaaggaaatttcattttttgcagccacatagtgcttcattgtttgtgtcctttttgaggttatatggtcataaacattattaattgccttactgcggtttgataagtaattatgtctacttgttatatggcatgtgtattggttttgttgtttttcgtttgaattttatttacacatgcatctacatttatccttgataatgtctcctctatggtttttttttcttttcacacttaaacataataacattgatatttcatgcagagagatctacaagcgcatttgtattgctgggtcagatcctacaattgtagagtctccaactgaaccaaagtggtcttcttctggtatgtattgttttccttgattgagaaatatatttttggacatagtaacaaagagacaacttacatgtatatggttatatatctttctttaacgtttcccaaattcttagttatgctattacttgctgtacaacctaatacgcttgcttcttccttctgctctatttattctcatgtgtttgttttaagttctatgttatttgtactacacagtatgcaattcactaagcagttccaatattttttctaggtagctgtttgctaaggtgttcatgttttaattcattatgtttgaatatgtgcaggggaactattttttattacagatagaaaaagtggattttggaatatttttaaatgggtaagttcaatatttgaatttaatgttccttatagccatattttatagcaaatagtgattttacaattttgtttatttgactttgttttcaaacaaaaatatacacccgttgactctctcgggcctaaaaaatacagtgacaacatactattatattgtatgtatatatgaagggggaaaatgcaaatcacttttaacatggtagaatgtagagttcactaagaggttggaaaactatggatatgtgtgcatatatgtatatctgttcacaagaaatttatagtgattctatattatgaggttcgggtacctctttgatgcttacatacagttgctattggtttacagttaggtggagagtatattattgatattatagtggtttgtaattattttttattgatgcccaacgactctatgcatacttctctacctacccaaatgtcgggcaactttcactctaaatatatctctcgagtttcctctgtatgttgaaaaaactgtactaggttttcttgtatgccttccatctaataataaaggcttttgtttctttttcagatcaaagggttcgaattttttattagagttgttgatgcggtttttcgtcaactgatctaataaataggttttaacaaactgaatgagatgaaaagaatgataaacacaagtttatagtagttcagcccaaaaaagataacctacttccacttagtcagttttagtaatcccataacacttaggggccagtttggcacaactgtactatgcgaaaaagtagctgtagtagaactgtagaaaaaaactaatctgagtgtttggtaaattataaattttgaagtgttgtgagttggtaagattatattataataacaataaagttataatcttatttattataatcataaatatataaaaaattatgctatataaatttttaattattttttcccataatataaatttatatgtttttgataaaaataatttattatatttttatcacttgtaaaaaaaaattgtagtttataaaaaattctaagttgatgtggtgtgttaataataaaaatataaatatatattaaatattttttaaaacaaaataaaatataagaaatttgttgactcagaatttagtcaactgacaacagttttattaattgttgatttttcaccacgtgtaaatattaataataaataataaaagtaacacaggaatttagtggttcggcccccttgatgaacgggttatgacctaccctccttttagttgtatttattcttgagataataccatgcagattataagtttagactttgtaatatctagttatggctctcttcaatattacaatagtgagaattgagtgttacagatcaagaactcgtaggattctatgaagaacttatgaataaaatagacttagagtctaggaagccttaggtgcgtgtggaggtttagagagagagagagagctttgggcgtgtggcttagatttagtcctcttttcatgtgatctaataccctttatatagtgtaaggcttacaaaagatcttaattcaaataagtaaagatctccctttaaaatagagaaaataacatcttttatttatatttaaattacaaaaataggtagttaaattactaaatataggactaatatcttgagggaatatccctatcttcaagggttgttaaacttgtcccgacattgtagtttggcttgagaatcttctagaagactcgtggtggaccttgcaatttgttcagcctgttcggggctgtctgcacgagttcgtcgaccaactctatttttagggtcctagctggcatgtgacctattggccggccaggtatggtccgaccaaccttttccatacaattttcctgttcagctaggccgaccagccctttccatacaactttcctgttcagcttggctgaccagccttccctggccggccagcttgctctcaagggttggctggcacacaagcttccgttggccggccagccatggtcggccagagtcttgatggcttgcctaatttcttttgcttattcttgcttgacagtcttggaaccttgccaattgatagactgttcaggacaatcttgcccggttcttgacacgttgtatgccacctatcttctgctttgactatgtggacaagccacgtcagatgcgcaaaagttggaataacatttgctccccatgtccctgtttagacgtctgtacggatagagacttctcagctcttgctttgactgtaggagagcctttactgggtagccttgtctggccaggtattggactcttcgaaggacgcgcttctaaacctttgatcttctctctcccatgtatgccttttactctcctcattttctcttcttcgaaatttccctctctctttgaatctgacattgatgagtttcaagctttttgaagcttttagaaactttttgattttaaccttttatagtagtatttttacattataattcacttgataactttaagatgcataatgtatgacttttagatgagcaagatcgagtcttggactggtaccttgggtctgcaaacgggtcggattttcgggtggtcggattcgagtttttggatttcaggtgttggaaatgcacaaccgaacccagttttcgggtggtcgggtatggcgggtttaacgtggtcgggttcgggttttattgggctgagtccgaatgtttcatttctgggctcaaatgaaatttaatttttaaaaatgccatctttttttatttttaacattttttggg

SEQ ID NO: 297273 - DNA, 2058 bp, Cannabis indica
ataaaatatattcaaaatcttaaaaaaactaaaatcttaaataaaactatcaatacgtggctcggcacgtacattcacctaatatatatatttaattacataattatttattatatctcttgcatttatcagtctaaaagctcgtgtgctcttggtcaaccacatgcatttttatctaattgtaattaaagtatgtatgcatgaagcttaggagttcgtaactcgaagttgcgtcagccatccgatcaattcgcaaaagtggaaatcggtcttaaaggcaagctttgtttaaatctatgaaatctatacacattctccatattccattaggctttggaaccaaaactcgattggctagccatatgtgatatagagcttattagaggaagtcgatgtttgttagcttttctgcttttatttttactactttcgctctcactggatctagaggtctttacttttgccagagtggatctgccttaggatctatgttcagtgcatgacagatcacatgagaactgatttcggccatctcaaaatgattccaaggtaatacatcactgttcttctttgactttggagacaatcttttctttaacagctagaggtagattctttcccaccttgatgactttagtaggatcttcatcattgatgcataccttttctgcctattctatagtttcaattatccattctatgccaatctgtggatctagcttatcctcttctcggaccacccctagtgctggctgagaagatgttttggcttctgttatgtttccttcctggaccatgaggacagttttagttgaaacattgtagcagcttcttacactcttttggtttcctctgattgttccaatacttctagtatcactggggaatttcacacatagatcgcggatggatgttaccgccccaaagtcgactagaaaaagttgttctagattgatgatataagttgttggacaatcaactaccataaaggtgatgtacttgaaagaggacaccacattatttccagagaccactacgtttcttctcactgcaagttgtatctttcccactgggatcaaggtgtctctgttgaagcattgtaattgaactagacaaggtgatcgattcgtttccactagaccgatagctttaaaagcatctttgaaaatgacattgactgagcttccattgtctacaagaattctggaaactcttttgttagcaatatgtgcttctattaccaaagggtcgttgtgagaaaaatgcacgtgcttggcattatcttccctaaaggttatcgaaagattcacaatccaagggcgttgagcaggtgattgtaccaagtggcaagtttcatcttattccaattcattcaagcagttttttttgttcattctgggtgcttccaacaatgtgtgagcctctagaaatggttacgacatggccatctaatgttggtggtgtagcttcgggagggtatggatttctaagactaggagcaatgcaggtctttctgttggagcattctgtaccccttgaggggcctgtgggtttggagcttacattctaggaacttgtggatgacctactcccttaggaggattaatggcttaatgttgtcctagaatgaaaagctggccatgtgctaccctttgtccagggcaaatgactggtatccttacccaattggatggatgtccaatttagaccaatctttgatctcatcccttagataatcacattcattagtggtatgcccgatatcaccatggtatttgcacctcttctttgggtctcttttctatcttccacccttgtacattggtggaggcttcttgtaatgggccatgttacaagtttccttatagaaattttcacgagtatcgacatggttggtgtactcggagtatcttgattcttgagtcttccctttcttcgtagaatcacttcagcttggacccttggaactgttgggttttgtgctctaaataaaatctatttcaatataatcagatttacttattaataaagatcagaattaacattttatgttgcatg

SEQ ID NO: 297274 - DNA, 3958 bp, Cannabis indica
ggcgcagacttggttaaacaaaattaaggtgttgcgattatggactttagattatccaatttacaatttcttatgtattcaattaaccttttatgccttttcttactttttcgtcttctgactgtatcattaattttgttgcaaatatttccaacgatcatatcttaaatcagtattttccttttacgtgaatgaagagaatccttttcaggattctaagctccttagttataagattatatatttgtatgtactttgttgatgctagctatgacttttttgcagtggtcaacatcattacatggtctttttggcgaaaccaatcaaagtgagctggcagctttcatatcttatgcactggcatttcctaataactttctagcacttgtagacacatatgatgtaagtaaatgtatagaattttatctaatcattttttacggtactttgaggtctacatgccatgctttctgtatgtttgtttttttgcttccttaaaatttgttttgaatcttcttttgttttcaatatcaagtaattgaaattatttattcttaaatcttgtaatttttcattccggatatttgacttacaaacttaattcgctatttaattctctttcattaaggacttggtgagctctatctgagcaactaaatggatgttaattttttttattattattttatatattggttaagtttttcaggtcaagaaataattccattgctatttgtaatcatacttttatatccacagcttgtatttgtttttgcggtgtttttaacaatagccttgcatttgttgtactaggttatgaggagtggaattccaaacttttgtgcagttgccttgggactcaatgatctggggtatgtctcgtgtatattggcttgtttgtatatgatgaaataataccatagttctctctttttcaattgccattagttttttccccctctgttcggtcccatcatttttggatgttcttagaaatttacaaattgaaaatttgcaaaaatatagttttctcttgctattcataataggaaaacaatttgtgcaaaagtagtgatgatgagagactgacaatgatgtaagatgttccacttgagggatagatatatcaatccatatctacagtatctagaagattacaagagctatctatagattttgacaactacaactgatgtgcatatatattaggacgagtaattgcactgtggaatactgtttatcttttatgaattatgagtaaggttaaccaatattgaatgttttcatggtaatatttagtcaatttcgaaatttcttaaaaatgacctaaatccttttttagtgaatattaaatacagttttttgggggcattacagacatttcattcaaagcacaacatgcttaccttctgcaaaatataaatttggtttggctccatgaacatacagttggcttttctttttgcaactttcttagattctttattgtttcctgttctcatattagttttgatttgttctttcatgttatcattgtaaatatgctcaactagtattgatcatttttactctaatatatttataagttttctcaatattgttttgggtggcttttatgtccagctacaaagcaggaggtattagattggactctggtgacctagcatatctttctttggagagccggaaattctttttggccattgagaaagaatttgaagtgtctggatttggaaagatgagtattacggctagtaatgatctcaatgaggaaaccttggatgcgttaaataaacaggtaatgcttttagattgtaactaatgtacaagaatcttgaaccggttactgatcactatgattacctgtgccatgtgttgaatatgcataaacatctttttggtggattgcccaaatttcttaattgaaaagttcttttttttttgcagggtcatgaggttgatgcattcggaattggaactaatgtggttacttgctattctcaagctgccctaggttgtgtcttcaagcttgttgaaatcaataatcagccccgcatcaagctatctgaagatgtttcaaaggtttgaacacacgttacaagcatttccagtatgacttatagttttgtaagactttctaccatttgttcttatctattatcttctacttttctttctaggtctctattccttgtaaaaaacggtgcttcagattattcgggaaagaaggttatggtttggtagacataatgactggagaaaatgaaccacctccaaaggtatagtaatctcagcctttgtggtaatatgtactttacgtatacatttatgatggtacaatttttggagttgtgacattcttttttaattgtcaacttgacgtttgatgttatcacgttcaggtgggagaaagaatcttgtgccgtcacccttttagtgaatcgaaaagagcatacgtggtgccacagcgtgttgaagagcttctcaaatgttattggccggggaattcaggtttgagtatgcatttatgttgtgtatttttattttattttaaaccaaaactttattagcactaattcagagactctgatctgtataaccaaaaaatttgttactgaagaactgagaaaatgtcaccaaccatgaatacactcttgaaagtacatgtacgtaccagtgtctaaactcatcaattatgttgtttgttgaaggtctcaaacgaggagatctgccacctctcaaggaaatcaggcagcggtgcatcaatcaacttgaacaaatgcgttccgaccacatgaggagattaaacccgacaccatacaaggtacctaagacacctcttatttccccaatcttggttttattatttttcatcaattgctcctgtaaccgtgtttttcaactccatgctgtgaaggtgagtgtgagcgctaagctctacgacttcattcatttcctatggctgaacgaggctccagttggcgagttagagtgaaagagtggccttgtaaacaggggggccgtgaaagctaacacagtgtaacatttgcagcattgcaatgttaaataaaaagggggaaattggaaatggggttggcttttagatagtaagcataataagggcatagtacatatatttccgccagtgtagttgttgaatatttaattgtttcttcgttaataaaaattcattattttgagttttttccctgtgaaactcagttatttgtttcattagtctcgcactgcttatgtaacacatttttttagcattagaaagtgaacacaaataatgctaagtattacaaaatcttagtcttacttttaatgttattgttgggttcaatcttgactttgatagggttcttattggtatacatatccacatacttttactaaaaatataaatgaaaagaacataggaattgtaattattattaccattactttggtttaacttttaaagttttataatgattttatattgcaatgatcattacatcatgcattcattaacatcaagataccattctgttacattaccattgcattccatcaaacaaaatataaatgggaaatttgattttctatacttacactacttaatattttatccttaaactaatacatattaccattgaaaatatatgactattttatctaaaacccaaaattacccttcttaaatttcccatacttttttttagtgcaaaaacataaaataaaaataaaaaaaaaattggtaagtgcgatagtgatccgatggtcacctgatgttacttttgtatatacaaaaaacaataaaaaaaaaaaaaaaattaggtaccagaattggtctgatgggatccgatggtggtctgatagtcacctaatgtcttatttttttttatgtaataaaaaacaataaaaaaaattggtaagcaaatatggtccgattggtggtctgatatggggtccg

SEQ ID NO: 297275 - DNA, 6204 bp, Cannabis indica
ataggatcataggagtcggtctctcttctcgtacccacttttgaaaaaagaaaaaacacacacacaaaatgaagttaccacctttatttttatttaatttaattacacactattattttgttcattaatgaaatttccattcaactaaaaaccttattttcattcctcttctttttcctagtcctttttcccccttgaatttgcttttcctagtgtagtagtaataatagtagtagtactcaacttatgtccaagtttttctcagagaaaattcttgcatcgtttttgggtctctggtttcttttctcatgtgggcatgtcaggtcagttaaaaaaaaaaaaaaaaaaaacgaagttcactgtcacattcatataagagagaatattagtgaaataataagggaaatagagttcactttcttgagtgtgttgtagagtagtactctttaaaaaaataacagcctttcctagcaatactagtctagttttgttcttgtttagtctttccttttatatagctgtctctatcgttaaggaggtatttttactctcatctttttttcgcttgtgtactatattatatgtatttttttcgtaattatctttggtgggtatttgttatattttttaaaaaataaaaataaatatttttgttatttttttggacagaggtatggttgatagtgaagcaagtatactttttgtctgtttctgtatttgatttatttttttttttgctaaaactacattctcaaattttgtctgttaatcttgatgtgtttgtttccttttcagctttctcttctctgagcttggatgagtgggtttctttttgggtgcgtgtagagagatatgcttcaaattcttattcattcagatcaagtcaaggctgagaatgagatattgtaacatttctgagatgggtttttcgttttggcttatgataatttgaggtaaacagattcagtccttgaactgttgctatccctttttcttatctatgatatttttgttttgagagctttccttatttttaaaaattggacgtccagttgttcgttaaattggtggagagtgaagttttgaaagtgaatttaagttttgccaaaattagaaaaaaaaatgagagatttcccatcttgtttcggtgaaaatggagttcaagttgctgattcttcttcgtcgagcagcagtaagaatgcccagaatttggttacttgtgtgtatcaatgccggcttcgaggaaggtcttgcttgattactgtttcatggagtaaaaacttgatgggtcaaggccttacagttggaatcgacgactcatcgaatcattgtctctgtaaggttgatattaaaccatggttgttctccaagagaagaggttcaaagagtttagaagcgtattctagtaagattgatatatattgggacttttcttctgctaaatttggatccgggcctcaaccattggagggatattatgtgggtgttgtggtagatcgacaaatggttctccttctcggggatttgagaaaagaagctttcaaaaagactagtgcaactcctatgccttcagatgctgtttttgttgcaaagaaagaacacatctttggtaagagggttttcagcaccaaggctcagttttgcaacaatggtcaaattcatgatcttgtgatagaatgtgacacgattggagtgactgatccgtgccttatgatcagggtagatggtaagactctgatgcaagtgaagaggcttagatggaagttcaggggaaaccataccatcttggttgatggtcttgcagttgaagttttctgggatgtccacagttggctctttggtacatcacttgggaatgctgttttcatgttcaagacatgcctgtctgccgagatgttgtggtctagtcaatctctagccgacccgaatgctttaccgtggtctttttcgcagcgattttctgatagtaaagggtcatctcttggtttttccctgatattatatgcttggaagaatgaatagagtgaggcaaaggttcttcattgagagctatttgctttgctaactgtgagtgagtagtgatgattcttgtcaactatgcttggattacaccagattaaaattatatatgaatccatttgttctttttgttgtcgttttattttttctttttcacttcactattcagtaaattaggccacatgaatagatcacagactattttttttcattccccttctgctggttgtatatccctcttacaatgttaaattggttctcaatatgttttccccctctagtgaatattctgttaacaaaatcatgattttgaatcttattttgcctactcaaacaaaagtttgtctttgcttctattgtgatatcattttttagtgagaatcacttgcaatttctttaatgtttaatttccatcaatagcaattgaattcatttctggtcaccgaaaatggggatgtggatagattaaggttgttatggaacatttgtgtctcctcaaactttatttactgtatctgttggtcattttcgtgttcacttctgaatatgggatgaatcacacaatgtcactcaaaattcattgatttcagtattgatttttttacgtagtaatcttatttgaattgttcatggatgatatttctaagacgttaatttgattcaatctcataatcttactaaagtaaacaattactcatctatttattctggttgtaccaggcttataagattatatactttaaattttgtacttattaagaatttagtgacattcttacaccatatattattaaccatgcagtcttatgctaagaaattcagtgttcagtgttatgtaacttggtactcacctgtttttttcattctgttttttcactatggaaaatgtgatattaatacttgaagctttaatttctggtcttttcgttgtgccttccattttacctgtgaaggatgtaaagtagtgctagtgagttgagaaggacaattaaggtgcatagaagtgaatcttaatgtatttaacaaaatatttgaggcaatggaaggcacaacaaagagaccagaaatcacattaaaatttccgaatctcgttacctgaatgattggggtaatagatagatactagagtatgcttttctgtcaattatctctttgtggctatgaagattgaaggaagaaaaatcttgtacaactggaccctgatctcagcaaggtaagaagcataaaatacagtactagaaaagtcaattattgttttgaaaggatttacttgttgattttgtgacaagaacagggcatagtattgattcatcagtcaggtgtctgacatggacaaaagcgtattccattcattttgagtcatatctgcctattcagcaatttaattctgatagcgttttcattgagagttgaaatcagagacagaaagatattcatgtgtttttgtttacttactgactactcttttttcatgagttcattcatgtctccctaaagttctcttactaaagtgattaaatcttctacagttgaagatattatggagttattgaactttcaaatcacaacccaaatgatttgttgaatttttttttattgtaattatgtttacttgagtttgctggcaaactttaatttgcggtagcattgataatgactttcaaatctttatctgagcttttattataaggtgaaaacatatgtcaattctagtgaaaagtttggttgtgtgtgaagttgaaattctctaactgtggggtctcccctgctctgagataaggatgctctctattctttgttgccttgttttaagattacaagtgacaactgtatttacttcttctgcctggtctgtaaattcattgccattgccaaaatcctcattcttgactataactgacccaattaaataaagttcaacaggggttctataaatgccaaggataggaagaaccatttattttgaagtcattaaccaaatttgtaactgaaattttctagaaacgtcaactttcatttatttcacaaggcttatctatgatcatctagccttttggtggcattactgttgccacttgaaatattggatgtgacattcttcatcactctataaacccaacaaacaatgctcacataactctttaagcctcctccatatatatttattttggcttgaactgaagaaggattagattttcagaaaagtcaattctattccaaaagtctcctgcaagtcaactatgcagatatattctcttgttctctgttattttgtgtcacaagatttttattttcttttcttcttatttaaaaactgggcttgcgtagttctgatgtttggctgaaaatgaactccataacagatttatgtctagattagtagattctttacaagtggtggaaccacatgtacaataacgctaatcaatactttacattaacaacgtagctgtttctggattaagcctccaagtcgacgtaattgtcactatttcaactacttttttcagggaccatagtttgtgtgtgaaccttggacttagattactaatgtaattaaacttttcttttatttattttttccccaaaaaaagaaaacacacacacacaaaacacaaataatcccatgcaagccaaaaaaaaaaattcactttccattcttaaatgtggtcctagttacaacattatctccctctaataaccctcaaatttatgcttttctttctattacatccaaaaataccccttttatttcaaatctctaattctctcttcctctctctcatctctcttatgtttggtcggaggaagggagggagagtaagatggatggagaggttggagagaatggagagtgagagggatagagagaattgttaatctcctttgtgttgtttggtattaggtgtgaggtgggaaggatggataaaaaattgattagtaaaattataaaattatctttttaaaaataaaattttattattttttaagggtaattattgtactttacaaaatatattttgttttttttacaatccttccaaatttggagggattaaattttgaaggtttgaaaggagaatatctccctccatctctcctctccctcttgccaaacaagtaattagtctctccttccatcactctccctccattcctctccatccacccatcttcccctcctaccaaacatagttcccataccaccaacgactgcccaaaccaccgccgcacatgaggacgaaactcaggctcctcttcctctcttgtcgatttccttctcttttttcctgccttcattttcaaaaatccaaagcctcgagaataaccgaaagctccaaagctctgaccgccacctcttgactgatagggttcattctcacctgcaacaaccgacccaccactagtatcgaaaaggtgtcgaaatttgatttggtgcaacttagcaatatttaatcgaaaatccattaaaaaactgttgaaaaaaaaaatcatctttaaccttcaaataaaaaaccattgaaaaattgtcaaaatcaaaatctaactatgacttcagttaagagagattatatgatcaaagtaacaaacatatctgagattagaagagatattattttttatattagagtttgaaattgtctttatatacatagcagatataaggtcaccactaatggaagccacacttataattgttataggggacacacttaatattttaaaccaataaatgattgttctttagaaagaaaaaaaactaaatttggcaatcgcactgtcgctagacagttattacggtctcacaaatctctcagtctctctacttcatctcacccacgcctaactccacatcttgtcaagcaccctccctaagagcatttttaatgcaagcaatatttaaagtctctataaaactccatgttacctcaaaatataatattttatttttttctcatccacatcatttttagccacttcctactaaaaattattcaaatactaaggacatctccaaccggactctaaaacaccaaatatagtgtagtttcacaccatatttactctaatagaacactaaaactatactcataaatggctttgtctacaatgtcccaccaaatttagtggggcactgtagactacactatttttttaaaaaaaatttaataattaaataatact

SEQ ID NO: 297276 - DNA, 1456 bp, Cannabis indica
atgttaaatttaaagcgaaaataatattctttgatagcacacagcacacagattgaaaaaaaaaattgtcaaaaagattaaactactccatgttccataaagaaaggtataatcagcaagctagttaattatttctttttttttttttaaataatgataatatataaataagtttacctagaaaagatataaagtaaaatggataatttgttttttcctttctttctttgggtgcatttctcattgtgttaagaataaactccaaatctgtaattaccatttcaaaagcttttcaagcactgattctgacattttaaccaaagcaaacaggacccagtaagtaaggcactgctggtttttgaattctgactcactctctattgctcgaactgaagcatacctgtgtaatcacattgaattggaaggtacaaaaatataattgttatattatgaaactaaaaatataaaagagaaaaaaataagataaaacccagtaagcaaaatcagcatttcagaagaatcatgtggaaagaaaaaaattaattacttacaagggataaaccaaagaaaatgaaggcctgcacaccaaaaaaataaattataaaagatgaaaactttcataagaaatgagaagaagaagaaacccatgaaagtattttcagatcacatggaaaagaaagaaaaagaaaaagaaaaaaaaaacccttaaatcaaagatgatcacataccaagagaaaatagtaaataatttagatgaaagcaggataagaacttcccaagccatgattcaatgtctgttcagtttttgggtcttttctagaaaaaaattaagataaaatggatgaatttgtacaaactgagttggcatatataaaggaaaactaagaaagaaagaaagaagaagagagaaacatgacatgagtgagtgaatcaaagttgaaagactttctgtttcttggagttggagttggaactggaacatagatgggtatgattatgtgtggcagcggtgcatggttatagggtgtttccaagcgtgtggactaaggttgtgactggaacctatgaaattccaaacgtttttttctctttttttctcgatttcatttcaccaatgcaaatatgccaactcgtgtcttttctctctctctcaataagtatatttacaacttgctaaattaatgtgtccaaacatatatgtgcaattttatgtaatctcctattttaatttaagaaattttagcaaaagaaccatcttaatttttattttcgttgcacttaattttaaagttcaaattttagtaaaaaaacattcaaaactactgttttattttttaaagtgtcgtcccgacacatcactattaaggtccatcatgactacctttacctaatactaaaaaaaaaaatatttttactaattaattaaataattaaaatgaaaataaaaactaaataa

SEQ ID NO: 297277 - DNA, 1073 bp, Cannabis indica
aaaatatagttttttaaaattaataaaaaattatatgtatttttaaaagaaatttttttttagacccttgagctaagtgaaacttcgacgctggtttagttctcttatatctagcgccacgtattaaatatctttcaatttttttttcttatccatatctaataatgtataatgttttactttaattaacatttaacagctaacattagccaaaataaattgcttgttttttctattttcttttataaacatataaatcattattattatcatcataaagcaaaaattgtaaaagtacatgcatgtgatgatattttacaacaagacaagtttttccatttggattataaaggtacaacacttgattatattgcatgtgaaatggggtctaaaaccaatccttctcaattctctctctctttttgtatctatccatataagatattgaatagtaaaagttttaacatatataaattggttgaaatttgaataattatatatatttttttctagaaaaaatgagtaatctaatctagaacacataacatgtgatgcctaaaccaataactctaaagctaagtcataatcaccacctaaataattgactattaaccacttattctcaataattactttataatcatttatggccaaaaattgacatatagttcaataacaatatcaaaagtttaacttgtttgatggtttaaattgagaatgaaaccatatggaaagaataggtaattaatgagataataataaaaataattataataattaataattagctttttgtcatatcaataagacaaagaggaagttcccataacaaatgtcataaatgtttacttttgcctcttattatgaaacttcactttcccaccacatggcttgttcttttattatgctaataattatatataataataaaactcttttaatcatcatattatgtggagcattactattggagatcaaacatcactattactcaatactcactataagaaatgtcacttttgccagcatatttttgtactgacaaaagttggtattgcgctggtaaaatagaa

SEQ ID NO: 297278 - DNA, 3896 bp, Cannabis indica
atcttaaagaatctaaattcactgcatccttctgcacggaagattctgctttgctaactaaatacgttctgcatgcattacgcacatgtcaagtctagatacttgttgaagactcacataactagttttgagcatagacttttctagacgaaacatttggaagcaaataacccattcaggtctcaaaatgatctccacgtgtgactttattgagtgacttgtaatgtaaattgggataagaattacttatataaatggtaggtagtgatatggataatgtgtttgaaagattggtaaaactttctaagctttagtgttgtgaatatgggcactactataactaggcaggaaaatgcaatcatgaattaggtgcagaaagctataaataaattaattttatgagctgagtgctttgttatatatgtatatatatacttcccttaagagtttcatgattccttggaactgtcacaaagatattggcctactcccttcacttggggccatcatggttcgataaaattgtggaccaaactgacaaattctgctttattcactccaagttaaaacatgatggaattctgaataatgcaatctagttgatatcatccaataattgaattagacacacatgcagatgtagtgtttcatcaattatgactaccatttaccacttaagagtgttttgacattgttgatgatttcattttctttaatttttcttttgacttttttattctaacaattttggaagagtattagctgaggaataacttcattcgatacaatatacaaaacaatgaatgttccttattatacggggctctgcttttacatacatattaacatttatatatttgaagaagaagcatctgcaactctggatgttttagaatgcttgtttaccaccttttggtcgagctccaaccatttttggatgagtttgaaaacagactcatcctgcaacacttgccgatgcgtggcaggtatccccaccctttggactgcttcaaatccatctgcctgtaaaatgagattgataatgctttgataaaaaaaattattagaaaagtatggttgagttgatatggattaattgttgagaatatttggcaagttagatcataaggattatatatacacatcctataataagattgtgaatttgtgaggcttgggatataggatccttagggtagggaatggaagttctagtcctctctaagtttcttggtcactgccatatctaaaattaaatgtctttaaaaatcacaggctgcttgaaagtataactcaaaaactccaatacaagatcagatagatagcttatgaggtgaaatgtaccattgccgattcagcaggaacagttccatctccgttgacaaaggaatactctggctggaacagagagaaaatgacataatttgagttggatataagaacaatagccaagctaaaaataataattgataatttataacatgtttttctaattaatatgttcataactcaccagtgtatggcatatttcagacaagtcctctattggagatgtctttgaaccgtagctacattttaagtacacaaaattcagatgcacagaattgcaagtttggcagagaaaaaaaaaacaccagcctctgaaaaggttctcctgtttactttaatataattctaatattacagcaaggctttatatattatttaggattaatccatgtgaattgcaaagtgaaaactgaaccttgagatccttgactgcttttctttattgtgttcttttgttccttcataaaatagattttgtacttaccaaacatcaaaaggtgtttcaaatgatgtcccatagatgctatagaagctgaccccatcaggtagtttagcattgttaagaacttggcgagtattggaggcccatttgagaatagcatagttgaaaggtagagctatttttttaccatcaaagtctagctgcatgtggaaaataatgtgttacgagctctaacttttgataaatgcacacattgaaactcagtccattggttataaggggaaaaaacagtgtcaatggaaaatgttaatgtgcatgtctaagctatattggaccttagaatgaagtggtatacctcattcttcctcaaagcatcttcaaacaaatttatactctcaacagggtcaaaggattccaattcaaccgatgtttcatcgtcctttgattgctttcgccaaacatgaattaatggttgccttttccaattaaaatcaggatttgccaacatctcatagatggctggacactcaatcagctgaacaaagaaacagatatagatatcttttagtaattcataaaatcgcaagcattagcatcataatacgtagacaggatatttcgaattattacacagaaagtgcagtagtaattaaaaaatacttgttcttataattaagctatgacaagcatggttcaatacttcaatttggacaaagaaatatccctctgaaaatttaaatacaccaataaaattaccagctggtgcattgtccaccttgatacaaaaaagaagctttcaagaccctcaacaaactgtagtccagttaaaagagagtcattgatgcatcccggtgcacctgtttgacatatttcagcttaaaggggagatactgaaattcacaagattgctggtactaatactgaaagatattaactgtacactataacaacatggaaaaggaaactaccttgaaaaggacatgcaatacaaatccacttgttcacatactttgcaaatacctaccgacgaattgattaaggaaaaaaaaaacaaggttaagaatcttccaacaagaagaacttacacttagcaaaagaaagttagatgtttcaagaacttttccttttgtgagtttcaagttagagaaaacatacgcacatcgttgtggagagagaggaagcatgagacaagcaatccacccatcgagtgtgaaattatattaacttttcttcctcctgaagccttgtaagcagtttctaacttcaccttaaggccttccatcaacttatcaattctgggaacatataaacatgtcacataggattagcaaaatagtacactcaaacaaacacctgaagaagtaatttcaacgaaatgaattaccgattgctttgtctgaaatcataaccatatccaaacaacgtggttcccttcttgtacccaaattttataagcatttcaatcatattatgaaaatagtagacatctgtgacatgtaagcattttataacctgaaaaaaagaaaagatctagtttcatacaacctagaagctaacgtaaacaaatgttttggcaacaaacattccaagaaccaaaaataaagatgcacttgttcataatacagctaagagtagccaatggagcaacagttcaggactatgtaacatcaatttacattatcagacgttaagtccttactttctgaaagaaggtgtgagaattatggaaatgatcaaattttaggacacataaaccactaaaaaggtgagaattttcggggaagaaatatagataaataccggagatggatctagaatgtcaattgcatataggccatagtcatcttcaggtaccagcagttgggtatctttatctaatgattcagtataacctgaaataaaacaccaacaacagaaaaataaataaatagaagaaaataaaataaaatctcaacaagccaattttgacatacccaattcattagagagccaagttttaaaatgtacagcttaaaagaagtcctatgcttccccaaattccctaaacaaataaagataaaatattgtaccttctaaaaattcaaaagaatacatcaaaaattctaaaaacagttttttttttttt

SEQ ID NO: 297279 - DNA, 1997 bp, Cannabis indica
gaacatttgattttagatcatatgtttattatactcttacgataggactgctcgtatataattaaacgttatacatattataataatatatttatttttaaaaataatattaataattaaaaaattttcataatttttaatttgaattattttttttctaaaattaatttgaattatttttatatagatattattttttttttttgaattagtatatttcattccaacctaacaattataaggaaaaggctcgtctaaccgaagagcttgacgaacacaaggggggaaaactccaatccacatagcactaattttggataacaaagcttgattggctgaaatgtgacccacatgattggcttctttaaaaaacaaaagatatatcggatacattaggatgttgcattaaagtccgtcaatttcacgacaactatcctctttctcttgaagtagttgaacagttcttagacagtctgattccactataaagttacagaaaccccgttgtatcccagccttgaatccttctttaatggccaacaacttagtcgttaaagaagttagctgctgcttgacaattttggcagtcgcaaaagcaaccttcccttcatgtccacgcaccacacagctaacagcaacataaccttccttctccctcaaaccaccatccacattaactttgacacagtgcatctttggcctacaccatctcacattttccctgcctgaaccaccctgtttcatacccccatttgcttcctgaaattctttcaaataccgtccacaccatttaaccatatatcccactcttggacaaaccccaccatgactaacacttatacgtatattctataaatttcacaccacaactagaaagaaattaagagtattagagtcccaaacctgtgccattgtacttaagaaggtagtgatatctgtagttcttctgtcaccaagttacttccaaaagccacatttcttccacaccataacactgtagctgcaaccccataaagcatgaagtatgtcatctcttttccctttggagcattgagagcacaaaggttccacttgaatgccccgcttggataaatcatagttagttggaagccatgaatgacatagtttccacacaaaatgctttatttttggtggaatttttcttcgccacatcgatttccaccaagcttcagttctggatgagtcagattgaagtgcttcctcccgcattgccacaaccattttatacccacttctaactgagtactctccattcttgctgaaatgccacaggattttgtcttcaagaccccattcaccactcgacatgcttacaataagagcaacatcttcttcattaaatagagttttaatgaaattcgtatcccaagatccatcaacaagaagcaaatccacaacccttaaattttcaagaagatatggtttgtcataaatcttaaaattatgtggtctaggcaaccatggattgtaaggaccgcttagtttaatttgaaaattagcagttaatcatgtttaattatgaaaattatttatagctatttaaataattatttatactgttattattgaattctgagatgcattttatgtcatttagagattttcataagtttgcatttccagtgcccggtaacatggaactcggtgtttggctcagtaaaatcacaacttagtatgttagtagtgtgggacggtttattagacattgggaatgtcgggattggctgggaatttagaaattcccaaaatacccctttagtgttatttatgttattttagtgtggaggggcaaaatggtctttttgccacaatgatattttgtcctttagtggacttagtaaatgagtttaatatgtgttttatattgtaattgttggctgaagtatatggtggtaaattgcatgttttctcttttattcaaaaaattcaaagttgaaaaaaactgaaaaaaaatcaagctcttttcctctctctct

SEQ ID NO: 297280 - DNA, 1476 bp, Cannabis indica
tttttttcatttgaatttgttaccttttgttttgtttattttaatttgttggagacataatttattttattttgttactagtaaatttaaataattaaatattaaaaagtagatttgaattattgtgcgaatgaaattagattcaaaatataaaatttacatttagggcgaaccgaataaactataaataaaataatacgaactgcttcatcaattattttcaaattactagaagagttaaaatttgatttttcttttttgataagtagaaagaaatttgattaatctcactgtaaaaggactgtttctttgtttaatctgactgtaaaaaaaaaactgtttctgggtgtttgaattgaaactaatatttttgttgccaatgttacccaaatcagctttggagtagtgctagttactgccatttcccctgtaaggctttccttgttttatatatatgttacatttgacgtcatcctttagctgacacgttataccatacatgcatgcgttacgtatcggttactttctttaatacaatatcaattctttttatggcaagaaaatacaatagacagaggtagcaatgtaggcgttaaacgttgtcattggtgttttggttggtgggtttgtattgtttttcttgtatttttatccgtctttagtattaaaacctaagaggttaagattaaagcttcaaaagcaagggattcgaggcccattaccttcaaatctattgggaaatgtctctgaactgaacaaaatcaagcttcagtttaactcaaaaaggactaatacaaacgacaaacttcatgatgtcgtttcgattggtcatgattggccttccaacgtctttccccatttgttatttatttattttgttacggtgtgaattgtgaattgagttgtgtagtacttgaatgaaaatatatatgcagggccaattttcctttatggagtaggaaatactcaattcttattcgtaacagatatagacatggtaaaagaagttagtctaataagcacttctttgaatcttggaagacctccttatctctccaggaattatggaccactgtttggccagggtattatatcctctagtggtcaaatttgggctcatcaaaaaaagattcttgctcctgaattctacaatgacaaggtcaaggtattataccactgttaattagttttaccaactcaggtttttctcaaattttgatactagagaaaagaaacactagtacaatttgttctctgtttattactgattggtaaagatttgacttttgagtaacgatgtttctatacaaaatatttttagtttgaagttagatttggaaaaagagatttgtattaactccaattaaacttaatttctgttgtgtgtcttttgtcaagggtatggtgaacttatgggtacccaattttgtgcgcatgggtgaggactcacacactggatcaccacatgcgcccgcc

SEQ ID NO: 297281 - DNA, 2417 bp, Cannabis indica
aaaaacccattcattgaacgacgtcgcattgaaccgctccacactgcacccacgtatagtttcaaatttctaattagaacccataaattaattaaacaagaaaagtaattaattaatttatacccgaagccatgttgggcgtaataagggagattagagagcgtagtctcatctatgtcaaagacccacacgacgtcgttggcggcgttcttagaaagattgagggtcttaacgtaaagaaaagcctcatcatttatggcttttgagtctttcctatactgatcgccaagcatgtagtgacccacgtagtcctcacaggccacaggaatggttttccagttgatgatgctgttcgtttccacaccgtatcgccaactcaggcacgatactcccttcacatggcccccaccagaccctgactgtggcctcagcaagtgaatttggttgctgattacaggaaaatctaaacctttcacctttgccactacaaaaatattaatcgaaacaaacaacaccagtaacattattgatcctgacatcatttattactatgtatatgtaatcatagaaatgatctgtgaattcaatttgataggacttgcttatttttggcttcttaaatagccttcaattcgttcttacattattgtcaagtggaccaaaaagtatactttttatcatattttatgagtattattgtcatatgcttaatcttttaaattaaaatatgtaaggttaattaacccatcaaaataccgtatagtgtttgttgagtatatgtagcagtaattagttaaattaatattaatggttgagaatatattcatattagctagactactgtctaaacaaaaacaagatattcgattttataaataattaaagttgatcaaccacgtgatcaggatgactactgtctaaacatgtgtcaaactattaatattatatttaatataataataaaaaagaatgttacatgtagattatattaattaatcaagtttagctagatccatttatactttattgaagtttgaaagataacttttatatttatatatttctgaatgtgcacctcgtttgaataatattgctatatatatataatcaaggacatactgctgttcgagaaaaatacttaaaaacacacttgaatttttatctcattaatttgatgtgtctttaatttatttggattaagtaataataaatatagccatgtaacagtcagtaattatatttttattttcaaaataaataaataataatttttaggaaaattatactatatattattttttaaaaaaaattacagtttaggtttctaaagtagttgcagccctagttgtaataggaatttatacgatttttttgttattacagcgctaattgcaataggggtttttatataaattccgtaaaaatgtaaaagaaaattattttaaagtgtaaaaataaaaaaaaatcctaatttttaatgaaaattacatcaactagtacaatatgtacttcatttgatatatcccttaacagtattaaatctacacatcctcattaataaacaacaatataactaattaaaggcatcatcattcattcagtactggacagtttagataatggatatggccacatgttacatatctcatttgttattattttattcctattttggtatactcaaaatctgaattttaatggatataataaaaattgaagacattcatttgtggtgtaataactgcaactttaatattctttgtcgcaacaataattcgatcacatacaatgatcaaattcctctcacctttctttttaccttaagagaaaactcaaatcttttttaatttaataaagcaaaggcacaaatcttaatatataataagctaccatgtgggtaacttgagtttggatttggtagatataatataatgatgatgatcatatgtaagcgacaaatatgtagttttgtaatattaattaaccaatgtagtacataattgggtcgggcaacttgaaggtcctatggcctgtggtttgtgcctaatacaatttttaaaagtgttaaatatttttatatcatctttacttgagtaaaagcttcgatcccaagtgtggtatcactgctacaaaagtcagaattcgtgacggtcttaaaaatatttttttaagaccgtcgctaaaaaaatttagtaactgtttaaagctgtcgaaaaaaattagtattcccaacggtttataacagtaattacaggcgacggtttcgattgaaattcgtaaaatatattgaacccttataggcgacagtttaaaccgatgggtcaataaaaaatcgttacctacttcttaccacatttctcacgtgtccacctacttcttttctattttccacatgcctacctatttattctccattt

SEQ ID NO: 297282 - DNA, 3825 bp, Cannabis indica
cctgcaccatcataacactaggtatatctataatcgtgaacctcatatgcttgcaaatctggaagaccccccctatttgattatttgtagtctgctggcttcagtgaatgagaaaatatatttggatccatcgttataacttgaaatttggtttggactgtttgatgcaggtgctacacaacttttctaagaggattggtattgataacttggatataggggactatttaggtactagctttgtctctttctatgctcaagcatgatatttttagtaattacttctcatttttgttccccccttttttgttatttgtcatctatgtatatatttcttcttacgtgtttttttttctcttccagctattggttctatatttgctgcaacagactctgtgtgtacgttgcaggtatgatatatcactatccctgtattttgttgaaaggactacactacataactcatgcaaagtgaaattgttgactggtgttgcaggtgcttaatcaggatgagacacctttactctacagtcttgtctttggagagggtgtcgtcaatgatgctacatcggtggtgctttttaatgcgattcagagctttgatcttacgcatattgattccaaaactgcattgcaattccttggaaatttcctctatttgtttgctgcaagcactcttctaggagtgttagtaagtcattatctctttttcagtctatgtatcatgattgtacacacaccatgtcgtatctcagtgtaacttctttctgtaccttgcagactgggctacttagtgcttacgttatcaaaaagctctattttgggaggtacttcataaaaataattaagattttatatctaatgcgttgtttacttgatcttctgcaatagttttcttttaacttacactgtgaacttatcatagttgctctattattttttacttctacttttctattgaaacctgaccttccaatcagaatgaagtgtaataaacgtgcctttatatatacaggcattcgacagatcgagaagttgcccttatgattctcatggcatacctttcttacatgctagcagaagtaagtttatgtttaactgcaaccttatgaagttctttctttcattaccctctttctgttcttcccagtttcttcacagtgaactgatataaataagtcataacaatggaactggtatttttgatgtgccttgcagttgttagctttgagtggcatcctcactgttttcttttgtgggattgtcatgtcgcattacacctggcataatgtgacagagagctcaagagttactaccaagtatgatccaaaaaattaaagcttttgtgtctattggttatgcttttaggaaactggtcagaacgtgaatttgagttttcttttcatatacaggcatgcatttgcaaccttgtcgtttgttgctgagatttttatcttcctttatgttggtatggatgccttggacattgaaaaatggagatttgtaagtgataggtatgaaaacttattctcagactatgtacactttatccttttaatagtagagcagtatgtatgatatcttggacacattgtaaaaataaagctctttcttacaattaccaattgattctgtttcgatttctcattggcagtcctggaaagtcagtggcagtgagttcaatattgctgtgtttggttcttgttggaagagcagcatttgtgttccccctatccttcctgtcaaacttatctaaaaaatctcaacatgaaaaactcagcctaagtcagcaagtaaaaatcttcgttttttctcaatacatttcttcttcatattcataatatagtgttcaatctactgactgcaatttactttaggtggtaatatggtgggctgggctcatgagaggtgctgtatctatggcacttgcttacaatcaggtatgttttcactccattgtcctattgaatgctaatctacttttcaattctaatgagttgtcacaagctagagtaatttttttggtcaacttctgatgtcattgctgctccacttatttttattagaaaaacaaacttaaaatcaagaagagaactgtgtcatggtagagaaacttgttagtgtagaatactcatttttcacttgtttgtttccaaatgcagtttgcaaggtcaggacatactcagctgagggtgaatgcactcatgatcaccagcacaataacagttgttcttgtcagcactatggtgagctattttttatatttgtttcatttatgagtttgatgtgtctatttagcattatgtagtgtttacgagtgctgctcgaaactaaaactttgacaggccttagtgtgattgtttggacctcgtattatgtttgcattaggcaaggaaaggaattacttttcatgtttataatgagattataatatggaagaatgtagagatatttatgtattctgttctaccaaaatatttgctgttgttatattcaaactatgtctcatagttttagtatggataggtttgatttaagatgaacccacaacatatggagcttagatgaatcagtagtctttctatatataaagtttgttttggggatgatgactaatctatctgattgtgatttaggtatttggtatgatgactaagcctcttataagatacttgctgccaaatccgaaacataccactagcatgaccctgtcggatccctctactccaaaatcattcactgcaccgcttcttggaagtgcacaggattccgattttggtgtcattgacgtgccccgaccaaatagcatacgtgctcttctgacgactccaacacacgctgtccatcggtattggcgtaagtttgatgatgctttcatgcgcccggtgtttggtggccgtggttttgttccttttgttcctggttccccaacagaacggagagagcctcaatggcaatgattacacaaacagaatgagattgagctgtaaaatagtttttctttttccttcttttctttcttaagttttctacatctggtaagatcaaccaaatgaatgactttattatagatcagcttatgaagttcctcgagaaacattgtttttgggcggtgacttggcgctgtaccaacattgtcttatcatatgtagtaacattattatgtgttgtgtataggttttttggtttgccccaaacgatcaaagggttattgatttgtttaattttggttttggctggcttactcttctgacaagatatgagagcgtttgtctatattgtattgtattctttgcccgtaagtgtaacgtaatattcgcataacagttgatgctttaatcagagtatatttgtttataacgcttgcattggcaaggttatgaaagagtgctttgtaagaattcaggtgccttaatgtgttgcattacgtgtgcatgtgtttttgtgtataattacttaattgtccattttgcttaaagcgattttgtcatgtataaagtcatttaatcttaagcatatggatatggtgatctgattctgcatcacaactatttaattgtggtgcaaaacaagtcaaatactatgtatatcatgtggtttatttatatgggtaagtagaggataaatttgttatgatgaaaatacaataaactgcaagcaaacatctaagttggaaagctggctgcttgagatagtcatattgtggtgggagaagtactttttgcaacttgatcatgggtgtctctctagcttcatttggctctccttttatcgacctatgatacttgtaggttaagattatcctcttttctttttttttttttt

SEQ ID NO: 297283 - DNA, 3962 bp, Cannabis indica
aatatttgaagctattggcaaggttgactctgctgccagatgtttctctgatctgggagagtatgaacgagcaggtataaatgaacttcaaatcaatagattataattttgcgatttatatttatttttatataatatactgaaacaaaaactgtgtatttaattattagaacagaatacaaaaaaagggatcaagttcatgttatatcaaaaagaaaaggccacgaaagcctgaaagcagcagccttaatagtttcttatgaattggttttctgttgccaggttgtatttatttggataagtgtggtgagcttcgaaaagctgcagaatgcttttctctggcggggtgtcatgagcttgctgctaatgtttatgcgagagggaatttcttctcagaatgtcttactgcttgcaccaaaggaagattatttgagatggccttggattacattaaatgctggaaacaaaatacagcaaatgagtgcagtactgcagagagaagcaatgaaatgaaaaagattgaacagatgtttttggaaagatgtgctttacattattttgagatcatagataagagttccatgatgaaatttgttaaggagtttaattcaatggattcaattcggaactttttgacttcattgtgctgcttggatgaacttttgttgttggaagaagaaaaggagaatttcatggaagctgcaaatattgccaagctaataggtgatacattacgcagggttgatctactggaacaagccggaaaatttaaagactcagctaatcttattctgttctatgtgcttgtcaactccctttggtcaccaggtaacaagggctggcccttaaagcagttcaaaggaaagggtgatctcttaataaaagccaaaacatttgcaaggaatgatacagacagcttttatgagattgtttgcaatgaggctgatatcatttgcaatgaacagagtgatatggtaacaataatgagtcagatgattacttcgcagaggcacaaatgtgttagcggtgaggttctatctgctagaaaaattctcgacaagcacctttcattaaaacccaccaagtactattggcaagaggaactggtgactgatagtatgaagcattcagaagacatgatatctaaaaaccaggtatcaatagagtcactggtctacttttggaatttttggaagggcaagattgttggcgttcttcaatatcttaaatgtcttgagacccaagaagttaatgagtttagatattatggagagttctgttttaattttttaggtgtttggagggagttcaatagtttgaatccagtatttttcttctaaaccctgaggctgattgggcaagagatttggctaaaagatcaaatagtggaaagttggtatctattgatttacaccaacttgtttctgctgctcaaagatattggtgttctgagatgctttctgttggtgtcatggttttggacaggctcaaagttcttttcaactttccgatccagaattgtgataatattttcttcaaaagcagggttcttaccctgatctatgaggttgcaacatttcttctggatgcaaaaattctgaagctgaggcatcatgagtctgagaatctgttgaagtacatcagattttctactgaaaacatagttgattacatattccccgaatggcctaaaccatcaagcgaaaacttgattttactcagaggaacagacactactaagagtatgctgaatcgagtcatagctgagtctgacagtctaagtaaaaaccccacttacggacgaattggaagaatcgccatgattattcttggatctgggaaggtgaatagagaacactgtgggaagattataacaaaattgaaccgcgatgaaaagtggaaaccttggaaggtattctttgaagttctaggcaatgttaggggatcagattttccagacaaccctgtatctcccaacaatggagaaaaattaacacaagatcgccctgcgaacgcatctgagataggagtttgggagaagtatcttattagtattttcaaagatgctttagaaaatacgtacaacaccaattggaggacagttaatgactacatatcgcctagttgtttcttgtatcttatcgagtaccttctgagctggttgtgttgcttcaatggttattttttatccaccagatccacatttgtcgaatgtcttatgtaccatgagaggctcacctgcctcgcaggtcaaacaagatcatttgaatttaatgcagaacccatcttgcattcttatgcaatgtagtccaagaatttcttaacaacaagatagatacacttgactggataggaaaatctaccacagcagtgatggaacactactctcttcttgttacgagacttgtggtgctgacatgtttagtttgtatcaactttggctcgagtactgaattactcgtcaatttgttgaagaagatctacataaccgaacaactaccacacttgttttgtgtagtgctcaagagagtaaggagaagagacaacagtcaagagctcaatgtgaatttgattgctgaagctcttaagaaaatcgacaatcctatggtgatcgtgaacttatggggatgttgtggatgctagttctgagggtgacttactgttgtccaatgcttctaaggacgaggcgccatccttgtccgaggcttgccaagctagtgaagtacaaaacaagggaagtaagcagtctaagagaagcaaaaagagcaaatcaggaagaaagaagaaataggcttagttaagcattcaataatgaatttggtagttcttattaactcttatgattaaacttaaatgtattatttttatgtattaccgcatactttatgaatatgaataatattattgtcttgaaacaatttgtgtagattttgttactatctcaattctctagatattgatatgatttggttttaagtatatttataaaaaaagcatattgaaagagaatcatgaataataaagttgatgtatagttccactaatacatcaacttgatgagtatcaaaagtctatcccaaatgtttcataaaagaatatgaagtcccaaatacatgacacaatagctaacacatagacaaacaaattaaattaattatataaactatatttgtatccaatctcatacataacttggatgaaaagtagattttcattataacagttgattagcattttagattaaattttaagtcttttaatagatttattaatatatgttttgggttgagaaatcttagagaatgagttaggtccgaaactttttagaaaattgtagaaaaggaagttatttttttaagcaattagtgaaaagacttagatttttagtgttattttaagtttttcttattacataaaaaatatgaattgacagtttatttataaaaatacttctataaagtgtggacaacatttatacctttcatgtaattttaattatcaaaataccacttacactattacttacacaatcagacgatggttgtagggtggttgctgcgtggttgcgcggtggttgcatcagacgaaggtttcaatcagacgatagttgcagggtagttggccaaaggttgcatcagacaaaagttttaatgagatgaaaattgctgggtagttggccgaaggttgcatcagacgaaataactgttagtaaaatgtttatgtaactgtaatacaactattgtgatacattaaaaatcagaacaatattttcacgtacgtataactctatctacgtgtctttttatgatttaatatgaacaaattcaccattaaaaatttgaaaaacgacgaaaatacaccaggataaatattttactatagtatagtaacgaaatttttttaggattatacttgagttagattgtttgggaactccagttcaactttttgagatatgcctt

SEQ ID NO: 297284 - DNA, 1875 bp, Cannabis indica
ttttttatatatatatacttatttacacttctggccatgttcatatgctaataaaatgatgttgtttttgtgtatattgcgatattaatgttgttcttctttctcttgcagatttaggtatgtcccatcacttgcttgcatgttatgacgagactgaggatgcaaatgcgtccggagacgagaacaatgtccaaacccttccttcaatcccttgggactattctcagctgaagagaccttgccccgtggcgatagaaggcgatgataatgctcaagcctcttcctctgccccatggaccagcgggtgcatcaggaggcctcctatcaagttgctcaaaattcatcatgatagtgatacaattcagatgctagaatctgtgcacgacaactctgatctcttggttcgaaagacttccactatggaggtggtgcgcgacatgtctagttacgagggtgatactttcactagtggtgtccaagatattattcgagtaagtgatggactatacaccaaaatgtattaataattgcatgtcctctcatgtgtatgctcatttattttttttttttatgatctcagctccttttgttgtgatgtttttttttctagggtgtagttcaactcatggtctcccaatgtggttcttcgaatttacaagagaagctggctttcacagaggcgaccattgaggagctaaaaaaaatctccgctctttggatgcaaaatacaagcatgataaggatgagctcgaggacatccttggtagaagacatcaaaacttcttgcaataaaaaaagagttagacgagcaaaatgagcaagtgcagtactacatcaatcagaactttgcttatgcaaagaaggctaaggcgctagaaaaggatgcccaagaaaatgatttgaaggtcaaggcactaagggatactattcataagcaagaggagatgatggcaagagaccgccataaatacaagcgtatctttgacaaccaattttatcagttatggaaaaataaccaaaaccttgacctttcgtacatgcctccccgcatcagagataaggaactcatcaagtgcaaggcaagatatcttcgggaagtcgtacttcctcccaatactactgtcctcgttgttggtactcctaaggacctgtctggtggtactcctcctgatgctactcctatgaaccagtctggagatactcttccttgagatttttaacccgtaagctatttatcatgagtgcatgtgctctttgtttttgttcagtagactatgtgcatgatgattttgtgtttcactttccttggtcactctttatttaaatactggatacactctattttttctaagttatccttagatagatagctaattatatgagttctcttaaagctcccttgagtaacatgcttcgcttattttagtttttttttttttttttttagagttagcactcactttctagttttaagtgtttatcatgtgattataatccattctttccatttaggatttttagcttaagcgtttgtgaattttttatttcttatgaaaactgtataatttaagtacgagtatctatacttttatggcccccaagtaactatagtttagctaggttacttgtttttaagttggcaatgtaattataattattttgaataattaaatatttttatttaaaattagaattattaagaacattaataattactaagaacattacgaagaataaaaaaaataaagatttaaaacaaaataaattgactaagtactaaactaaatgagttgttaatgttcatccgatccaatccgcatttttttggtcaaacaacatccaatccgcactaagtgcggatttcatattttggat

SEQ ID NO: 297285 - DNA, 3513 bp, Cannabis indica
atgaaaaaaaattagactaaattttttttcttaataccgaaacaaatagagaatgtatgagtacattccttttaagtttttaaaaaattaaattgtagaatcacccaatagaccatcatataacaaaacttcgctactccgataagtagccaaagtttcattttctttaagtaaaaaaaacatgagaaataagcggccagtctaaattataagaatagaaccgcctctttcagtttatggttacactaattaaagtctcaccagaccaattatttcactatcttttcacactctcttcacgtggacatctcgtgatcctaagtggagtgggtactcaatacacgtatatatagatgtatgtatagcgaaagttttttttatattcattgacttttttttttcatatatatattgtatataaaaatatctgtacaaattataaatattaaagattccccatcttagaaaagtatatgatgagagaacatttagattcttcatctctatttttttttttaaataaaaaaaaaaaactcacactcacactcatccacggatatggaacttgtgcccttaatcacaccctatgagcatccatgtgccctcatatttaatacccctaattgggccctacaatattactagattctatacacacacaaacacctatattatcattatcataattatatcatttcctcttatattcttttatatatatatatatatattaagacaatttcttatgatatcactaccatagcttgtctttttctgtctgatcctctctctctctccccttgacatctctataaataccctcatcctcctttcatttcttcccaaccacaccaaacaaacatacaacatacatatatatcataacccaataacaagcttgctatatatattcatatatagtaaccctagctatctaggtctatatatagaaagagagagagagattaattatgtctggggtttgggttttcaagaatggtgtaataaggctagtggagaaccaaggagagtcttcttcatcatcttctgaagcaggtgggaatactagacaagggtctcgtagtagaaaatctcttgtacacttgccaagtggacaagtagttcaatcatattcttttctggagcaaattttgaccggtttaggttgggaaaggtattacgggggtgaccctgacctcttccaattccataagacttcctccattgatttgatatctcttcccagagacttttccaggttcaactcagtttacatgtacgacatcgtcatcaaaaaccctaatatcttccatgtgagagatatgtaattaattaattatttgtttcatctttaatttctcttgtacgtcgatgatcgatatcgaccttttattggcagtttggtacgtttgtttgtttggttttcatatatgttattatcattgtagaaaaatggagtgtttaatttatgattggttttcataatcagttcatcaatttagtgtttttttttttggtttggaagtttgtgatcatcaccatcagctctgtcatatataaatatatatatatatatatatatgatgacttttgtaaacatatatatataattcaataaatcatcaatatcaactattattatcattctccgtgtctctttatatttttgttgtttttaaacaaaatctaattctaatgataaatatatatataccatacttaccaatgattgttagtttaattggggtgatggttcttgcgaaaacaaaccaaggaaaattcgttcgaatagctgctgtatgccatgtcatcatgatgaagtggggttaattagggcaatgagtagtgtgtttcaagcgaagagacaatacaaatttaatatatttcttatagaatttttctagggtaggacatttactttatagtccctacgtgtgaggcattcagctgagtaatgttattggtcaagtgtataacattataatagtactaggtgcaccttattattattttcattatggattttataatggacgcatattttattttttttttctgtcttttctaaagggaggcataaaattcttttgataacaatcaatggagaaattacggtggagatgatgtatggtttacttgacatataattagaacagattagaaatttctacttcttccttttttttttaagtgtactaaaaataggcgaccattttttacagtcagtcagttcataagactgacacgcaaaataagatggtatagacatcagttataaacggtcagtaaccgttaacacttacttataccatcctatgtttacagaagtcgatgatcagataaattttgtacatttgagctccctggtgagaccgagaatgtcggagcatctcttttaccttttccatcttctgctatggaaatcggcaccggcaaggcggtctcatggtcgccggcggtgaattgaagcccttcgctttcttgctgaaaatgaaataatattctcaatcaaagattttttatttttatattaagaataaaaaagttagaaattttaatctcatgtatcaatgaccatagtagtactcatggacttaataaactttagatggttggcaatttttctatatgtatatatatgtttatatttataataatgacttctttattatacgacaacgccatgaaatgaattgatagtttctaaatacttgtaaatatatatatatatatatatatatatatattaattaatagatagatagatctagagatcataatattcatgtgtatgtgccacagaaaaaaaaaaaaatcatgtgtgtacgtgtgccagttctgcaagtatatgtgtcatgatttaattggtatatatacgagtcgaatattgtttttaaaaagatagatatgacaatggatggtgattggaaatcatttttgtttgtgttctatatatagtatcttacgcatgattacttgttttcctttttcatttttgaaatggctttgattatactttcaaagaatttttaaagtgagtacatgtaaatctaaaagaaaaaaaaaagaaaaggaaaagaaaagaaagaaagaacgaaaatgctttgatcagaaaaatagttcacagacccctaatttataaaaataataataagtttacatggctaaatatttgatgtgatgatatttcttattaattgtatactcactacaaaaaactggtactttttatgtcaattttttagttacaacataaaatttttatgactaagggctcgtttggtacgccgtattgtattgtaatatattgagttgtattgtattgtattggattgtattgtataattttaatacaatattatgtttggcattgaattgtattagtgttgtgttaaattatacaatgtttggctcacattatattgtattgtatagtattaattaaaaattttgcaaaaaattcaaaaaaaaaaaaaattataaaaaaaattcaaataaaaactgaaaaaaaaa

SEQ ID NO: 297286 - DNA, 3797 bp, Cannabis indica
ataatcaactacctttgatgaagaacaacaacaatatgataactccatccatgagcagccttgaggcacttctctccaagcttccctcggtggtgccgcccccggcgccacctcatatggcggcgcattcagccgggtgcttctctaatgatcttcttcaaaggagtactaatttggagtttgttgctaagaatgaagttgatcatgatgatgataataataataataataataataatgaccaagatcaacaacaatatcatttccatcatcacaacaatttatatagtcagaagtagtgattaataattaaataattatattaattattattagcagtttgatgattatttctaacgttgttgggaaattaattaattagcttaatttccttatctaatactatatatatatagattaattagtttcttttctctagatctctttatattatataatttagatttatatatatacaattatatatattgtgttagaagggtcttcttcttcttattattattattattccttagtacttgttattattgttatgctatcctgactatttataaatggatctcaggctcagttgctataaaaactgacacatatatactacatactatatctttgtatgtatgtaaatatacatatatacatgcatgcagggttgaaaagatccaatggaacttgacatatatatatatatatatatatacacacttgcactattaatgtttataataattctagtgtaacttttcgttagtttaattccttaattatctattaatcacttgattttatactatcaaaatatagtggaaagaattaaagaaaaagaattattttctagccaagagcaataattgggagtatgaactaactaatgatcgaacgaactcatgaatagcagaaggacagaattgttgttggcttaattatattaattttttcgacaaaaaatcatagattatatataaaataatgtgaatgtatatatagacatctgtttttagtcttttaataaaataaaatagcagtagagagataatttatcaataaacaaaagatgatgtatagagatagatttgataggcctcattttcaagcaaacagctactttatcacacaaaagtcttttttaagttaattttaggtaaacccaagaaaactaggtaacactcctggctaccacattcttagatatagatacatatattgtatatatacattgatctttatactgtgtagtacacttagttagtccacaggcatagactgatttcaagaaaatatattactttacttttactctttttcgggacttgtgtgttaagtagttagttatactagtaagaatatagtcaaacaattctcaaaatcttatgaaaatacacttggggataagaacctgcattatctcaaaatacaagtttttcgatatttgtaaaaacttattgatttcgtcaaaagaaagtacttaaatatcattgtgcaaataattttaaattctaaagttgattacatatttgaccattattattatttggttggttatagtagtcgatattctacaagaaaatcatgttaaaaaggaaaatttgaatttattaaacttgatttgcttgatgttttcttagtacatacctaatacaaacaaagttaacaatcacaaaaataaaattggtatggaaaaaataaatgagaggttttataatggcaaagctatgtggaagaaaaagaagataacttgctctctatttttaattgggcagagtagtatttagacaacctcagaaataaatattggaaattaaatagcaattacacagtacagacataagaaaaagtttacaatcactgttctgaaagaagaaaaatttgaagagaaacaacctcgttagtttcaccttttggatgtgtatttgaattcattcatatacctcttttgagttaaaatcttagtggaaaagatcagtttcttccttgaagtgtttgagtaagccttcaatgctttttacagagtgatctgatttatccctcactcgtacactcacctgaaacaatgtcgatccgatttgagtgagtaaatatcagaagaaaatgatagggaaatgaggtgaaagaagaatttacaatcataattagaattagaattttaatctagaactacaagcctcttaaacacaaaaatggaaaaaccttcaagaaacttggtccgaaacttggttcaaattctatctagatatgcaccaaaacaacttaaacaaatgttagcaatactctcatgtgtcaatgctggatgtgtggattttacgataaagggcttgaagaaagcgaaacggacaaaaagctagaattcaactcagtttgtgttaaaagtataagcaagtaccacaaataatttaaataattaatgagaacagcaataaaaggtacataaacagataatttgagaagaagaaaacctgtccagtgttggcttcctcctcaccgacaaccaatatatagttgtactgcgccaattgggcttctcgtacctgcgataatcaatgtcatcagtaaataaactaaaccaatcagagaaagcagcaaatgacaccactcctggacattgtgtcacattttcatttttcaaagacactcatgaaagaacaatacaaatatatagcacttcctcatcaaccattcagcttcaactcaaatcatttataggtggtaaggcctgatttatgcaacaatgtacaatgcaaggacaatattgtagtaaacacaatccctacatttgacagttgtaaatattgctagtttcaaaatgttttaattgataacgttcactcaaggacacatcacgccactcccatgagcaaaaatagtgtaaatgaacaatttggcattaaagtaacagccaagtaattaatatattttccttacagttcatatcacagaaaaataataaatgcagaatgaaaaattggttgaaaattggtatgggattttaaatctatacctttttctggatctttctgtcagttgtatcaacatcgacataataaccagcatcatgaatctgatctcttacctagaattatgcaaaagaacaaaatcaacattacatttattgtgaaagtacaacgaaacaaattattcaagcttaagatcatattgcaagaaattttcagagctaaagcttcaaagttagacaaccgttaaactaggaattgattctaactcacagataacttaggtccaacagaacacagttagaggttagcaacccaaatcaagacacctagctaggttcacaattgactaacaagaaacttcatactcaaggctaaatcaagcaacctactcggcccagctcagatcatgaacttagtcagttaaataattctgtttccacgtaggcgttcagcgttaacagcaaaaagttttcatcttaagaaactcaaaatttgaaagtcaaaatttatttcttctacaataggatccagccaatggaggccacaagccatacaaccaaaatacctttaatgcatatggctgagatttttctgacacaggacaaacaattgcctgacgtgggctaagccaaaatggccattttcctttgtagtgctccagcagtatagcaaacatccgctcaacagaacctaaaattgctctgtgtatcataactggtacttccctttttgcttcatcctctgcagagtaatagagctcaaaacgagcaggtagctggaaatcaagctgcaaccacacaaattatcaattatgattccatccac

SEQ ID NO: 297287 - DNA, 2932 bp, Cannabis indica
agcaaatggtgggcagcatcctgcaaaaggaacaagacaaatgtctgaatctttccttatttacttttgtaaacaagtttatgaacatgaactaacatgagctctctttctttttattacagccatgcaaaggggcaccaacggtaaggatctttctcttagttataattgtagattcaatgataaacagtaaaaataaagagtttgattttgcaggcattaactatagattcaagcaatggtataaaggtaaaaggtctcaccatacagaacagccaacagatgaattttgtcattgctcggtccaatgttgtgcgaattactggtgtaaaagttacagctccaggagacagtcccaacactgatggaatacatatcactcaatcaactaatgtggttctacaagacagcagaatcggaacaggtttaattaaatttcattacacatatcctaagtgtgttttctacggggtttttattggaatttgatttcaggggatgattgtgtctcaattgtcaatgctagctccaacatcaagatgaagagaatctattgtggaccaggacatgggataaggtatcatcgacccttgagttacacttttttcaatccttcttagacatttgatttctaaaaatcaagaacaatgatcagtcatgatcatggacagtgtaaataagtaattctaaaacttcttttttcttttggtgcaaattaaaactctactacaaagcattggaagtcttggaaaggacaattccataggcatagttactcgagtggtcttggatacggcagttctcaaggaaactactaatggtctcaggatcaagacttggcaggtacattctcttacagtaacacctatgagttctcaaagaaattgagagaaacaaaatctcttatatgtgtttgttcctttctttgtggggttttatgtgcagggaggttctggttatgttcaagctgtacgtttccaaaatgtgaagatgatagatgtagccaaccccattattattgaccagttctactgtgattctccaaaaagttgtgaaaaccaggtaggtatcccggacccctccctcctccaagtttcttgtttttaccatattatgcactcaaattcttataacaacactcgagctgtcttttatttacttgatttgccagacttctgcagtgagcataagcaagatcatctacaagaatataagtggaaccacaacgagcaaaaaggccatgaaattcgcttgcagcgatacagtcccatgcagcaacatagtcctgaggaatgttaacttagagaagaaagacgggacagtcgagacctattgcaactctgctcaaggctttggatacgggaatattcacccttcagctgactgccttagcactcatgatgacaagaaccttccaccgatcaatcagaatgatatcgtccacactgaactctgataacattggtttgcctagaggcatatacaaatacaatgtatatacttaaattatacaaaagctgcagagtgatctctagtaaggtttcttggtgggggtttgagatgatcaagctaaattttatgggattttcagaggtagattatacctaatgaaatttaaatgtgtttaaactatacaaaagtgaaagcaaaggtatcaggcccattgatttgataattgatacaatatttttggcccaatatcatataatatatactgcctacctcacaaattcacaatgagaatgcataaaagttccagactcaataacccaaaaaatttataaatggctttctttcaagtttaaagactctgcaattgcaacaattacacaaccatcccatttgacttgtcacttgtgtatataatataatacacaactgactagcataccgaatctaatgacagggaaagagagaaagagatacaattcaagctctgttactaaatccaaataagagagagatagaaacatatattacaagaatgaaatacatacgttggattgggttacagggtcaaaattaaatttgaatcatggaaagtgaagcccatggtttaaagtgaaatcaaacctgattgtcagtatcaacaatgtcagagcctggtgatgcttagtccaacacatccaaagaaacatattttcggatcatatggaacattctgcgattcatgggagcaattgacttctgtcgctcttgaccaaaccccattattgaatatgtgaaataaaacgctaatgaaattcgcaattaatataacgaaataattattatacgattaggaagatgaagatttaagggcttcagactcaatattactgtaaatctttgaaaagcgaccagttgttttgggttttggtttggaggttttctttcgtagaccgaaaatttcttgtaccaatggaacgtgaaccagaactagcttccatgccaagaaccaccctgcaaattcacatgtatataaatttgattttgatcgggagagagttgaattgagttggaaaagtcagaataattgcttaccgagaataatcaaggaaagaacaaatgcaatagcgagaaatgggcgtagaaggagaaggttgagagaggcccaaacagaaagagaaaactcagaagacgacgacacaacctccattgatgatttctccacgtttctacggaaagaaaacgtctttaactcttttatatgctgtttttgtaatttcttaaacagtgatatcttaaaatcgcaaaaactatactgtaaaaatatggtatggtccttgagcggtttaatattattattatcaaatattataataaaattttaaaaattcatctataaaattttaatatttattaaaattttaacatatactattcgtcaaattattacattgaattatctctaaaaaaaaataatgtaatatatacatacatataatacata

SEQ ID NO: 297288 - DNA, 2116 bp, Cannabis indica
ttttttttctcaaattttaactactaaaattattgaattcaaagttttaataaaattatgtgaagcacctgttagtaaagttaaataatttttttatctaataattttaatagtttcaaaaaaaatttaatattcaaaatattcaaaagacaccatttaataagtgtagagcctagaggtacaagtcctaagaagtattttctttatatatataaaatgaagtgatattgtaatttaatattattattattattattattagggtaaatattattttaaactttatgtttttcaaaagttactaattagattatttgttttgttaaatgataaaatagaccttatattttctaaaataataaaaataggaccgtgtttaatataactaattttaagataatttttcacacaagcagatatagataatgtaaccagttttatcataacatctttaaatcagattattattaagttttattttgacaaaaaatcagttcagaatcttatataattttaaaaaaatacagagtcaattttatcatttaacaaaataaataatttaatttataacttttgcaaaacacgaagtacaaaatgttaaagggcaccagtggtgtctagcactctcctatatgtcaatatcgttattggtctaactaagtatcgggtcccatataatttaatataataacttataaagagtatcgctaactaatcgtaacgcgacatgtcgagaaggtattaaacaacactggtacctaatagcaatgctacgtgaagaatgatgaatatggttttaggtagcaatggtcacaacacaactttccataaataaatgtagagcttattaccaatagaagaagccactctctctgtttttgcggcctaatctgacacatacatgcctcattacgggtgcatcttgggaccaactttctcatatttatttattactccttttcttttcttttcttttctcacccacaaaacaaattattattattatggtccattttggttgggatataattattttctaatcttttctgttaaattggttttatttcttttcatttaaaatatatataaaaataaacccatgtgatgaacttaaaagtgaagactttagagaacaaggggacaaattttgaggtttctactaaaattaaacatgattttgttaatgggctcattaaaaaaatgatataaattgtctgttatgttatttttttttctaaaaaatcaaaatagtaactttatttttatctctagtaaatatacattggtgaacttttttttttcttttctaagttaatggaaattgaggtgatagataaaagacaatagaaaagggaaaagttcaagagaaaacagtgtcatgagtactgaaatggctagagaggtcacacacacacagtcacagatgatgattttattatgttatttaatattagcttttgattttctgggcagagaacatataacatctacaaatctttgtacaccattgacagacagtgatatgcagagttagaataaattttacttggactgcagactgtaaaaagcctgaaaagtgtttggtggggttttgggttttgactttgctacagcttctttctttttttttttatttcttcagatctttgaaattctctttctttttttataagtagttttgtttttagaaaaaaaaataatataatatatttatatttcatctccctaaactttatatgttttagtaaattagtccccaaatatttaaattttaacaggttggtccctaaactaaatttttggacaaataagtactcaaacttttagttatttgacaagattaagtcttcactatgaaatgatagtagttttgttggcttttactatttattttagactttttttttggttttaatttcaagtatttttttaaaattttaattttagtacttttattaaaaaaaaaagtaatgtatagtaatgcatatatttttgtattttccaagtattcatataaaaatatataaatggctattcccccgaactttgacatgtattaaatcgtgccccctgaacttttttggccgttaaaaattccacccgaactattgagatt

SEQ ID NO: 297289 - DNA, 2585 bp, Cannabis indica
catcatgtaaatcctgaactaagttctcagtttgattcagcaactccttcagcttgtcaacttcagttttattggttatgaaagaagatattatgccgatagagataccgagacagaataacactgttccatccagcgagcctgaggaggagagagtaaacattgtcattaactttttcagaacaaaagaaactctggatttggatttagaaaagtgtagtgcagaatccagattgcattagcgagcaatttgattcatcgaaaagttggagaatgcaataggaattgtagggggtttgccagaaaagattttggatatgaaagcaaacaagcatggttttcactgaagatgctactgtatgcactaattaattgcctacatcattcaacaaagccacgcaacaggttttcactaaagcaaaaatctgtttttcttttgtggggtataaaaaagagctaaatgtttatatatgaatgtgactagacaccaaagtccatatcatacttttcaatgaaatttaattaggatatgactctatagttctcctaatcaagaaaacagattctaaggatttaaggagacaagacaatgatcataaactttgtaataagaaaacaaaatagaaaacattcgcttctttatcattatttagaaattaagtaataaaaaagaaagaaaaaaaaaaagaagaaaatcataccaccttgagaatggaagccttttccattggaaaatttactggaactgcacaactttctattctgtccctttcctgtcttagatttcgtcttctttgagtgagacatagacccaacttttggtagtggtggaaccccaaaaactttttcattcttttctaaacatgctttggttccagtttggggcatattgtatgcactgcccatgacacggcttccatcagtcacaaacaatgtcctcctagctggtgttgatggtgatcgaacagaattaagcacatactctttcatttgagcatgttcattgtataattgagccataaggcaactctccaaggaattcattggtttaaccaaatggccacgatagcgtttatttctaattgagcttatgttctttattatggaatccatttcttcagcggaatgttttggtgatagtgatacatcataacaattatcactaacatcataatcaccaagtaaccgatttcctccttcttcatgctgtttaaggttttcatccccaaaatttaccgcctgcaaatttaatacagaaagtacatccaaatcttggtaacttgttaagcttccaagcttttcactgctcccactagtagaagcaacttcagttcctgaagcatcatccagtggggaaatatctgtaagtatattttcaatttcaaatgtcttatctttagcagcattgcctggtaattttgatctgtgtttcaaaatgcggaaggggccacccgagaattcagttttcttataatcagaatttccatttgacaattgtaacaacttatccctatctttgggaatgttctgccaatacttggccaaatatccagcaccagcagcagctgcaacaagccaaaaatccatttttgatcccccttccacaggaaaaacattaccctaactccaatatttcatctttatttcaattctcagccctctccaagaaatgccttagtttggaatccaaaaccctcttaaaattttggggttataaataatagcgaaatgtaaactttagttgaaaccatttccttggattgaatgtaagaatcataagaagaaaaaaaacatacgttccccagcctcaaattagcttttgaactctcaaagatacaaaactcctcagaggtggattaggaattaatgtcaaaatctttcgctaaaagtcagagaccaatctctcggtccccaaaacgattatcaatcaagtatacacgaaaacagatacatcacaacacaagtgtccccaagtgaacgagttgtggtaaaatataaaaaagactaagctctacccagatgataacaatcttgaaactttaaaaaccatcaaagattaagctccatacctcaaaagccaccatcccagaaccactatagttaaacaagaagggaatgaataatccagctatacccttttggtaaaagactttgggctccgaaacgcatcaatggacacaactcatttgagatattagcacatacccagtcaagcaacataaatgagaagaaaaacaagtaagaaaataaataaaataaaaaatggctatttatgtttaggagtttgtgtttatgaggcaaatataaaagatacccaatttcctaaatcttaaatggactgtcttaggaggaaaaggagaggacccgaccaccctcacaatgttatctaaacgaacaccccacgagttcttcctcttataaaagaggggtttttaaagtaagtaaaagaaaggaaaagggagttttgcaatgtttatttcaattaactattttttcggtagagaatttttcccatttctctttcaagtgatgtacttgtgtgaagtggtatggttttctttctttctattttttttatttttttt

SEQ ID NO: 297290 - DNA, 11252 bp, Cannabis indica
aaacacagtatttttttaaaaaaaagctacctcaataataaaaaaatgaaaattttagtatgtaatgtaaaaacccctaaaattttatgctcaagtaatagcattgaaatattttttttgctagacagttaaagtatgggtaccacaacatgtggccataccttccacaaaatctagctttaagtggttttaacactttcagtttcagtttgccctacaacattataaaaaacaaaaacaaaaatagtatgaaaactacttagtaaatcttaaaaaaaaaatactgctgaaatgccaatttagaagaattttgttgattgaaagatattgcccaattatgagagcgtctaatagcacaactaaattatctcactcattctgtctagcccactcttctctctcttgaaactttgattggtttcctatgatggttaatattatcttgaaccttgacagcaaaaagatcaactgcaccattctttccccaaagctttaattgcgtagtaatagaacatacacacaaataaaagtggagaaacatagtagtaaagatataaaaatggatttagatatagattaaagagagaagcttaaatatatacactaaaacattaactctgtatttttaaatatatatactaactctctagtgataatgttaattctccttgttgttgagatgatggtgattatgatttcttcttcataactattgcatttaatttttctactattgttttgaaaatgaaaatagagaaaagagtattaaaggattaaaaagtagagaaagtggttgtgaggatatcaaatagagatgagtatatttatagagaaatttttgcgttctagttttttttttttttttaatgaaatatcaatttattgaattaaaagcattacaagagagttttaaatcagctcaaacattatgttggaaaatgctacaactagagaaaaatcgaacatgcctagcaataacaggagacaataattcacgacaatcctgataatgaagacaaaaatggaagacatcccctgcttttttatgcaaggtttatatgagttctggcaagatttcatggagttttttttgacgatggagttctttgcgattgtcgaaggtctgggttttaggtttagttttaatgtattttctataattgtttgtgtgtaattgcagtaatagtcgaatggctgctattttgtacaatgtttaagctggtttttaggtttagttttgatcctgtgaatcacgcgccacattcctgggtttaaggagaactctgttcttagtttcaaccataaaaataggatattgcattatgaagataataacgtgtcacggaatattcttcaatccacgttatttttggaaaatttctcaatgagacggatatttaacagtaactgtcatatgccacgtgtattataggacacgcacatgccttcgataccacatgtctagttccacgtgtcagttatttagagagacacttgcctgcgtccaaaaccataactgtaaaccgtttagaattccctcgctttttcgactttccaaattgcaacgtccttcttcttcctatactcaagctacgcaccctggcggcgcatgttatccaaccccacggtgcgcacattagcaaaagcctccctctcctcagatcccggtactccgttctaccctccatgtcctccgcatctgtacaaccaggacggattagaattctgaaaaaagggtctcaaccgtctaatggaaatgcgggtcccgtggtttactggatgtttagagatcaacggctgagagacaattgggctttgatccacgccgttgatcaggccaacaaggccaatgtccctattgcggtggctttcaatctgtttgatcagtttttgggcgccaaggctcgacatttagggtttatgcttaggggtttgaaacaattaaatcatgttatggaagaaaattatcaaatcccgttcttcttgtttttggttagtcaaaatttaaaattttcgaacacccatatcttgctttttctgattgtaatttattctgtttgtattttaagattaaaatatgtgctatatattagtgagaaaataaagcattttaattaaaatgtagggagaagctgaagaaactataccgaatttcttgagagaatgtggggcttcccttctagttacagatttttctccgttgagaaaagttagaaattgtaaagaggaaatttgcagaagggttggtgagtctgtgactgtacatgaagttgatgctcataatgtggtgcccacttgggtggcatctgagaaattggagtatggagctaggactataaggactaagataaataaaaagctatctgagtaccttattgattttcctatactgaagccacctactagaaaatggggtcttcttaatcaagtgaccgactgggatgtaatcattgctgaggttttgaggttagatgcctttgttgtattggtaagttcaaacagaaatatgtgaagttattttctaaatgttgtttttgtttctaactaggaaaggagcagaagttcctgaaatttcatggtgtgaaccaggagaacaagcagcaatggaagttttgatgggtagtaagaatggctttttgacaaaacggttgaagaattattctactgacaggaataatccattgaagcctggagcgctttccggtctttctccctatttacattttggccaaatttctgcacaaaggtgtgccttagaagcacgtgctgttaggaaagcttctcctgaggttagtgatgttcagttaatagcaattgttctggtactttaaggctacttatatgtttttccttcatctgcttgctatttaaggcagtcgattcatttttggaggagctgatagtgcggagggaacttgctgataacttctgcttctaccagccccattatgattcgctacaaggagcatgggattgggcacggaagactctgatggatcatgcttccgataagcgagaacttctttacacgtaagcaatctttagttgttgtttcttgtttttgtttgccactaatatttgttccaagactagtattttttcaaagtcattgagcaacttttactttgcaggagagagcaactagagaaggcacaaactgctgatcctgtaagtcattattactatttttattttacttattagcctcctgttttcaggttttgaccattgtataatgagattcaccattggcgttatggtggtaaattacttttttaatcatattgttacttgtttgacctgaatatgccctctaccattcagctctggaatgcttctcagctggagatggtccactatggaaagatgcatgggtttatgaggcaagttaactttggatagagatatatatttcatagttttctgccttgtaagctattgccttgccattgtgatcgtagctttaatagtagtcaatcaactatataatagatttatattgcagtgcattcgttgttttggaaagagaatcagatatttgagcatcctaaaattcttgggtgattttttctctcttgaaggatgcttttatcatcttctatcttatctaactttggagtttttcttttgtgcaggatgtattgggcaaagaagattcttgagtggacaaaaggacctgaagaagcccttgagatatctatctttttgaatgacaaggtagttcaactattattctgcaatgttatttccatggtggttgtgacatggttacttattagcttagctttctatggcggccaataattgaaccatttcgttatggaagggccaagttaagagagaatactaggaaaactctctatattagggatcacagcatgaaaatgttgttgtttttgtaacaagaaagttcaagccgagcaggactatgagttttgaagcagtcaaataaagaactgtaaatagtgaaattaagagattacaatttacttatcaaaaaaaaaagagattacattattaccatgatgtcttaaaagaatatagaatatgttatatggttcctttaaattcagagttttgtttgcagtattcaatagatggaagggatccaaatggatacgtaggttgcatgtggtcaatatgtggcattcatgaccaggtttgtttgtgttcgtttgttttacttttctttcatattcctgttttttattgacattattaagatcagcttctcttgagcaaatattgttttttcttggcaattcagggttggcgggaacggccagttttcggtaagatacgttacatgaactatgcagggtgcaaaaggaaatttgatgtggatggttacattaactatgtgaagaaatttgtgagtgaaatgaagaaaagaaaagcagagaaccagctctgtggaaagccaaaagaacttcgcagttaacattttagacctctctaatctaaaggctctaactgacagagtaaacttccgagttagcattttagaccaatttaatccaaagtcaaaggaatttttctgtacttttcagaacagaattgttaggaagcctctttttttaaaagaaattgtaccaatctgtagttttttcagtgcgagagatttcaaaccatggggttcttttaaatgtacttttgattatagaatatacaagtgtcgttatataatctgtttcttttctatatgataggattcatttacaagaatgtaaacagaatcatattcgtagtaattcaagctgcaaaatatctggttaggtgatgtaaaaaaaacagctgattgacttcatgaatttttatagctttcttatgaaatggaataatagtggagtaatgctataaattatctaaaagaagaaacgatttacaatttactctacaattattttgtctgatgctttgcccgtccgcgcccttttggctcaaagaattagaattgatgaggtgtcgagccctttgtgtggggttgaggaggaatcgatggaacacttttttctctattgtaactttgcctaccatctttggcgttcttcccaaggggagtcaatccggttcgtgaatcgggtgcccgggtttgagattgggtaacctttctttggaatttgaagtcgagtggggtggattctgtaaagcttttcctgtatgcatcaatcactacaatttggaagacccggaacgacaagattcgcaacgcctccttgagtaatattaattttgctattgattctatctctttgtgttattcagattatgcgtcttgtttatgtgcgccggcgttggctgtaacactccagtttggtcttctcttccagatgattagatcaagatcaactgtgacgttaaggttggttgttattccatgtgcgtgacagctttggctggggaccacacggggacagttttgtgggtagcagctaacatgctcaacttctctgatccactgattggcgaaactgcgacatgtcgcttaactttagatacaacagtttcgatgcgacacctttattttggtggagagtgattctgagctagttaccaaggcattgaaaggaaccttgtcctgttagagcattgataattatattattacttataattaactctctaaacactttatgctataatttttcgtttatttttagatgtaagttcacggcccataatgtgactaactagacttttgctcagaatatttcgagtatggtggatccctcctctataccggaacttatcttttgtaatgaccgcgaggtctaaccttttccaattatataaaaaacgtactatcaaaaaaaaagaagaattgcttgatataataaaatgtaatcacaggtccttgaaaaagaagataaagttggtcaatggccttttgaatcaatcagtgtaagttaaatatttatggacacttttggtatcacacacccactgatattggcgcatgtcaaatataatacagagcccaggaactgagccagggttgagggctcattcagaaaaatgtaccaacatagtacgagccaacagaacaaatctcaagaatatactttttatgtcgaagtgcttaaaaaaaattgctacaatgaagagctgttagttttctatgattacaaattgcaccagaactccccaatagaataactcttttccagcttcaccccaattcaaaacataaaacctcagatctgtagatcatccagagatagttcgtttactgtcaacatcttcaatttctgcatattaatacaaaaccaaggctataaggagttgttgattggagcacaggtgaaacagattctgttgagagtaataatgaagcgagtgcaattgaaatatgaaaaatacaacttactgttaaaaattgaggaggatcatctatgcttgaagaacctagaacgacttctctcttcaacttatttgtaagcttgtggcaaacccttagctgaaaatgaatgatactttgtaagacctaagaagcgttgaagaaagcctatagcatgttatattgaggaatgtgaattgaatgcttgttttacctctgatcgagtagcaccaccgacaataaatacaaaaatacgttggcccatcttcttgaaatcactggatgcatgtctaagtactgagtcgctataaaagcagaagacaaacaatataattcatggatcgtggttaccaaggtgaaaaactcaaaataatcaagtaggcggaatagatgaacccagtcagaatgcttcataaaaacagcaactgtaccttgaataaccatcatcagagttccgaggccgagcccatgttgctgtccgtcttgatctcattgaatgagcaactactggttgttgtattgatgaactgtgagatgatccatggaaagttggacttgggtcatttaaacatgggtaatcttcttttgacagttcttttttgccgagtttttcaataagctcctggaagaaaggaatttagagctagtactccataatgttagttactcagagttacttctacaaaaattatgtacctctattatgggatagaaacgtgaaagctgccatgttttttcttcttcacctgtgcgatctttcctacctacgggcttcttctgaaaataatttttagaaaatggttgcatatcagagacacgtttactgaccagaaatgcatttaatagtacaaggatattataataaccttatgcatgtcaaacttcaaagagaaaggactcattgagcttttcttggtatctgtcgatcctccaagaagcttcaaattatgcacagcattcatatcttcaggtggtaattttgccagctaaaaccggaaaaaaaatgcaaaacatcagtgttaataatgataatccaccaaaaaaaaacagctgatgacaagcaaaaaaagaatccaaccttcatcaaattgacacctttctcaccctcgaatttttctggataaatggctgctagaatcatcaataagcgcaacttattttcacgtgttgtgtcctgcagaaaatcagacaacctgtttcattatagatcttgataactagtgttgataacccatgtatatttctacaacttcttacatccttcgtagtcaaatatttgatgacatctttcattcctgcatctccaaaaacaagatcctgctctagctgtccaagctctataagtccaacttccctgataagcttgtttaattttccggcaatctgatataatgtaacaaaacatgtaaaagtttgaattatatcacagaataaaacttataaataagactatctcttccaatgacggaaagactaacctctacatgaagggagagcttgtcaatttgttcactatattgtggtaacgcttgaaccatcttttgcaagtcccgtgtagaaagttcacctccatctctacacaccagatgatctaatatgagagacatattaagcaaaaagaccaaacaacacccataaatttgtatctgctgtcatgtttaaactgtcaataaacagaacacttgcttattacaagcagtcaatgacagctcaatgagtgcagatataagtttaagaggcttagtgtgatcactcagaaactacacaagcattcctgggggagggaggcaatggtttcagaaacaaatttttcattaaatccacactaccttgaaccatggtgcatttgtgcagccttattctttgacacgaagttggtcattttctcatgcaaccgttcactagcctggcagatcactggtgatcaaatagtgtatattttaaaattaattacaatactaataaagcacggaacatacatcggctatatgtgcatgccgaagctcaagccatataggatcatgatcctctaaaagaacctctttcttctcgggtagaccaccagctttgccaggaacctgaaagtaatgcacctttagcaaatgtttctccagcgaactacattgaaggtttgatggtacacagtgatgtttcaaaaacaaaactcacctcgtgcacatatttatttccttccatatttagtaaatcatgacacatagcatcataagtccattcatgtatgataggagcaatctgaaaattcagaaaaagtatatttcatcatgatatacgaacaaggtagcagcaagcataatgtgtattcctaaccaacacatgcacctaaaaacctgatctacagatctgtcgaggattagcaactcgcatgtttctgtctctggaaaattgggaattgttttcttatattttgtgatacagtcccaaactccggcagcaagctttgtaggaattaaatcacgaaaagtagtcatagtagttgcatcaagggacttggcagctcggtagcgcacattaggatattcctggaaagtcgcatatataaaatgcttaagatattgtgccttgatgttcaagcaaaatttaaaaattatgatgtgaataaatatatataccctcaaagaagcaaaaacagtggcaatacgagtcgccatcacattaaggcaagcaacggccttccgtgtatcctcctcatccccaaatagttcctctaaggccctctcattgttagtgatgaaaccctgaacaacaaaaagaaaaattagggaaaaaaatggaagtgacatcagcatcaactgagaaaaaaacatgttcagcagtatgcataaaagcataatccactttttctattcccttgaacattttctacactttcttttcaaactaggctccatgcctaactttacaacatttggtagcaaaaaaaaacatttggggactgggaatttgctatgtaagtacccataagggactcgaacctcagaccatggaatggcctgatacaaacttacaaaattacgagtgttaaaattgtgcataatttaaatatgagtagtaaaattatcccagcagtttatagcaaaaaggctgaatgtaacactacatacctggctgtctatagcaaaatactccagattcatctgcaaattttaaaccaataattatctatatcataattttatgcaagtacagaaagaagtatactaaaatacgaaatcacaatttctgagtacttatcaatattcagacaataacattccaaataagagagcatttacctctctcaatgcacctatgcgaggtaaaacagttgcatccttcttgatatgagcaacaaattcttttggaataggtgaactgaaaaatacaaatgcccttcacacgaaaaaagagagagagtataaaggtcaaccatcagaacattaatatttaattacaggaataatactggaaggtcaaaaacagctgtaactagaaaaagaagaagaataaaaaaggcaataatcctttacatacttcctgtaaagtggagattttccagacatatctgacaagaacaagataacactgcagatgaacatgaaacaacgtgagaatgaaggaatatacatgcaatttcaccacagatagaaaatgaacacaaacctaatttgaagcaattttaactttataaaagtcattttcttgtttttatttggcctaaatactaacaatctactaaaagactgcattaaaaccgtgaactatgaaatttgagattcatccaagaattgaagaactgaagtcacacaaaacacattcctgaataacaactgaaaacaacatcaactaggcttactagaattttgtaataataataatgctcaaactaaaacatggttttacacgtcatactttgagattcatccaagatgtgaagaattggagccacagaaaacacattcatccacaagtcacaaccatgataaatgatgtcaactggcattactagaattacaaacatccatagaatttacaagaaaaaatagcttacttctctttggtaggctggatgaagtagatagcatccatagagggtaatggttgccttctcttgtacatatcttccaccactggcatatccaaaaagaaataaataaattgataagtgaaggagttataaaaaacgaccaccactgttaaactaaattcgtgttcctacacatctacttcttgtacattacataatcatatcctaaaagctaatactcataaatctgcacacttgctatgtactaatgcaatctaaaataatttagagataatgatacaatttctgacagccagagcaaaaatacttttaatttataatgacaatagaaataaccagtttgtcagagttaactagccaaacaattggctcttaacttttttgtcaatattttcaaaaggagagaagaagggagggggcatgcttaatatggaatctaaatctacagttaactatactcatatatgaattacccccactatatctagtaatattaatttctcaatacctacataataatttttaataaaaaactgcaataacacaatgtgacgtttataacaaaatgcactaccataagatgtattatatgtgcatcaactaaaacctcccaaaatagttcaacgcaagtactttgttgtgaccatacctcactaactggaatccaatagctcagtatcaacgaacaaccaagcatgaagaaatttggaaataaaagcattacaaaatctaagaagcactacaagagttgaatgtccaatgttcattaatacagttgtcagaacagtatcgaccaacaataatccccatgaaaatgacaatatggattgttcaacatgcataacaaaaaagaatatatgtaaatattta

SEQ ID NO: 297291 - DNA, 4987 bp, Cannabis indica
ggttgcatgttttaaatgtttatatgcatttttttttatttaagtcatttaaatgagcgattgcttttattttttttacaattttagccagcgtcatattccataaggttagaggagttaacattttatcagtgtttttgccttcactatttgagcatagtgacttgtgatcttctttttctctttacgacattagccatatttcgattctattagaaaccatttttgtgttccttggtgctggtgtcataattttaggactggtgttcttttcttattttttacaatcttggccagtgtcatattccttaaagattatactacccgaaaagagtttacaatttataacaattgttttccttcaatatataagcatatattctcctgtgacttgtgatcttccttctcctttctttccattaagagtaaaagttgactatattttgactctattagaaaccatttttccgttccttggtttgtggttatacttatactaaggatatgaataggctgcagaattcctggtagataagtttcaagattttgtttggcgctatgagggaataaaaacttaatattaaagtatttcttattgtatttgttgggttgcgtatgaggtttctgtcagcagaagattaaatcaaacaatgttttatgattaagcaaaatttgtgtagtactagtactattagtttgcccgtagagatgagtgtgccaaggtgtgatgacactaggataggtagtaaatgaaaatgaaaagaaaattccatactattactaatcaagtagaagaaggtaaggtaggaagtggagttggcggggtgagacgagtaaggtggaaaggggtaggagccggccagccgcctttagataaggtgacctccaattccactgaggcaatccgacgaaaattaacaacatcatctcttttgactacgtccaatatttcttctaccgttccttttctaaggttgtaatgaaaaactcgtctatacacgtctgaagaggtgaacacaacgtcgccattctctggatgaaaacacacgaactctacgtccttcaccgatgttttcccttcctcttccctactgctgtaactgtaactcctctcgtgcaccaaactccaagacaaccccttcttccgctccttactttcccaaactttccacgattgttcctgcttatttctatcgtgatctaccttaactatccgtagacgaccctcactcactcccaggaagggatcgggtgtggttctggcgccaatgtctttggggaggtaaagatgttgacgtctgccgccgaggccgacatccggttcgaaggcaaagagaatgaggcctttagaagaaatctgaagccaataaaatttcccgttggagaaaacgacctcgtctctatatgtgctacgaatacgctttagtgatgagtgctgctttgatcgtctccattctccagtctccgaacgaaaaatggccacaatgtagtgaaaaggttcagcttcgcttcttctgagcatatcttgaacaagcaaaaccttgaacttgaataatttgttcttcttatcttcctcgcatgacaatccatatctaccacagatggatggtaatgggggcttgggaagaaggaaccattgttgggtaaacgggttgcagatatacaagtttgtaggagtactatcggttgtcacaagtaataaatcgttgaaagaagcttctacagtcattgatcctggctcaggaataaaattaaaataactcttaaacgacgacagtggttttcggtcaacaataggaggacggggcctcataattcttcgtgtattcatggacgaatccacctgaatcaagagcgttgtagcagaacgtattctgcgaacaaattcatcactcagtatcagaccacgccagcgtttgcagacgaggctgcattggatagtggttaaccgctgatcggagaatcgtatcagtatttcgaagagtaaatcatcacttatgccgtccataattttaaaattagatgcaccaccatcattctcctcctcaatcatcttaagtttccgatttggtgggtagctagaatccccgtccacgattagggtaatatcaaatactcatgacctaactcctttatttatatttatattttttaaaaaataaaaatatcaaataacgaatctatacgcttttggtattttcaaataaagatattgttattatttgttttttatttttctttagtacacgtagacacgtagttatccatagtatcaaccaattccaatgacatttagtgacaaagaaagagaaagtaaaaaagtttgttgtttggtatgtgcgggaactatccataatccatcctctgaatttccaggtatctattgctttcttttgctttgtatatttttccctattttaatgtttatcgcaaaggttaatacttgtatgttcctttgtaaactcatcattaataaatggttctaattttctgatcgaaacataaattaatgagtctttggattagttctaaaaaaactttgacacttccgtcttattgattatttttttttcgcttcttttcattttgtgtagcgattctgggaatttgtggatcattcacgtttacaatattactgttaatgctagtgggtatttgtcaggacagtcgtactaaaaccttcatcagttgtgcttgtgcatagcaattttgaatagaagtttattgagttagctaatggaatcagcttctttagggggagtatcagtaaatatggaaacccatgtcaaagatgagattcacaactgtgtgattaagctggtgattttttttaatctcagtacagttttaaatgaattggatctcatgttgaatgaagtgtaagttttttatgtctgggattgaactacagagagaaaatcccttgaaacgaagggacaaggtgtacattggctgcggagctggctttggaggtgacaggattttgggcgctcttaagttgcttcaaagagttgaagaactgaattatcttgtacttgaatgcctagcggagcgcacccttgctgatcggtatcaggttatggtgtcaggaggtgatggttacgattccaggagtaagtctatgctaattttagcagttatgatgtgtttttcttctgtaagttttgtctgttcttgaaaactgaaattgttatatttcatagaaaacatctaaatgaagacttcattccattgtgtaaaagtaggttggtctttttgaatgtttactctggtgtgctctattatacatggtcatactcttattcataactttaactagtcagctgtgtataggagagaaaaatttgaatcttgtatttccttgcaatgctataaacacgcattatttgggagttcttaaatgttagaatagtcaaggaatcttaataacttgtaaattgtgaaaataagagacattacgaactactgaaggagaacctgtttattagtaaactcctttcttttctatttccatgtttcaacaagtataaacagagattgacttgtctggtaatcctagatatctcttggttgtttgttgcaatgaatgtgtagtttccgagtggatgcatgtgcttttacctatagctatggaaagaggagtttgcataatcacaaacatgggtgcaagtaagattactaaataaaattttatgcaatcaacaaactttttttttcttaaaagaaatagagtttagataaatgttcttattattgtttctttttctgggcagtggatccatgtggtgcacaggagaaagttgtagaaatagccagcagcctgggactgaacgtatctgtgggtgttgcttatgaggtttttgtcagcaaaataggtatttgtagtcacttttaggaggatgaattggagatgatacgattgagattttataaacactaaatgcttcacaacattcaattaaatcaaggattgttttatgatttaatcatgtctttattttaattggataaaacttagttctttatctgaccaaatgttgtctgtgtagggtcaggatcacctcatgaaaaatcacataacatggaaggtgtaaggctctactacctctaattgtaactttgattagtaaataatatttgcatctctgtagtttgatatcattgtgtgtagtctgtggtacactgatgtatgctcctcctcctgaagtatctatttttttgctgtaaattaagattgtaatccattaacaatttatactattttcatctttctgtgatcttttgagatgttggaccttacctttttagtataattggtgaagggtattagcacatatcttggagcagctcccattgttgaatgtttggaaaagcaccagcctaatgtagtaataacttcccgtgttgcagatgctgccctatttttggcgccaatggtatgcattttgcttgttcgaatacaaaattaaatattccgtagttattattttttttgaaggaattaattatccttttaagaaatttccaagttttgccgagtaagaaaagagtttttgttgtgttccatccaatcacattcattccagatattactcactgttttaaaaagcagtgtcacgttgctgtgtataatgttctggcgcgcatgcaatgtagcagtgtttcttcttttcttatacatctgtggaaaactctcactagaaattttgtaatattgggtagtgagatccatgaatgggtaattttatcaaaaaatttcgttccatctcttgattgtattgtaagcaacatagctagagttatgcttagtttctaaagaattcttctgctatatgaatagatatatgaactaggttggaactgggacagtttggaacttctagcacaggggtctctgtctggccatcttctagagtgtagttgtcaacttacagggggatacttcatgcatccaggtgacttgtgaacttagtttgatcgacctaaa

SEQ ID NO: 297292 - DNA, 3485 bp, Cannabis indica
ataattgtgagtagatctaagttcctggtaaaataacttccaacaattccatccgttgggcataagctgaagcgaggatatattactaaaggccaccatgccattaggaggtagatgagcgcgatccttgggcataggctcaaaaccctgcgctacggcatattggtgcactatcctcttgatgtcagaccatgtcattgtacttttgacgtcagacatctcatagggaatcgataagtcataagctgggacgggcacgctaggcttagtcaggcgatgtggtttctccatatccgcaaaatcgcaaaagagttagaacgagaagcgacacacttcatgttcttcattcgacgagcaagagccttttggcacgatctaggcctgaccaaagctccatcgcctaggtgaccttggatgacggtagatggtgaaaggtcataggaggagcagcctcctccacctgacttgtagaaaagtgacaccacggccgaaggcatgggagctaggcaggtgggagacagctcaggcggaaaaatttgctccaagtgagcaagtttcccgactatgtcaccatatagtcgcctgaggagggaaaggaaagcatccatgttgggatgcccttgacccttgaagaactcgatctcctccttaagcctagacaaacactcttgaaactcacaaatttcctctacacaagcccgtccgagtcaaacaaaagtttgatagtggtaactccctcaaggatgaaaggtggtctatacttttccataaaagaagaggaagaggcaaggacaaggttgatatgttactcaaagaaaaataaatgtgagcaccaacacccgctaaccgagcatgggaacacacctcacagtataactcactcacaaaagaaaggggcctccttaggcacatgcctggtcgcccgacacaatgaaaggaaagagaacacaaatgaatgggataactgggggactaaagactagcaaaacttgaacaagaattattacaagttagagtagcacctgcaagtgtagtaggtacacaaatataaaagacaaaaagtaatttgatggggatagaaggtatatatttggaataccataagtaaggagaagctcacaacgtcaagactccaaaaaagagcaaatgtcgaaaggcttaagatggaagaagaatttagaggaagcaaaaaactaaggaagatagaaaatgatgggaagtgaagatgagatgacaattggcaagagtgggagcctatctataagaaggggagatgaatgacaacaattggatcgaaatgagatcaaaggatggggttagtcacatgcacatataggaagtgacatgtgacccacctacctcattgaattgtctcatcaatattttagtagggtatgtcaagggttgcactagacgaggtgtgtcagaatgggcttaaagaacaacttagctgcaataaaaaagatcacttaaaagtgctattttggactagggcaagtgttaaccgtagaagttcaacaaaggagtgctcctatgagggaggaataatgcaaaattctcaagataagtaaaagagacaaagggcagtccccacctcttttgtcctcatctcctcatcacatctttgtatcctgtcagattcttccttcctctgcagctccacacacatcagcgtgcagctccagaaatagggaggctccacgctgccaactatttcacaaataaggaggatccatgctgccaggtgctccacaaacaaggaagctccacgcacaaggagggtcaacgctgccagtagctccacacacaaggaggctccaccttggcagctactccacacacaaggaagctccatgctggaagctgctccttgcacagggaggctccatgcttccagctgctccacacagaaggaggctccaccccataggggcgttcattgattggtttggtctggattttcatagtttttgaaccaaaccaatataacgttttttaaatattagaaaccaaagtagacccaaaaatttctcaaaccaaaccattaagaacggtttggtttggttcgaaaccacgatttaaatggaatttataattattcatattttttaagtagttgtactatttttactaagtttttaattttatttttcaaaatatatatttaacatgataagtaatagacctataacatataaataatgatataaaaaaattctcaattatgaaacataacataaaaattcaaaaattcatgcaataaaaaatttgacacataaaaaaattctaaattatacatatagtcatatataaatatatataaattaattatttattagaaacggtcctgtccggtttaactgttaattatttattttgaaccgcaactgaaccattacgcagtaaacggtccggattgaccaaaccaccaaaaatagtttgccagttacggtttacaatggttcggattgtagtggtcaagatttaaagcggttttctggtttacatgaacaaccctactacgcaacaactgctccatgcataaggaggctccacactaccagctgctccatgcacacgaaggctccatgctgccagctgctccacgcatagggaggctccgcagcatgcacatttgtagccccttagctccgacatacctagtctgttcatgccaatggaagtaaggataagatatcaaggctagggttggttaagccagggatcgcaggcaagatagaaatgatacaatgagtatcgatataggggacaaggtacattttatctgaggtacaagtaaaagaggaagtttttgtgtaacttaggatgtctaaaaacatcaagttacctgaaatactaggttatcttgtgtgaaagagacttgacatcctcaaacttagggatctgatgaggttgtaaactgtgaagaactcgctataaatagatccttggagctcattataaaggggactcccttagaaaaaaaatattaatgaaacagtagtttttctaagtagtgaagagggtaaaatttactttgtgtatacttctatttagatcttgaaatattatcttgagttcttagtatttaattgaagagttcttacaatcaatagtaacatatatacctattgatctagaattcttttccatcaaaaaattttaaatggcatgataacttataattaaattaccgaacacagggatagagtagcaagagtagccattgacactcattagatctaaaattttagtaattagcattgaaaaatcatttaagagatgaagggggtcgagtgtttggaaatatcttcagttttttctcttaaaaaataaaaacacgaagataaaaaaatctaaagattgctctcatcgctttaagctaggaatgtcaatctgggctattttcgcgggccgggccgggcccccggcccgacgggccgaccgtggcccgaattattcgggctcttatcgggcttctggcc

SEQ ID NO: 297293 - DNA, 2109 bp, Cannabis indica
aaaaataaaaaataaaatattacataaaataagtttttacatctttgtgattataataaactagattataaatttatcattatcattataatagattttaacaactcacagtactttaaaatttataatttaccaaacactcagcttagcttttgatccatagttctgttgcaactgttctttctcaccgtacaattataccaaaaggtcacgtcaaaaaagtataatagatatcgataaatttattcataaagatatgaaatttacactaagtctaacaacacaaataagtattgttcaaaaaggaaaaagaaataagtattttaaaactcaatttaaattatgtaaattttgtttttcgaataataaaagctttattaaatcaaatcttccaaaataatggaagaataacaagtgggtaaagagttcccactaagaacacgatcagcctcatgaagagaagcccgcaccaaaacatgtgcaaaaccattaacagactgtttaacaaaacaacattcaacatcaattaaagaggttaacaaccctctacaatcttgaattatgtaaattatttaagtattcataaatgtttcattcgagtttctgtttttcgacatgaatttaatctttatttttttgctgcaaatttaatccatttatttaaacattttttttaggtaaagggatttatttaaacatattactctgatattatatgttaaaaatgttggcttggaattcttatccttagcattcatcttaacttatatgaaaacataaatatgaattattacataaattttatttgttatcttggttttattttataatttagataaattagtagtatttttatatataaataaagataggtttcaacctccaactatattttacaagttggtatatcctaattaaaatgaagaactagtaattaaattttctacaaatgaaactcatgcttagtttaaaagggtcttcaactaaataggacgaaccaaaggttttagcgttggctccacagtgttatacttttcttctccagttcatacttcacacatatacaaattacaaaagtaaagtgatattgaaagccaatttttaattaatttcagatccaatactaataggaaaccattatcattatcattatgattaacgtaaaagtcgtggtacatgcaaattgagtagagaatgaaagagacactcacttttggttaagtgactaaaaaaaagtctgcatgtattgttgaattgtattattattattattattatccattattattatatccttctcaataaaaataataataataatgcactcatctatctagataatgatgtgtaatgtcaggtatctttttttgttatggccaaaaatccaaaataaaaagttttcttgtctttttgtggttaggctcctatggtgcaaataggagaattttgggtcataaaatagtactgattttttattactttttcatcttttctttttcattcatatatttgatgataataaactactttttagtttagcacattaacattttgctcataatattgaggtgacactatttaacatgacccaaaagggtccccattaaaccgtgtttgagaaacttcaattgaaacttgcacttcaatgtacttttgataaagaaatccagtaaattggcaatgacctctccacacttgatgacaatcagatacccagttccttttggagatttttttttattttttcttgggagattgatagatgcatttgataagacatgacgctttaaaagaaaaaataaataaatgtgattaatttgcacgaagaatggactatggagcaaggtttctttctgtatcaaaacaaatacatttcccatatgtctagaatcagaatatccattaacatattctactcacatagttgcttgaacaaaattattattgtaaaagcttgtggcaatatattataggctaattaggatctttatcctttagactttgacatgtaccaaatcatgtcattgaactttaaactattgagattgttggacttaaaaacttttgtctaatttcattcaattttactatttcagtgattgtttatgt

SEQ ID NO: 297294 - DNA, 2706 bp, Cannabis indica
ccttatctcatacaagtcaaggttcccaaagtgtatgaggtcatacaataaactttcttgagcattaaaaaattgagtcaatgcttgatcttcattatcttgctccacggccccatgggaagcaataggcaaaatagaattagaagaagcctccacgtgcccaatgatagcttgagatggattaattggcccaatgctattatcatttactcccaaagaatccggtcccattggcccatgattaatattagatacaacttgagtctccaccaaagtaggcccacatgaaataggattaatattaatgggggggggggggtccactaacattaatacccatattcatatcaagtatcattggcccactaattttgtccacaagattggagttcggcccactatccttcacgcacggcccaataagcccaacatctcttcttttatcaccaaaggaattaaaagtcaacttatctttatgtagataattaactccaaaatggtcagctcccaccttcggcccaccagcagaaacgggcttcacatgggcccgatccactaagatgttaccactatttttttcacataaattcaaatcaggcacaatcttcaaggaacggtcttctatagcttcagagataggttgttctataacaggtaacacttcagagaccttttccatttgagcaattccatcttcactttctctactcgatttggaagaaggaggtacaacaccagctggtttcaatttggagacccactccgatcgatgaacagtaccagtaccagcagacagagctccacgctttgtcaccatccctgaccgtgtcgagccacgagcaatggtggagaccgatcgcctgaagtcaccctcgccatggccgagagctaccaccttggacggacggcgaaatggagcataaagagcataaccagagttctcacggcatggagagaaagaattagcgctggagaagacatccctgtaggttgacgacgttgaaagccacggcccgaacagagggaaaggggtgccattgtcactggtcaccaactccggcgaggtaagcgtacaccctcttctttgatgtccgagacgtccacagaaatagcagaatattcctacttgttcatacttgaactggagccatctcttgactcccgaatccaagtcaaaaaaacaacccgaaaacagaggcgagttgaagtccttctcgatcaaaatcttgaggtatttcccccacgaggcaggatcattttctttcaaatccacatagacgactttccctgctgtaccaccaagtaataacccgttagccatagaaaaaaactcatgaggtatattatgtacctgaacccatatacgcattgtgtcactgagaaccggggaatccgaggttgaagaccaaacatggagaaaaaaggtgtagcctcggatacaccaagggccatggtccaatgcccagctcctgtcttcctcacgagaaaaccgtagctcgaaccagttggaatgattagagccctcagctaaggccaccacggacacaggaaacttccaagctttggccacaaattccataatattggcctcactcacagacatgggggccactacctttcccagcagacaaaaggtagatagagctttccgagaagattcgcaaggaaccaacttgaccaaagcatcattaacagaaaggcatttgcctttaagagggggggccaaagaagcatttactacctccataaatgccgacagcaacacgacaaaccaaaacaaaacaccacaaacaacaacaggtagaaaaaacaactaagacactcaaaactcttactacaaaacccctgagagaaccaaatggaagcagcacaccagaactaggacatggacaagtgaaactaaggacttaaccaccagaacaataaagagactttgaaaccaaagcaaaccaaagcaaatagacccaaacagaaaaacacacgcaagcaagaagcaaaaccaacaaaaaggactcacgaagcaacaaaaagcagaacactaaggaccctcagaccaggaagaaaagaattgagacacagcaagggatagagagagaacacagtagatgaccatgctctcttcgaacataaagttattaacacatatatatatatatacatatttatatatatatatattttgaagaaatgtttcattaaattaaaaatcaacaattacttaaaaattgatgacaaacatttatccaaatataatttttaataaaatttgtaacaaaagtggccaatccatgaccttctcttttacagaaggcaaaataacatagtaaaaatccccactaacaacaaataaaagactaacgatgacataaaaatgcattaaattaacacacgaatttgtaatccaaaaaatatccataaataaaacaattagtgataataatataatcaagtcataaaaaaaaaaaattgaaaaaagaaagaatgatggtgaagtcatttaaaaaattgttgactttgtattttttttttattcttttttaagaaaaaactaaatttagtgtcacactatcattaaatttggcgtcaaaaattatttctactctaaccacaacactaaaaattacactaaaaatattttttattattatattcattttttaataaaataaaaaataatatcatattaattaacaaaaattaccacaa

SEQ ID NO: 297295 - DNA, 3598 bp, Cannabis indica
agagagagagagagagtaaatgatgaatatgaactcctgtcataggtgtaggtagagggttagcattgtccattttggccttaagaagtaaatccatgatgtatttcttttgggacagatgcagcccttctttggtgtgagtcacttgtatgcccaagaagtagttgatagaaccgaaatcattcaaggcaaacatgaatttgaggttggaaacgagttttgtgaaaactgttgtggaacatccagttaccaagatgtcgtccacataaactagaagaaaagtggaatgagagcggttttgagtttgttgaacgaagccttgggtgcttgtctcaggccatagatggccttggtcaacttgcatactaagtggggatcttctgaatcaatgaaaccatgaggttgtgtcataaatatctcctctcgtagctccccatttaggaatgctttattcacatccaattgtcttttagactagttgtaagataacgcaattgtgagaacaatcttaacagtagcagtcttgacaactggactgtatttttctataaaataaaagtcatattactgaaggaaccctttggcaaccaacttagccttaaacttggtaacactgccatctgagttttttttttctttgtaaacccatttacagcctatagcttttctaccaggtggaagaggaaccttgatccaagttttcttttgagtgagggcttgatctctatttgcatagctgccagccacttagggtctttgagggcagcagcaagagtgcctggttcttagttaccaaaaagattttttttcttagacacacctaccttggcccttgttaccataggatgttgattaacaggaagttcaggggctggtgcaggattttctacagcagttgatgactcgagagcaggtgcagtggaaccaacacttaaagttggtgtgggaatggagctagaatgagtagatggcacattgttggtggaggaggaggaagaaggagaagtgggtggggaaggaatagtttacatggatggaggagatggggagttgttgatgggaatagtggcagatggagtagaaggggagatatggacaggggtaaggttggtgggaaataaggtagagtaaggaaattgatgtttattgaaaatgacatctttggacacatatactctacctgttgaggagagacacttatatcccttatgtttgagactatacccaaaaaagacacatttgacacacctaaattcaagcttgtggttgttgtaaggtcttgtgtttgggtaacaagcacactcaaacacttttagttaactgtaatcggggtctgtgtgatacaaaaccttgaatggagtggagttttgtatcactggggagggaagcctattgatgatgaaggcagaggctctaacagcctcatcccaaaaggacaagggcatagatgactgagctagtagggttagtgtagactctattaaatgtctatgtttcctctcagcaacaccattttgttggtgtgttgttggacacgagactttatggttaataccatgtgtcaagagataagattcaagtgcctggtattcaccaccccagtcggattggagagctttgataggacagtcaaactgttttttcactagagttataaagttaataaaagtgggaagtgcctttgatttgtttttcaaaagaaacacccaagtgtatcgactatatgcatcaatgaagtggacataatacttatatccccctgatgagagttctagggaagtaccccagagatcactatggatgagttgaagtagtttagtgtaaatagtttgagaattagaaaagggaagtctgtaaattttgcctttgcaacaagcatcacaaaagccattaacaattttattagaattgggaatgttacacaaagacattacatgtttgacaattctaacaggtggatgagccaatctgttatgtcataaagagaaatttgacaattgatcattattacaagtgctcttttgagcatgattgacagaaaataaaatactgggatggaaggaatggcttgaactattgtcttgaatgtgcatttgagaggaaggaatgacatagagaccatgtttaagatgtccttccatcaatactgccttggaatcccaatccttgacaaaacaatgattaggataaaattcaaagaaagcattgttatcagatgcaaactgagagacactaattagatttttagtaattttgaatacatgaagtaactggtttagaacaagagattgggatgagaaatgtgtactaaataatgtcttaccaacattttgaatctgcaggcctgcaccatctcccatatgtatctgatcttgtctaagatagagctccttatgagtgaaattattgtcattagttgtgtagtgactcgtggcacctgagtcagggtaccaagagttgtctacaacagtatctgcagtagcgatattgttgagaaatgctccacattggctgctcccacacctggaaaatccatattgaacctctgatagcatcgagctgcaatgtgtccaggcttggaacataattgataaatatgtctagatctagaagcaccattggtggaggtgtgtggagcagattgaccagtaaaaggaggaggagctccacgaccattagagttcgaaacatggccattatttgctctaagagggatagcatagggattctaagagccatgtcccctaccaggagtagcagaacaaggtccataaggggatttgtggtctgcattagaaaaagagaaaccagatcttcgacctcgagaaggtcgattagttgtcagattaacagagtctaaatcgttacgatgattatccatacggtgctcttatgaaagtaaaagagactcaattttagtgacagtatatggttggtttcgtgagttaacagatattatgaatgtatcataatcagaaggcagacctttaaagatcgcagcaattgttctttaacagagacatggtgaccaacaaacttaagtcgatcaacgactgtcttgattttcaacaagtaatcattaacagaaagagatcatttcttgatcgtcgatagctaattagtaaattgatcaattttagtagaagtctgtgttgcaaagtatacctgaagtgttttccaaacttgtgcaaaggtatcgtttccaacaactcgagtcaagactccttctgtcatcgacgagagaagccaagaatataggagttgatcttgctgctcccattgcatgtacaacggattgacacatctagcatgcaatcaagctcagtaaggaactttgaaggaggatcgacatcatcggagatgtagtcgattaattaatgtccacaaatggaagagaggacttgaggcctccaaagtaagaaatttttgttgtcaagtttaacagagagtttgtgggagaaaaccactggttgaaacgaagttgtaacgccctaatgctaaggcacgctatagtgttttttcaattatagtgcaatctttgctaatcaaagaattttctcgaaaaacgtgtcaaattaaaacttttgcattaaatatt

SEQ ID NO: 297296 - DNA, 2024 bp, Cannabis indica
catcatcaatggtgaaaaatagaaatgtattttttttatatatttttagaatattttattattattttaataggaccgcattctctactttcactggcactttatgtccctggcagtggtcgtctatgttgacgaggtatgaaatgcacggacaaatgtaactttttcgagtaagaaaacttttactagtgtagttagtcaccattaatagtttgccaacacaattagttgacctttgccgagcaaatttgtgctagcaaaccattttgttttagtgaggtatattgttagggttgtatgtgaaacttaacaaattttttatgttgtcagattgtgctaatgttgtttcggttatatctaattctctattgattattgtggggacctagaaggaatcatttggagcataagaaatgtgatcaagacttctgtttttagttcttgtttcacttttaaagaagctatctgtgtagtttatagtttggctaaattcactcttgataatgtagttagtgtcttttggaatagagaacttttctcttttccttgggttgcccttttaattgttttctctagctattagtttttagaaaaagaaaagatggcgcacattaaaatataaattaattaatttatcctaagtaaacataaatataaggtaataatgtatatagtactttgaagttaaagatatatgcaaatagaaatttaaaggtaatctcatgaatattgtatgttgagggtacgacaaatgaaacctaatctaaagtttaagtattcatttataatatatggtatacttttatgcaattaaatatgtcttttatttaatatataaatatttatgtttttggacggaagtgttaaaacaaaatataaatgttattcactaatctttaaggaaagtgtcattagtttattagtgacaagacaagcaagttccaacaggagtcacctgaaagacgccagcttcgatgatctaattaataattgtagttataaataaattaggcactgtgattgtgagtcaccacactatcatcaacttgtttattatttttgtcttttcaaacaaatttcagattaaattaaactgtatataaagaagagaatccaaccatcttatcacgtgactaccacgagccaatgttatttgtttttgtctatgtaattaatgtattcagtgaaatatacaataatactcgagtattgggtccataccttgtagatgagaaacaaagagttgaagatacgaattaagaatattgtaaagttattcctctattatgtttgctatgaaatgtagaaggagatgtaaaaattatatgaaatgtagaaggagatgtaaaaattaagggcctgttttcatattaatatttgtcttttctgtgtaatgacacttataatttattttgtatattttttttggaaatgtatatttaaactatgctacaatatttaatacacatcataacacataacatatcaaagattagttggtacacccacattagttttacctattttgatactattgaaagagaatatatataaaatacgatagaattaggatcatttgaatgatcctacacctccatttaaataaaatcacagtttactttgaaaaatactccacacttcttgttttgcttttattgaatgacctcatataaagataatttttacataacaatactcatctttataggccacatacacaactaaaagcaacaactaatcttcactaattcaactcttactcatttacttaataatactttgaataaaatgttggaacttattttaccatgatttagatttactaacatatatatattgattataaaactataatctaacaccctaaatgtaaatttcctaaaacaatgaaataaacataaaagattaagaaatccttacattaatagcagcgaaataatatgactccttctatttagatctctagcccttgattcctgtctgtagctgtaacaccctaactagcataggcgtattacgtgatt

SEQ ID NO: 297297 - DNA, 1083 bp, Cannabis indica
gtgctttctttcagcacgaccgttttggcttgattaaaggctatgccacagtctttaaccagatttgagaaaggttggtactcacctccccaatctgttctaagtcctttaactttggtgtcaaattgattttcagcaagagttttaaattaaatgaaagccttgagagcatcagctttggttttcaatggataaatccaagtaaaccggctgtagtcatctataaaaggtatgtagaacctgagatttctgtttgacataactggggcagggccccaaatgtcagtgtggattagttcaagaggtgctttagctctactgctagataatttaaaaggcggagaacgggatttcccatattgacatgcttcacaaaactcttgcttttcattcaaagaaagttttgcatgtgcattgtgtagcacttgatctaacacttttgaagaaggtggcctaacctcctatgccatagatccctttttgacaaacatgtgttactgacactagacttggaaacagcagtaaaaggactcgaaattacattaatatactcaagactagactgagaatcaacagcagtagcattgtagagacttggtgagactttgaagttggtatttggtttttggagaagatacaagccatccttgagcttctcatgtagcaccacctgttttgtttccatgtccttcacaaaacacaagtcaaaatagaatttaacatagactttattatcagatgttagttttggcacactgatcaaattctttgttatatctggtacatgcaataagtctttcagaactaaaacctgtccagtatcagattgcaaacaaccagtacctatatgtgaaatggtaagttgattaccattaccaacagtgagtttttcattacctccatagttcgacttgtggctcatattgtcagcatcagtggtgatatggttgttgggttttgtgccctaaataaaatctattttaatataatcagatttacttattaataaagatcataaataatattttatgttgcatggttcacgtgatttatttcatgattatatacatataatgtatgaat

SEQ ID NO: 297298 - DNA, 6929 bp, Cannabis indica
atcatgaataaagtaatagtaataatactttgttatactaaagtttggtcatctattagtaataattatgaattaaaagctcaacataaacatgattagatagattgctgaaaaataaaatattgcctttataatacaaacactggtatgaaatttatcaaaatatcaccgcttaaggagctggcaacttaagaaactaatctctgtttaaaaaaaaaatggttgtcatgctgatgcaagtaatgaagaaatatgatgatatactttctaaagtaaaataaatttacctgcaatagtaagccagtgacaaatccttgttgaagaggatgaccaaatggagatccaccgaggattgcatcccgaattcgatcattgaaactaagatgaatttcagttatttgtgaaagttagatagagataagggaaaaaattgattctagacactacaaacagtggcaaaaataataacatttactaaaagtctaaagtcctcataaaagtgtccgcacacacacacacacacaccataaaatagctcattttcctggatagctattaaatgccgacacttttatgtgtgtgtcatgtatgtgtgcaaatacaaactatcctcagttttacattggacaatctggtccttgagatttatcttttcacaatgtgatccacaaatttaagacttccggcaatcaagtgcccaattcgttagtgactttaaaaatattgcagagtgctcacgcagcagtcatattggcccttcttttaaggacaatttcaatattgctcaagctatttggcttgaagggaaaaatagcttttaaaatttaaatttaactactattgtattttgtccaaaatatgctttaaaacatatgggaactgggaacagaaaagtaagttaaacaaattatcatttatataacaaagaatacctccctatcccagttccagaaagattaacttgtgatgcgtttaccccgcgtccattcctagcaacttcaccaaagtcccatccttctccatatcttcgaaaagtgaaacagaaattttataaaattatcacttaaataactagttcattagaagtaaaaggaaaaaaaacttaaaagcaataaaaagaaaaactactggatgaaaaagttaagtgaccaagcaaaacctacatatagacactggaaccatcaacgccattcttttcctttgttaggctggaaatcgcatcttttgctttcatctaaggaaagtttataatctttattttctttgtaatttataatcatagatatgcaccttattgaattggtcaacaagtgcttaccattgttcttttcattatatgacccataaggtcaaaccgaaatccatcaacctgaaatagaacattactgtgattaatctcaacgacttagaacctccaaaaaaacctagaagcaaaggtgtaatgatggatagaaatcataagcctgttttaagttcagtttgctctataacatataccatattatagaggaatacatacgggaaagctttttatgtgagtaagagaggcagcttttaaagaatataatgtatcattctgtaatataggaatcaccttgtaattgacaacccagtgaagaagatcatcaataatcaaacgctcaaccataaaatgctcacttgcagtgttgtttacacatgtactgttctcaataaatccatcagtgtttcttctcaaatagtaacctggaacaatctgtaacaaaagtccatgtcacaacagaagactacatatcttcaacatggaagaatactaatatacatggtagaacactacaatcattaagtaactatactttttcagcatgcacaatgggtcaaagagaatttatagcaaaatacgaccttatcaagaacagaattttcatcatagggcccacttgcatgtaaatgattatagacaacatcgagtacaacccgtaggccaatatgattaagtgcctgcaaataaaagatattgtttttatcagtaaaaatcaaatgagtagatgccaatggataatatgcaaacatgggccatgaaagcagaatactagacaaggtgagaccaaagagagattcactcttaatagtaactgtttgattacaaaagacaagagggaaaatgactacagtgaacgagggttcaaaaatttcattctaaacatttccttctcagtttttctgagagtgaaggaagaaggtcagtttagttggccatttcaataaagacataatatcctgaccttaaccatccttctaaactcaattatgcggcatgacccatttggattacttgcataacttcctttagggactccccaaagaacaggattgtaccttcataagagaagaaattaattcatttagaaacacaaagcatctaaaccagatcacaatatccaatagaagtcagaagcatacccccagttatagccatcactattttgtatagctgttattagagcttgttgctcagcagaatctggggaaaacttttcaagtatctcagtgtctgcagaagggcaaaagcacataaatcatgagtcatttatattaatgctgccacctgcacaataattgtgtgaatctgaccccagtcacactcaaattaagacctgatctgcatgaaaaagttatggcaattttggatggcaaatgtcaataacagtggacctcttgtaaccttttagattaaaaatagtaccctcattctaatataaataggcaaccaaaaaacaaaaataattacacgaaactaaaattcacaataaggttccttctctaaaatatttaatttaaaatattaaacttttttactgtattttttaaattttaaccataaacatttaccagacttgaagtcttgatcagccaaccattcgagtgaaccccaagtggcagaaaacttgttcttaaatttgacctaagtaagaaatatacataccaacagacttccacttctctttctcatcatcaacatcagcaaactggaaggctggcagtaaatggacatgagtaagaccagcatctgacaatttctttaaatgacggatacctgcagaatccttcaagtagtatatgttcactggtaaataatatacactcacaacattaatgttttgagaattcatcacataaagcttggctatagtactaatgaatgtaatcacgaatatgcacagtacattgtgatttgtcatcatacaaaatttaaaggtaccatttaagcatgtatatatcacaattcacaatggagagaaagttcagatttttttaaagagatatcaaaataacataatttaaagcccaacgtattcagatattacttcaagcagaatttgtgttatttatgattttaggtgcattaatatgcttgaagcttagcttttggggcaatcagtaacctagattaaatgacgacatatctgatcttagccatccttgcatatcatagagttttcatcatgtatgtctaatggggaagaatttatgtgtatgaaagtgtgttatgggtacagatgcattggtcaggtcctaagacatccaaccttgtaacaagccctgctaacatttcatgttaccaataattccaagttcaaaataacataaccaatgacctattgcaatcttcaacacccccagtgacaaaacaacacacattatagctttcaatcttaattttgcataatgctctatcaagagacagaaaggtagataaaatttagtcatcttaagaagtaagaacacataaataatcaaggagaagccacaaatacctgcaaagtgaaagccaaatagccacctcggaattcattatctacagtgaggtcactggcactgcagtatattaaaacaaagacagttaggtggactcaaaacgccaaaataattttacatgtcactttaagcctgttttcagcaaaaaagctgaagtagaatttcaggaagtttcatgttctccttatattatgagaaaggtgtgcctcccaattagcagtataaaataattagttaagaaaaaagacccccataatctaaccctgtagacatgaaatttcaaattatgaagccgatttctagtctatctttgactatatggattcatattcttttatgcttcttttcagaaattaagttcaagcaataacgattcaaggtgcagtttacagaaaagtgatggcttgattagttacctgaaatcccttacatgcaattcatatatacttgtgtctgaaaaagagagtaagtcaggtttttcaagagccaacttctcccatccatcaggttttagagtatcagaatcaagatctacaaacagtgtccggccaccatttgctgagagcctgtcattacaagaaattgtttttcctattaaaggttcttaaatatatttttggaaacttttcaataggagacaatcagcatacataccctctagcatagggatcatttgcatggcattttacaatttgcaaggtgctaggatggtaaacagacacttcgtacacataatagcatccatcccaactcttcggtcctttggtactccaaacacccttagtctcctcaagctggactatctctagaggacttccacctgacgaatccttataaatgcaagcccgcactgcctatactaatgcagaagtaaattgagtagaaatgaagatgtaacaagaccaatataacacatttaatcagatcaagagaagcaagtacgaatagacattgaaataatatttccagaagtggcatacttgagcagtaggtgcccatagaaaaagtgctatagcttcagttgaataaactgctcctaggggaccactgtacgagaacaattcatccaggatgccaggtaactgcaaaccagtaatgttgctgcattttccaacatctacataacaaaaaccaacatgtaagcaaagaaccaactaatcatactagatgtcattagcatacaaattaaaattgaagctatttcctatcagtcctacaatgcaaatgcagtactggatgagtcatcattagtctccttgcttatcataggtcttcctcaacatattcaccatatactaataactcaagaaaaaggcacaacaacattaacaactattttcttaccatcaaaagcagcaacagctaattggcacttgagcaagacttttgcatctaagctaggaggcaccttaaaagctctgtagtctttaatatgaggaaacttttccatcacctaaaaacatcaattttcaagaacaaaaaaaaaattaaacttctcaagaagctgcagattacatcaaattacctattagaatatttttcatacattttgagggagcccatgggtatcttcttcaagtttaaacttcacatcatgccctgttacaaaatgtaaacaacattctaaatcactttgttcacctaaattaaagcaatcgacagtcctgaactaaatatacataaacggaagcagacaccataccttgaataccataatcaccgtctgtaattgacaaagaagctgtttcgctggcaaataagtataagctgccattgattccaacatccacatcccaggcgataatagattcactcacccaataagctcttgaatacataagactgtccttcaactgttcccaaaaccatccaaaacacaaatgttcaccaattttcatgcgatgcaaatgtaatgaatttgagaaagagatagaaaggagcaaaggtagacctgagaggttacaggagatgatgaaagagcggagcagcggaggagaggtattgatttggatggaaataaacgatgtcgttgagaagacaacgtggtcgtcgtcgtggtcgttgggactgggagccgtagcgggaaatggggttgaagatgatgagtgtgggaagttatggacgttagagaagttggagtgggaagatgatgaagaaagggcgatgagcgaagaagtagcattttggccaagctttgagtttgagacaaatctttcttttattatatactaaataaataaatagtgatcgcttgaaaaaaggcagtgagatatgtttggacaccattgtcacgtgaaaactttattaaccctcaaatcaccttcttcaaaaaaaatcagaaaagctctgtagcagttaaaattcctttctattttcatggctgcaagttatattttcaccatttttcttcattcttcttcgctttctactttcttctcctagttgtggagtagtagatttgttatcattatcctcaattctatttctctctcaaatcagtgacatattatttatacctagttttttctttgtgcacttcaattttctacgagtctaacttttcttttttaccgccaattataaactattttttagatccaagcaacattccagaacaaaattaaaaagccgactgaggaaaagaatgaaagattggggaaagtttgatggaatggaattttccaatttgcatgatagaaacgaaaataaagcttcagtattcagactagaaagattcttttttctttttgagaaaagacaagactagaaagattctgagatatagtttcctctactatttaatttcaatgctaatgagggacttttttttttttttggaaatgagatcgacttttttggacttctccaatgggacattaaaatctcaaaaatagtagaattttaactcaaaactaatccaatggaagagcgtttggtacggggtgttcgattatagggaatattacgaaggagaatatgattatagggaaataggtaaactgtgttgggttgtatagggtaatatgtaatcatattgctgttaattaaattagattgagtacaggaatcttatatattattttagaaaataaaaataaaaatattttttatatatttatttaatgttaatt

SEQ ID NO: 297299 - DNA, 5669 bp, Cannabis indica
taatattttagtataaattaaagtttaacattgtattatataaaatatgatagataatccaattcaatataatacaatacaatacaatacgacctaatacggcgttccaaacgagccctaaatgaacaccaattcatagattcataatgattgattcactttatattcgtttctcccagtgaaagcaaaggttatgaacataatccaggttgacaccgaccattataattgaaggccaatgttctacatcatgtagtgtcattgattattacattaaatgttcaaaaaacaaaataacaaaacttccataaaatataaaatccttaaatacaacaacacaaaacacaaatgataaatttatcattggtgaacagttacaaattatcatctcatgctaacttgtttggcttcaatgtccttaagtctaagggttacggctctcttgtgcgcttccagaccctcaacttcagccattgttgccacatgtggaccaagctttctcaagccctcttctgtcaaagactgaactgtcatgtacttgaggaaggagtctagagacacaccaccatacatccgcgcataaccatatgttggaaggacatggttcgtaccgcttgcataatctcccacgctctctggcgtccacggccccaaaaacacagaacctgcaggaattatgaatgaaatagttaattagattattagtgcactcctaaggtatttcattgttcaatcaggattaatcaaaacactctaaaagaatcattaacgaaaaacacagaacctgcaggaattatgaatgaaatagttaattagattattagtgcactcctaaggtatttcattgttcaatcaggattaatcaaaacactctaaaagaatcattaacgaatgcatgttacaattatagaatgtcacctctttcaatcaaattaactcatgattagtcagccgtcaagaaaattcatgatatatatgaagttacgaaaaacaaaaccaaaaaccaatagaaaattgactcatgagttctggagttttttagcaacgtgattcttgtcttacttacaaatcattcaatagaacattggttggtctctagactttagaggtgatgtttatgtaaaagagaaccaaatttcaaaatcaatgcaaaggcggcactggaaggacattgtaatccgttaaacaaaaggagctaagcaaaaatagataaatatggcaaaaaatgaagaacataaaaaattacctgcattctcaatgaaaccctcccatttttctgcatcttgaacattgataattagatgctctggagcgtacaagtttgaaaaggagacagcctgagactcatgagaaagttgagtgtcaaacgagatgtaaataaatccttaaatcatgaaacaaatcatttcacgagtactcgaggaaattcaatttccatgcaagtagatggtgttgtattaactgataattaaagaaaagtaccataagaattatattaccgttaacttgaaaaactattgtttttaccctgactagtttcaatttcaataacagcttaagagaaaggcaatcacctctgcaaattaaaaataagctgcgtgaaaacacttctacaattcatttactcataatatcaggtatgcattgcacagtataattaagatatctttgcaagcaaatgccagtgtattaaaaaatcaatcaccaccctgtattgtctaccaaacaagctgtatgatatttgcttggataacacaagtatcatataataataagaagtcaaatcacaaacctcaaccatgtcacgagcaaatacggtgaagctgtggctaagtgctttggcagcaaattctcccctaggtaggtcgttgcattgtttctttaattcatcctcgatacctttgaaatctacaccatctccagtgattacaagaactacctgactatcagggccatgctcagcctgaaattatgttaatctgttagacccatgtttattttataaatatagtttagagctaagcattttgcaggtcttttgaattttataaatatgaaacctgtgtttattttaggctgtagatgttaaatttcagtactgataagcattacaaatgggtatatttccatcatatgaataagtttctttctcaatattacagaatattagcatcagacgcatctttcagattccatgagaaatttaatagaaatagcagaagtttgtcattgtccatgtttaaaatgtccagtgaataaaaagatatcgtgtagaactaggtttaagaattggaccaactaagcatactgacaaaacataaacattacagaagcatacgagtgtgaaagcacctatatgtaaaaacaatgaactcgatcaatcaaatctgtaaaacaatagtatgaggagaagtaaccacctgagatagtaagtcagctgctatgtggacagagctagcatatttgtcagcaatgacaagaacttcagaaggacccgcaggcatgtcaattgacaccatggcttcactattctactaaggacacaaaattacaaataaaatcaaattaaaattcctgaacaaagcatgggtcaaccacaccgttttctattcaaaatattgtagattattctaatgcaaaaaatgtgtaacaagaagtaatacccacttggagaatcatttttgcagctgtaacatactgatttccagggccaaatatcttttcaacctgaaatatatatttgaaaagaaaataggttaataaaccaaatactggatatgttcaaatgaaactgcaacggtttttggtgtaagcagagatgttaaaaaaactatattattacgtacacctgatgtacaaacactgatagactgatagcaataaaaattgtcacatgcacacaattattagtttctgacaggatatataataattagatgaggaaaagtcatattcaaagattgcatttcacatgtttccttttcattttctagttaggtttttcataatccatagtctaatatgaaaaagataccctaataataagctaactatgtgactaacaaaaatgtcattagcaaaaaattgcaacaaccatgagatagcagttgcattagtcattagcagaggaccaacaagaataacgaccaaccagtaggcataccttcataattcataataaatacgtacattcagaacatttgttgaaattaacaaaatatgaatgaactaagtttaattagtacctttggacatgattctgttccccatgccatggcagatatagcctgcagtttgagaatagttggattatctttaataggactcttaaataacggggaaaaccttcatattactaacaattacttaacctacaaattttaactttccatacctgagcgcctccagctttaaggatgtgagtgacaccagccttcttggcacaatatagtacttcctgcagaaatggaaaggcattagctacttattgcatgacatcacctaaaacatcacatccaagtaaccaagtaccttgcatatgctgccatcgtgacttgggggagttgctagaacaacagttttacatccagcaatcttcgcaggctatttgacagagataaaatttatatctatgaaactcggagacctacttatagatttttatgtgaatattataaaactttcagctattaaaatcaactgatccaattaatttgacaaacttacaattgcaagcatcagagcagttgaaggtaaaactgcagttcccccaggaacataaagaccaacagaggcaatacttctcgccactcgtttgcatctcacaccctgatataatatataaaatatatttaaaaggctatatcacatactagagcaaaagacaagagacagggcagaaaattgactcactttcatgttctctatacttctctcagctgatttctgagcaaaatgaaatgcataaatgttgtcatatgcaacatcaaatgcttctcttacaacaggatcaagctgcaaataattaacaattatagatgctcatacaaacaaaaattattcagaagctattaataactttagcaagtcaacaaatcttgtaaatagacatacctccgggtctggaagctcagaaacgcttacaaccatcttatccaaatcaactttgtcaaactttgctgtatacctaccgaggacaaaaatcttaactaaatatatctcaatctcaatagatatataatcaaataaaattaattaatggcaatataaaccacaaacgccttaacataaaccaactcaaaaaattgaactttgcacctactctcgaactgcagaatcacctcttttgcgaacatcatcgacaatggggttgaccttatacagtaacaaaaaaaggtacaatacaaccaccaaaaaaaaaaaaaaaaactaaaagagcaatttcaagttcaagtttaaaacacaaacagtggctcacagtggtgaaaattgaagagaaatcaattcgaggacgagccttgaggttctcaagttcggaaagagagagttctgacaatttataagacttcattgcacactttatccccttacacccgaacccacctgaacacaaaataaattcatctttctttcatcaacaaagccaatgcggcattgccaaaagcaaaaatgacatgttttgcatttcaataaataaagtcaaaagggatagtttcttctttctacttttagatatgctttgaatttccctaaactcagtttatataatctatttaatggaaaacaaacataagaaatgacctaatgaaataggttttacctctggaagagcaatgagactgaagatgtgagaccttaggattagccctagtaactcgaaaccgcagcgaagagttggaattggaattaagcaaatagctactctgattgaaacgtagaagctgaatgtccattacctctattggtgcctgagtggctgagaggttaccaaaacgcgagagagagagagagaggaggggctgttagagagaagtgggggaaagtgaaaggataagggtagttttgggagaatattgaaaaattggcatatatttactatgtttaaacttttggtttaattaaacaccacttctaacttttaagcataatatatcaaattttccttgatttagttggcattttatttgttaagtgataatctgaaattcatttggaaataattgagtatgaaatgactaaaatacccttgtgagggtgtatgtgtgtatttaggccctaagggaaaaatggtcttttgaccatatttgatttacacttaataaaatttgatttttaagggaatagataatttttctggctgtttctccctctcacccgaaccctctttctctccctaaccctctcaagattttcaaagcttaattggtgtgaattgcttgatattggagttggattaagcttggtatttgggaatttagcttgattgtggtttaaatttgaggtagttcttctccctactctttaatttttaatttgtaactgaatttagaattggaactcgtttaagttttgaatgttctttattgcatgttaagtggattggtgttaattttgttgaaattgagtttgttgttgttctatgctttattgttgagtttgggcagagattt

SEQ ID NO: 297300 - DNA, 2331 bp, Cannabis indica
ggcagacgctccaagcggactccacgtgtcaccattctcgtaatgccacgtcagagtgcaaaatttgggataacacattttatataatatatatcagtatgaactaaaaaccctgaaaaaaagagaataagaagaggtttgagagaaaataagattaattttttcactctcactctctctcctatacaaacacgcctctctctctctctctatctccttaactcagtgtggtgtgagttttgtgatcatccctattgcttcacagtatctcataagttaagaaaatattgtgattgcataattgtactcatttaatagaatctaatggcccacgatctattcctgagtgttaaggttggcttgaaagattgtggtgtgaacttttcaacaagttcttagattggatagactaatgatacaaaaagaaagcgaggatcccctgataggctacaagaggtattatctctgtattcactagtctagatttaatctatatatatattacattgagatccttatgcttatggttcatatttgattcaattaattttagtcaaatccatttatgcttttttttactctaatatggaccataaaaattaacagagattatattatgctaatttaattatactcatccaaaagaatctaacaacgccctctattcttgagtgatgatgctatcttggaagattgtggtgtgaactcttcagaaagttcttggattggatgttcgataataatacgaaaagatagtgaggatcctttgataggctacaagaggtattgcctctcttattattagtctagatttaatctatatacattatattgagatatcattgggcttattgttcatattggatcaaattatttttaataaaatcctcttttttctaactcttatattgactataaaaacaaacaattagtatcgagagctatcttcatgattgtatagattaaatactgtgttggatatttatgaatttatatatgttaatatattataaattgattgatttaatcctttttatgcaagattgtgaatcattaattatatggtaaaattgagttagagattttacggtctttatttgaaaaatttgtacaccataattgtggcataggattttgtggtaatttctcattaaaatttatttgtaatctttcgtcaaattatgtacatataatattccaaaaatccaccaatgatgagtaagctcaggattaaggagtaaaccccaacttcatcaaaatggtgttagaaactcgaaatggaaagccatgaaccccaaatggtgcagtttcaagttgtgaggcacaaaagtgagccacgtgaaaaatttcacgtgtgcatgtgccatgcatggctgccatgcacgtgaaatggacgacaatggaggaggagagccttttgggtccgagttgcacgagtggcaatcgtagggatcgatcgatcttgtagctgtcttctggtggtcgatcggacctattggtcccatggtcgacatcgacatggaggaggaggctaacaaaggtggtctcaagtcatgaggcactgatgagcatgcaaataggtcacttagacgtgttttgctctgttgtggcttatctacagcggcacaggcccaggtggtttctcagccgcagccattggcttaggtggcttctcaaccgtcggccgaccgactgtttcccctctgacctcccctgatcatcttcgatcaccaccgccaccatcaagaccatttaagcttgaccccgaatatatatatgtatacacattatacatatcttttagaaattatttttattaattaattaatttgaatattaattttgaaaaataaaatttcagatatttttatacttcaaaattaaatgtgtattattttttattttaataagttaaaataaaattttcaaggagaagttattatttttatatatactattctattttaaaatgatttaagtatataaatattttagttttcaaattatgtatttattatatatattgtataattaatattatttatagaaagaggttagtgatatttttagaaatatattaaaataatattttttaataattggtgaactaatttttctaaaaaagtatatacgtttttataatttattttcaaacttgtactaaaatattattttaaactaactaaacctaaataaatcttgtcattagttagtgaatcaatattttttttaaaacttaattttttattatgtataaataataattatttattatacataataaataatttcacaaattaattaggtggcgtttagtaatatttttttaat

SEQ ID NO: 297301 - DNA, 1739 bp, Cannabis indica
ttcttgaatggtgtccttcatgaagaggtcattaggacacaactaccttgttttcaagtttattttttaacccacttttagtgtgcaagttgcacaaggttctctatggccaaaacaagctccaagaatctggtttgaaagacttcaaacttctttgatgtctctacgtgttgtctcatctaagtctgatcactctctatttcttcatcacactaagttctcaactactctcatcttggtctacatagatgatattcttatcattggaagtgaccagaaaaccattgatcaacttgttgtgactctcaactctgagttttctctcaaaaaccttagagagttgaactaattccttggagttgaggttaagtgcactacaaaaggcatccacttatctcaagagaaatacatcagagatcttctctataagaccaagatgtatggggaaaatcaagcagaacacctatgacaagtggttttaagttgtctttctatgggagtgatcttatagaagatgttcgactctacaaatcactagtaggagctctacaataccatgttatcactaggcctaaaatttcatatgagttaacaagtttttttagtttatgcaaaatccactcccagtacgttggattgttgttaaaagaatcctaaggtatctaaatgtgacaatggatttcagcctccacctcaataaaccttagcagctagagcttactactttttgtgatgcacagtaggttgcaggccttaatgacagaagatcgacttctagttttgccatttatatttatcctaaccttattgcttgatcttgcaaaaatcaaaacactgtccctcgagaggtagagttcagaagtttggctattattgcataaatctcttggcttagatctttgtttacagagttacacatctctattccaaggcctccattaattagatgtgacaacttaagcacactattattaactgtgaatccagtactgcatataggactaagcacatagagttgggcttgtactttataagagagaaggtgatttagcaattggttgaagtgaagcacgtccgtgcaattgattaaattgcaaatggtttgacaaaggccatctcaagcaacaaatttactatgtttagaaacaaactcagaattgaaaatacatcaattctaattttgagggggactgttaaaatagctaattagttagtgttagtttactagtagtagttaaggtgagttgtcaagttagttagatgagatctattagtttgttagagtcttagactctaattcaaattttatataagtaaccacattggtacattgatctaataagaaacactatcgatttcttcatctttctctctatatttcttcctatctttccgtctttgtttgtgtttagttatagaatgtctagcaaatctattaggtggcaagtataaatgctttattgtattatatttggaaggctagaaatatttatttgtgggaccaaaaagtgtataatatatattatagatcaaaaatgaaaaatattgtattataggttttctcattttaaaataacgaaaataaataaaaaggatagagattgttagaggctttctcgtagtcttgtttggttactagacaaatttaactataaatattaattttaaaaaaatcaaactatcgaattttgttctgataacgaataatgtaatcacaaattgaaattttaacgcttaat

SEQ ID NO: 297302 - DNA, 2206 bp, Cannabis indica
aaaaaaaattgaatcaatatcgcaccaccacactactacaacctaacaacaacaatagctaactaccaccaacacatgttaaggatgtactatgtcatatatagtgataatatcggatctaagttacatgatgtatattggtgtgtcctatcttttaatattatcaatagctaaataataaattcatgaaatttataaaattgatttgacggaaaagttgcaattagtagacaaaacaaataatttacatctgacacgagaaaaaatcatacatagttatacaaagtgtctaagagtcattataacattttttttaaattaatactatactatagttattttcgtaggatacacttgctcaaaataaagcaaaagaaaaatctaaccgacaaacagaatacttttccaatatctattgctatatacattgaaagaaataaagagatcgcccaagacaaaaatgaattagttgacttactaaagataaatatatgacaatataagtgttcattgatccacaaacttactaatcccatcagatgtaggaataattatgtgaagatttgggatagtctgcattatcaatttttacaatcacatgaattctgcattgtagcctaaaaaaaagttttcaaaaatttagttctaaacaagtaactgaagtcaaataactgttaagataatctttcaactcatgaaccactttagcatctttaaataaatcaattaggttgtcgactccaaacttaatatcctcatagtctttgtaaaataaacatatagaacaacagatagtagatagtatactggatttactaatcccatttgatataccaaaaaaaagtaaataaaaaatttcacacctaataatccttgttacctgtaattgaaggaagagttgtacttttgccccaaacatttaaatgacatattgattttaattctccgccatcaactacttcacataatttaacagtattgtttatcgatattttaaaaactaattaattatagcttaagaaagatatacaataataaataatatacagataatttttacgtagtttgggcattaataattcctagtccacgagtccgtgattttagccatactatcgattgtttggatattacaagcttatttaatataaaccctagctttgcattctcatcgtttttattgaaaaagaagaaagctagtaagaattttagtagaggttttgtaagtatgaaaattgttcaccatttgtacgtaaaaagtcagcgtatttataggcacaacggtgggtaagggcatacccttcacttacctagggttttgtactcatcgcgccacaaggactaacattacaacatgatgttctaaccattggctggttggaagatttcccattgggtggtgtacgactactgtaaggcatttcgtgagaatgaggacaagtgttgcccaaaggtttcaccttgaaaagttattgtttggacaagtggttggacaaaaaggaggcttcagacgaactaccatggtttgacgttggggacaagatcaaattcggtgttagaagatatgtaaatgttgccttgagctttggataagaaacaaccaaatatgttccagaatcattaggtcacatatctttcccaaatcgcactaacctaacacccttctgggatcgtcatgacttcaggggactctgatctttcttagtagcggatgcatagtgggagtcctagaatcctttgcgcccttgccgatacggagaaccttcgacttagtcctagaatataacttcttctgttaagttaataagctgaagatgaatattaattgtaaataacttgatgtggcacctttctttgattgctacataagagacatttgagaatgcggataacatttacccctaaagtctcaggactcacaagtgttgggagcttgcagcttccttccggatgcttaattcattatcctcacatgccagtcatgtgttgaaatgtgggagaagtcttctgtattacctcagataactgatgggttgatatgttatgtggtactgcactcatttggctgaaacgcggtgtccgtttagtggagtcgtggagcttacacgttatgctcaagcgcgtttctcgtgggaagtgaacgacgataggacttgaaaagacgacaaattaatggcatgttggggatgttgagttttgtgcccta

SEQ ID NO: 297303 - DNA, 7625 bp, Cannabis indica
tatatatatatatatttgtgaagtgaacttatattttaggatgctcttgtgtagtgcaattacattgtttaaaagttcgaaacaataagaaaccatagaattagtcaaatatgaacaaagcattggaagtttgtaacagaaacatattttgcatcatcaacctctatatatatatattgaaacaatttataaagctttaacccagaaacataagtacgtagctaaaacttattataaggtcttgttatttcttcgtttattatattataataatatatcaatataaacttatattagaccttttttttgaaagcaacttattatacctgtaattattagcttacaaatagtaataatagattaattagtattattagaagattttaaagagagaagtcttggaggttctctgatttccaagccagtgttgcatatgaataccaatggcatccaagtaaatgctgcttcttccatggaatcccaccacttttccttcagttgtagttgatgtgaagtaagtccctatctcctccccataaggaccgtacttccctcgacttgtgttgaaggttaatgatcttattactttggctttttcatcatctttggtcatgctaccataataccccgatatgcatatcaacacctcatttggatactccaacttaatctgtgtgcatgcatgcatgtcagtagtgtagtatatatagctattaatgtcaaaaacaatataataatctcatataattaatgttatttggctatataaatatgtatatatgtatgtatgtatacccgatgtggtgtgtttcctccatttccaccatgtttaacagaccaaacaggttgaccatttcggtcgtactcaatctgtatagagcaaatggcttcaggtgaccttgtcaaatatatctgcttaatcccagaaaagactccatcgtcccatgctctgcctccatccccaccccatggtcctgctccgcatggggctggttctttcatcactccacatgcaatctatatatacatatatatatagtctctcatattcatcatgcatgttcattattataacaataagtaattgtaataatatatatcaataagttacctcttcagcagttgttccacgctttgcaagaactaatttgttacgccactgaggatgatctatctcagatatacctgatttattattatgaaaagggtcatcatcattattatggctttttataacattattaacaactggtggtgggactgggacaattgctttggaattaataagatttgaggtatgatctactgctgctggtgctgctgccactattttcccttctaaaatgtgaaccccaatagcatctaagaacagtcctcttctcccatggaacccaacaattctgccttcccttactttggaggtaaaacaccctcctcctcctgcttgttcttctccatatgggccgtgcttcccttttgtggtgtggaaagtcaaggacttgatcacctgagggcccattatcattgccggcccatatgaacccgaaatgtgggtcaatatttcgtttggatagtccaatattacctgtgcccatcaaaatcaaatcaaacatgtttgttattacaacactcaattaatcatcatgctaccaatattagtaatttcaccttgtcaaatttaaaacctccagttccaccatgtttggtgccccaaacagattcaccttttcgatcatagaggactcttatgtatacaataccaacgtttcgagatatgttgatctgtttgacgcctgtataaccagctccttcgtcaaaggaagacccacccgttccaccccaaggaccacagcttaccacaccttcaatctttgactttgagggtgtcgtattctccttaacaggtgtaatagtcacctaccaatttaattaagtaaaactattatatatcaaagctagtgtacatgtgagaataaataaattaagcccttcattaattaactacgtaccttcttcttctcttttttgtgttctttgcctcctcccacgtcactaagttctcgagaagaatcagagtcagaagaagacaattgcctagtgagcttgttgtttggcaaaggtttagaaccaaagttgttgttgttattattataattgttgttcttattactgttatcatctctctgtctcacggcaacaactatatcatagctttggcctacactaccttgtataacagaaaagccattcatgttttcggaagtggcattaaccatgtagttttgagcagtgtgatgaacctgagtagttctggtgtggacgacgtcgttttgtttaggaagagtcttcaaatgaaccccaatggagtccacaaaccaacccgctttcccatgaaaaccaacaatttttccaccactcgttgggatagaaaaacttgaacctttttctactccgaatgggccgtacaattttttgttgcttttcagtgtcagtgaacgaactatgggcggaccccattcgtttagcttagcatagtaaccgttaatggaggtcaaatattcatgtgggtagtcaagtttgatctgtgaaagaaaaagttttcgtctttgttattttattttttcttcttctgaacaaattaacttacgttatgttatatgttacttacattgtcaactttagggcctccacgaccaccatgcttctctgaccaaacagagctcccgttattgtcgtattcaatctgaatagagtcaatggtggttccatgagctacgaccacctgcttcaccgttgagtagacaccatcgtcccaatcgaggccatcatcacctccccatggcccaagtcttacgggtttcttctccatttcttcaaacgtactctgttttcaaacaacagagcatatcatcaaagttagttcaaactaaacacctatagtacaaattaaattggaaaaaataaatataagcaattaccatattggaacagagaagatgaaggaagctagcgaattaaagagctcagtgaatgaatgttaattgcagtgatgaaaagagtgaagatatgagtatgaatttatgaacatcaaaaggggtgttgagtataggggaaagaacttaaaatattaatataatatacaatacaatgaatttttataactttaatttcgatatggagcactatgaatatttatcattcagagtatagcactatggagggagggcatgggttcaggaaagaagaatcagatcctttcttctatctagtctttcatgatatgtatctgaaaaagtattccatattcacttcaatcagagattttattatttgccattttgtgtttgtgtttgtttaatacaaagaatcagtaaatgggagcaggtaggctcaatcctttattctaaatttggaatatatggatatggaggagcatgatgagcatctttgcatgggagtgggaggacatagacacgtcgacccaaatattgctcattctttccttttcagctttacaaaaaggaacaaaaaagttttaccttcttagtagcgatcatttgttgaccttttttttctttccttcattccttggattctcattcaaggaatcatgtaattagggctatcaatatggctcgtatagcaccacttgaaaatgatagctaagtcgttttggagttttcaacgcatttaataatcatgtcgtgtttgtgtttactttaatcgtattgtgtcgtaatcgtgtcgtttgatactcatgatagaattgataattgtatcttatcataatcgcgtcgacacaataaaataaattaattatcatagataattttttaaaagaaaaaataaatgtatcttaataattgtactatcatattatttcgtgttcctgtttgaatttgagttttcctcatatttaataagtatgtcatgtttgtatttacttaaattgtatcatgttataatcgtgtcgacgcgaacataacacgataccacgaatgattaatatgtctccactaaagagttgtgcattttgattcactcttctttatagatccacatgccctcaaaatttacttggctcaattttccacttaaaaattggaatgccagctcattagtcattaatagcttttactgctattatccaacttcatttcaccaaaaagaagaaataaaagaaaagcttttttagttcaccaaactgattccatgatgaattgttccccatatatactaagttctatatatgattctgtaatcgaaccattcaactatgcaaaatatctttctatttctttaatcggattatatcgcttgataactaagcaaactattatcagtcagactcggaccgaatctcaatttacatttttatggggaatggaaaattgctgtaaatggaatgaatcttgagtatgcttctcgtcgaagatgtactgaattgaacaagggataaatcatttacaatatcagatgctacaatatttttacactacaagttgctcaacagtaaaaaagaaaaagaaaaaaatatattattttcattgagtacgttggccatcttcaaccaattaattctccctctttatgagattgagttgaggactaccaatagtccctgcaagaacattgccctttactgaaacgatgtaaacactttgaatcactcacgtatatctcacacccataggccttggagacatactttgctgtctcatggcaaccttcacacattctcaggtgtttaactattctgatacattgggccttccttggaaactcaataagggcaaaagcaattgcaagcttttcactatgcacaccaccaacctcttccctatcttcttcctcaaagcaaaaaccatcacgtaaaccaaatttacccactttttctgttatatcatgtatccaaggatatagatgaagttgagattgatccccagcaacaaatgtgtagactctgttgttaatttcaatccagctccgtcccatattccttttagtagaactttctttctctagctttctcattttggaatcactctcagattttttcccaactaaagcatcagcctgactcttaacctctgaatcaagtgattcccaggttccaactcaagcaaatgattaagagaatgtactgagattccaaagttcctatgatcctactagcagtaagtaaagcatcccaaattgaggagtcaggttctacgggcatatcttcaatgaactccattgcctctttaatcctacctggacggccatataaatctaccatagcagaataatgttctagacatggaacgatactataatcttcactgatactagagaaagctagcgttcctttgtctgataacccagaaagactgtatgcatagataacactaacaaaagtacctctatttggtttcaatcccaatttgttcatttgatcaaatagatcaagtgcaactgttggtaacccatgcaaaacataaccggcaatgattgaattccaagtgataatatctttagatgacattctatcaaatatagcccttgaatatttcatattcccagtcttggtataagtatccaccagtgaatttgccactggagtttcggactctaagcttctgcgtaatacgcagccatgtatctctctgacctttttagcagcaagtatacttgcacatgcaggcagaacacttaacatggtaaccaaattaggactaacaccataggactgcatttgtcgaaataccccaagtgccctgccttgatccccacggtgcaggtaaccagcaatgagagagttccacgacgcggtgtttcgcttgattttgccatctttctccatcctctgaaagagatccatggcttggtcttcatcaccattctgtatatatcccgagatcatgatattccaggtgataacattaggtagtacatctgattcctgcattttcatgaagagttcacaagccttgccacagtaaccagattggcaatacccaccaatcattgagttccatgagtaaacatctttgtctttaatcatatcaaagacttcttgagcagcttccaattgcccacacttggaatacatgtcaacaagtgaatttccaactaaaacattatctacaagaccaatcttaattgcaaaagcatggacttccagccctttgttgagtgatcttagagatgcacaagctgaagctgcacttgctatagtaactgcattcgggttgacccctgccgaaagcatctctctgaacaaatctaaggcctgacctctcctgttattatgagcaaaccctgagatcatagaagtccaagtaaatacatctggagcaatcccaaaactttccatgtctttcatcaatcccattgcaacatcagttttccctaaatgattacaactagcaatcaatatgttccaagttaccaaacccggttcagtcccttcctccctcatttcatcaaaaagtcttgcagcttctttaacctgaccagtatggcaaagcccagatataattgcattccaagtgacaacgtccctcttctccatcttctcgaaaaaactcttagcccaatccattttcccgcattttgcgtacactgccaaaactgaattgttgactcgaatagaaccactgaaaccacatcgaatcaccatcgaatgtatcactttggcagtcttaagacacttgcaattcccacaagcctccaaaatcttaggcagaaggaactgatcgggaacaacaccatctttcatcatcaagaagaaaagctctaaaacttccttccacctcttcgctctagagcacgcaccaatcatagctgaccacgtgaacaagtttctctcacgcatttcatcgaaaacgctgcgtgcatcatccaagtaaccacatttcgcatacatgctgactaatttagtttcaacaaaagggtcagcgtactcaaccaaacccatccgagcatgaagctcccgacccaactcaatagaattcgcatcaatgcaagactggagtaagttgatataggttttgggttttaccttggacccacgctcggcaatggagtccagagctatgattgcctcgctgagccgtccgtttttgcagaggttatccaaatgagaatctgggaatttggggtgcgtttcagcaaacacaggaatggtaagtttggtgggttttggagaaaattcagagggatagccatggcctgatttggtgggacttatagttatgggaggctttaggttgcaggggataactacgttctccattgttggaactcgcgtggattttccagtttatgattaccgcccagaagaaggtcggcattttgggttcatggctgacttaattagcgggtggctcatcatcatcatacactatccaatggatattggataatcctttattatttattttattgagcagaataaatatttgttatttctttatttatatattataggacttcttttaggccagggatgtagtttttactggcaattgattggttgaatgaagttttactggcaacttattggttgaatcagtagggtgtacgagcttatgctatggcgtgaagcatgatagtagtttatttattgttgttatatttaa

SEQ ID NO: 297304 - DNA, 2345 bp, Cannabis indica
tcaattttttttatacattttatatagatcggaaagatgtaatctaaaaagggccttaaactacccgaaccaagtattttgtgtgttaattatcatcattattaacttatgtgtttatttgttatctatctaaactctatggatgccttttgttgaaagtaatagaatgtaatggaatagaaaacaatcatatttctttcaaatttatttattttatctttttgtttttaatagttattctatttcaaaatagttataaaaaaaacataaaaatttatccttttttttttatgcatattaaattttatatattcctatttttattactctcaatcaaataagtacactgctcccattgaaatcaacaattaccttaggtaagctttgtaagtagaccttaggaacttccatctgagcaagcacatttgcgttgattgccaaggcagccttaaggatctgattgcaacattctctacattgttgcagcctcctcctggcatcatcagacaacccatttggcctaaccttaggaaatggtacccaccatttctccttttgtctgccactatcacttgtcgaccctgcccttccagacgaagacgaagacagaggaatccttgcagtgtcatcactagcaacgatcccaggatcaacatagtaaaattcagagttatggaatccatcaaggatgctaagcagcatggtatcgagtttcttcagcgctggtaggttgacatagagatctgaacgtggtctactgaccataacctcaaatgccccactaccagggtattcttgtatggatggtgtaagctcaacaatggagtcactcacacataaaagccagtccatttctcggtgccatatatactttttttgaggagtcaatggctctaatttccacagttcaccaaacacagaaactgcaaaaatatgatatatcaaactcatgcttgtatttatatataataataatttgtatgcaacaatagaacaattgcaggtgaggctagccaggcgttcgccttagagattgtgattttaattgaacccaaaatttaattttgtcttgctccatatatcttaggacaacaattggaattatattcacataccagaaagattggaaatggcatttgagatagccagtgctgtacagactcctttgcctccaccagacatatcttcccctaaaagaagtttagcaaatcgctccttcatcaattctacttctgggaccataccaatataaattattattattaactcaacagatccatctacctctaatccactgaacaaaatatttatgttatgtataaacgagtagctagactcaccagaattgttagtatctgatatagaagtcatcttatccggaatgacaatgttcggcgtcggaagaacaggactgtccggaagaggagaattagaagtaccagcttcatcatgattgtagtgtggacgagagaagccactgctggagctctcgcactcactcacctcctccgtgcttaggctgttgctctcgaactcatcgtccgacgtgtagccctccattaatttaatttattccgatcatataagctcttatgctcacataacacgaccgttgattctcttctcgatagagattacgttaaagttccgatccatactggagatttgggtcatgactgactgagaagactaaagagatagtctttagtgaccaaaaagcacttaaagtgtgacccaaatagtctctgtttttggtttgagccacatttggtcccacatcggaatataattggtgactttttgttagttgggcattttatcacaggcgttaataacgagcgtgaaaatcactatccaatgatgattattatgttttcattagttttgctgttgcttgtgctgttcacgcgcttggatcttaaaaagatttggattgaggttgaggacgttaatgatatgggtaaagttaggttattgtgagtaatttttctgccaaccatcgaataaaaaagacagaatttaaaagagcgttatttttctacccaaaatacgtttcttattaatggagaaacgtgggagccaataaaaataaattattgtgctctaaaaaataaataaaatttaaagtttttagtatttataactcaattccaggagtagctcttttttacaccatttttttttatatatatttataagaaaatttaattatgcatgcttaaatgtatagcacagtctcttaatatgctactaattttaatatttttaccatatcattctaagagcatttacaattatatttcctattttttttagggaaaaaaacaggaaaattccaaaaaagg

SEQ ID NO: 297305 - DNA, 729 bp, Cannabis indica
ttttcctcatattttaaactttaattatttttaaatctcatattttttttattatttatttatactaaaaaaaataaactgtactacattttctcataaatagagaaaaacccctaattcttataatatagctttccaaagcccacatctatttttactttcttgtagcttttctctaattcaccatccaattttttttctctctctgaagcctttctatctagctagctctcaaaatcactaattttttctaagtaaatcatcaataattgcttgaattgtatgacagatcctcgttttagcaaataacaattttgaattttgaaaccgattttggatattttttttattattatttcaatttttccatgagaatctaggtttatatactttttcaaacaaaaataatctcacataaatagcaagtttggtactttgagaagaaaaataaatagttagtttggtaatcgattttcttattttgtgtcattctaaaaattacatctcattcaaattgtaacgtgataaatggttattttgaaaaataatttctaggcataatatagatccaaaacttcaatgaaagcccataagcactaacatgaccataaaatatgggcattttacaaaaatactggatttggggtaatacttttcaattttactaccacacggcagaattaacatttatactgtcttcccttttttttttcttttatactgtcaata

SEQ ID NO: 297306 - DNA, 2667 bp, Cannabis indica
tgtatgaatttatattgaacatgtattgttttctgttatcaaccatgtagtataaatttcaaatctttattgttggtctaacttggtttgttatttttaataggacaatccccaaaagattgtcacccattagacaaacataaacaatgaagaagtttataaaataagaataactttgactctcgcctaaacggaacatcgttggattcttattttaattgaaattattctctttagttttttctcatagctttttcattaagaaattgtttaacatatatcattggacaagaaggtttattaatcatctgcttatgatgtcagaaatacgcattagtgatataatttatcaattatagagattttattgagttctaggtgtgccatacatgttatatacgaattttggtatttttatgtttcatgcctgttaacagtagaaattcaacgatttggcgactactgtcactttgatacggtttagtatctaagatttagcaaggcaagatttatagacaattagaatattaatgttatacaaggtgtttggttatgatcattttacccttagtttaagagataactttaaagctaaattaagggcatttttggaagttttcacctaagtattagttaaagtttagtggattttaatataatacaaaggatttttatgctgaattattagaaggactaagagagaaaaataaaataaactcaaaataaacttactctttctctctcctaactttctctctcttggcctaacctaaaccaaagcagaagacctattcaaaccaacattcatcatctcagctaggaattcagggtggaattgaaagaagtttaaggtaagccctaagctattctctccactttgaattggaagaaaaaagttgatttttatatggtttttgagtttgataggttttgtaaagtttgtctgggtttggaattgtttgttggctatttttaaaggagaatattattgtgataggagtgtagtagcagctgttgttgttggaaccaagttttcagttttgaaaactcgaagtttggtctccaatggtggattttatttcaggaggtttttgatgcatttaagtgtttgaatatgtttaaaacataattttaggttttttggaatgttttagcaagtttggggtagaaataagatagaaaagattgagtttgtgaactttgcatagaaacaattcaccgtttcttttggcagaaccttgataaatggttacttgtttggggtgattttcgagtatcctgattttaacattttctcgatatttaagatattgtcatatgctatttatggatagggaaactttagattttgagtttaagtccccgaaagtgtttagcaagatattaccaattttacgttatttgacttaaggtctccgatcttcgagaagtttttccactcaggttgactggtgcacttgattacgaaattgaggtaagattaatataacagattcacatatgcacatgtttagtgtacatattttatatttcttaattagataacatatcagttagagtggtattggtgtgcataaagttacaccaagatatcaacagatatatgtttggcaattttcaagaagtgtgacttaatgctaccaatactagtacgcctagagtactgagtggatgtgatattatagttagttgtgctttcagggagtacaaactggtgctaccaacactagtacgcctagagtcctgagttcatgtggtattatggtcaattgtactatagtcaagaacgttcgatacttagttatacacattggagtacgaatagagtactcagtgcatgtgatattatggttagttgtgcttttagggagtacaaattggtgctaccaacactattagtacgcctagagtactgagtgtatgtggtattatggtcaatcgtattataatcaagaacgtttgatacttagttatacacattggacgtaggttatagactcatggtaattaagtgtatgggcacctaattatacaagtcagatatatgtttatattttatgtttttcttatggagtttatcgactcacatttatgtttttatgtgtaggtaaatgccagactaaaacaagaatcatagtgaatttggagctcaatgaagattgtacaaatttggatggtgaaacctcaagggttgggatcttcataagaacatgagcttagttttgttagtcgttgggtgatacttttgttatgttgcattatgtgcatgtttgaaaaataaatttcgggatccgggattttatcaacagtttgcttttacaatgtatatttatgaaagtattttattattataaagtttttattatacacaattgtacgataaatttttttattagcaaatgctagcgcagtaattaagaaaatacagtaacgtgtctaaattagtagaacgttacaatcacttgattctagttctgaggaatattataattatttttaaatatagttattttatttttaaaaatttaatttttataagggtgactatccaatgattacatttttattaattggttatattttttttacctgtagtagcaaattacgaataggtaaaaattccctttttagaattaattaattataattaactattttttaagtaat

SEQ ID NO: 297307 - DNA, 9442 bp, Cannabis indica
taatttatgtaattatatatacacttttattaaaaaaaaatatatatagatcggtttaattcgggttaattgggcgatttagaataatttgtaaaccactcaatatatttattgagtggtttagattttcattgtattattacgagttgtattttttctcagtttattcggtttggtttgggcgatttgtaaagtttgttgaatacctctattaattgccatgtggccggtcataaaattgtcacatatatatattaagagaaaagtaggataatatatcttgtaatacttgcccttgaagttacttttagcatttctttaatatttgagaaatattaaagaacacttatagagtttaacactctcgtaagatataatattattattaatgtaattaaatattaaattctatttattttatattgataaaaattatataaaaattcttaattaattataaagtaccacttcatactaatacgagatactttaatgggacataacaatactccatactttatatacaaaagatatatttcttgagataaagaaagtcaaattttcataggtgctcatataatagtcaaataaagataagaattagtctacaaagtcttcgtttactcaacttttattttgttccacatacacatcatttccacaaagtagttgacaacccatttccaaaaaagaaaagaaaaaaaaacattttaaacatcaatcttataagtgtgaaaatattttttttctttaattataaggaacgggtccaaattgaaaccttctgtttctaaaaataaaataaaaaactatttagaattacgttttggtttaaaattttcgctgtcaaaatttaatagatattaaattgtgttctcgaataatatttcaggttattaaaaatttatctcaattatttcaaatactaaatgacgtttgacctgaatgaaaattttgagaacatgatcgtcttagtaaaaattgaatagaaatagataaaaatctttaaattatctatcttaatagtttaaaagaatttttaacagcataaaaaaatttagagaacacgatttagtacttattaaaatttaaagggtaaatattataattaatttcacacgatttaaattttcattcacatttgttattgggcaccagtaataatctttaaaaattattacattaattataaggtaaatagcggcataagtacccaaagttttgagtttgtaagcggcataaacccaatgattttttttagtagcataagtaccaaatatttataaaactgtaatttttctctattttcgtcagtacaggctccgttttaaatttaggaaaacttacaaaaatactggaattttggttaacttttacaaaaatactgtcatacggaaatattttttgtaaaatactagtaaaacacaaatcagaacaattcaaaacaacagtagaacaactgaaaaacactagtagaacaccagtaaaaacttaacacagtatactgcagtatgaaacttataaaaaaatacagtaaaaaagtaaaaaaataccgcctgacagtgtttttgtaaaaaaatgacaaaagttagtataccatgtaaatttccctaaatttattaaaaaaaattagaagtaactgatactacatattttcgtccagaccaaataatctagaatttgagtcttatacgtgtcctgtttaagataataagaagaaaattacagttctataaacattgagtacttataccgttaaaaaaatcagtgaatttatattgtcgcttacaaacataaaattttaaattcttatgacactatttacccttagttatatgagacccgaaagtacaccaataatattcacacgtaaaaaaaattttagacaccaatataatactatttttttttctttctcttttcgtacgcaattaatatttttcaatctgatcatttcatacccaacgcacgccaaccactactttatatatatatacataaatatcacccattcatataacatatatatctttaattaaacaaaaacacaaaaacaaaaacaaatggatcaaattcaagatccattcctttacggatcactctcctttatcaccataatcatcctaattttcttcatcaaaaccaaaaacaaaaaacactacaaaaatctaccaccatcaccaccctcataccccataataggccatcttcacctcctcaagccacgtgtccacagaatattccattctctctcggccaaatacggcgacgttttcactctttggttcggttcgcgccgcgtggttgtcgtatcgtccccgtcggcagtagaagaatgtttcaccaaaaacgacatcgttttagccaatcgtcctccactactaatgggcaaacacataagctacaactacacaactatagtggccgccccatacggcgaccactggcgaaatcttcgcaggatcggcgccgtggagatcttctccacggcccgtctcaatctcttactcaacatccgtaaagacgagatcgaccggttacttcgaaagataaaccgttcgatctcgtctaatactgatcgagcggttgagatgaaatcgatgttgactgagctgactttcaacatcgtgatgagaatgatggcggggaaacgttactacggtgatgatgtcactgatgacgtggaagcccggaagtttcgggaaattatgaaagccgtttttgaaaacggcggagctgggaatcaggctgattttttgccgattttgaattgggttccgaatagttatgagaagagaattgagaagcttgcgaagaagactgactcgtttttacagggtttgatcgatgagcatcggaatcggaaagatgatgatgatgatcagaatagtaatcttgatcggaatactatgattgatcatttactcactcttcaacagtctcaacctgaatattacactgatcaaattatcaaaggcttcgtactggtaataataatgataaataatttaattattttctatattttattatttggattatttgattttttcttttatttttttttattttttattttattatttttttttttgagattattagatggataaaattattatttgatcttgatagtgcaaaataaatactatttatataaatttacagtttgcacatggaaaagaataattagacaaattattattttgaaaaacatgaattatgtatatacaaaattgaattattattatgtgggaaacaataaatttttggtaaagttttggtatatatccctattcatttatttgtgagtttattagtctattatttgtttttctttttataatagtgtattatgggaggtaatttgtaaatttttaaaaatttattaagcaaaataaaaaaaattattgaatgcatactattctttacaactttattaattattattgttatttatttatttattattattattattatttatacatatatgatatattatatatgtcacttgttcattaatttttctggttttgcatacggattcaaatttactagaaagcatagtttttgttgtaagctattattaaatattttatatgaataattaataaaaaaaaattacttatgcacttttgttgtcatcaaacaataaatatttaagtacaactttttaagtatttttattgtggtaatatattttaaaaaatagaattgtgacttatgagtgctctaataactattttttttccgttagatattactattggcaggaactgatacatcagccgtgacactagaatggacaatgtctaatctactaaatcatcctcatgtcttacaaaaactcaaagatgaactcgactctcaaattggtcaacaacaattagtagacgaatcagatctctctaaactaccttaccttcaaaatgttatttctgaaaccctaagattataccctgcagctccactccttgtgccacactattcctccaatgattgcaccattagtggatttgacgtgccacgtgacacgattgtattggttaatgcatgggctatacacagagaccctaaattatgggaagatgcagaaattttcaagccagaaagatttgaaaatattggtaaaggtagtgagaatggtgaagggtataaactaatgccatttgggcttggaagaaggtcttgtcctggtattgggctggcccaacgtgtagtgggccttacattggggtcattgatccaatgttttgagtgggagagagttagtgaggagaaaatagatatgagtgaaaataaaggactcactatgcctaaattagtgccattggaggctttgtgtaagccacgtcctattatggatgttctcttttcataaatgtaaaatttgttaaaacctaattatgtagtgattaggtatactattgtgaaaatgaaattgggaaatgaatatttagttaaatactttatattttaaatagatttaccacgtttttttggggggggaaatatatctatttctattagttgattgaaatatagtatttttttttttaagaaaaataaaataaaacaatcaaatacatgtatatttaatactaaataaatatttaataacattaattagtgatttgccaagtgaaatatcaaaattaaatattgaatggagtttttttagcaattaaaatttataattaagtttttttaattaattagatgaattttcatttataagcgcgagaatgtacagttttttttatatcaagaagaaagaatatcttattaatcaccaataattgctacaaatgcaagacaattgaaatttcatttcaaagtattaataaaaaatttaaaatagctaaatctattggctaaaatattgagaattctagctttaaaatttcctttaatcaactccacaatagagtgactttctatcatatatggatgagtataaatgagatgacatgccttgggagcagtttagattttccaatctatttcaagtatataaatgcatatgagaactcagataatagatatgtgagattgatatatatatgcaaagaaaacaaagtgaacaaacaaaactttcctcacattttttgagtaactaaataaaagttttacttcctaataaataaataaaattttactttttacgttcaaattttttttaactgatgtgatacatgattattcctaaaattttacagccaatgaaacattcatagccaagaaattatgagtgaaaaaagaaagaaaagacacttctaatttatattatatataattacaattctaagtacatatattaaatatgtaaataccatgtctagttagaatattctaagttcatcaatggattaagagaagaggacatccataatagggcatggtttacacatagcctctaatgggacagctttaggcatagtaagtcctttaccttcactcatatcaactttttccttactaatattttcccattcaaagcattgtatcaatgaccctaatgttaatccaaccacacgttcagctagtccaatacctggacaagcccttctcccaactccaaatggcatgaatttatatccttcagtctcactaatattattactctcaaatctttctggcttaaaaatctcgggatcttcccaaaacttgggatctctctgtatggcccatgcattcacaattaccattgtgttacatggtacatcgaatccactaatagtgcaatcgctggatgagtagtgtggtatgaggagtggagctgctgggtacaatcgtagggtttcgaaaatgacatttcgtaggtacgatagtttagtgagattcgattcctccaacaattgttgttgaccaacttgagaattgagttcgtctcttactttttgtaaaatacgaggatgattcaatagatttgacattgcccattctaatgtcacagccgatgtatcacttcccgccattagtaatatctaaaataaataaaaaaaaaagtttattgttatagtattaatgtagtcaaattaatattataatgaaaattaaattatttaatcaaattaaaatattgatatgtacacacatatacaataaattcaaatcccaatctttcttacttttaatataattaatgattaatgatatatttcatacaaatcggcacattcatgatgataattatattaagagaattgccaaaaagtattattcgtgtttagcataatattataccgcaaataattgatgccatgcatggaggcgtctaactccatttttcccttcttatatgttgtgggttattatgaaataaccgatggtataagatctccttaccatcgattaattatgagtcactcttacaatgtagtttagaatagtgtctagaaagtccttaaaactacctctaaagctcaatttttctaacagtgtttagagaatatcattaaccaacataaagtaccacatataaaaggtgatgtagccaataacaatacttagaattaatggtatggtattaattctcatacaattgtttaaaaattttagaattaaaaaaaatagtgggacccacacaaatcaaggaaaaaacaaagagatgtccccctatttttatagggagatacattttcctttcctaactaattactttatttttttttttttgaatggaactaattaatttatttaaatttaaattgtattaattaaaaataaaaaatatatataaaatatcaatttaaattctatataaaatatctaaaagaattaacaactgatgtttacacatatataatatttattattattcgatataataagctaccttagccttatccctgtacaatattcaaaggtttattggacttttcctagtaattaaaatataatatctacagtgatgtcacataataatataaggaccatccattctcaccttatcttttaggttccattgctatcaaattaaaatagtaaaatacattcaaaaaaatagtaaaatatatcaattttccaagtattaatttatcatatataaaacacatttatttcgaactttctaatattttagtggacaattaattatatcaaataaataacaacataccaattttcgaattttatttttatggaaataatataactagatttttatttgattgaggcttgtatatatctctctgataaaaaattatatcaataatattattatacatatttatggtaaaatattatatttgactaatttatattatattttcataaataattgtttaattgagatcttaatttgtgtatatattcggtgcgcatgttttaatatcagaatatgtcattttcaatgttatatattaaataagttgttttaagttatagcacttatgatttcaaaaaaaaaaaaaaaagttaatagcacttacattagattaaatgagataaatttaagttattatataacttattattctctataatatcaagaaaaatgagaaagttttagaccaataaataataaaatttagaaaattattaattttaacctaataaattaaatattattttactatttatttattgttaattatatttttatacactccaactttttgttataaacaaaaaaaaaatagcatcgcgataaatggctatattacttaatattttatagaagttaaaaattatattttttaaaatattataaaaataaaattttgagttcaattttaataattttttctaatgtaattaatttgaaaataatttttagtacgtaattaattttgttaacaattttatattgagttattattacattttatttttaaaaaatctaataataatactatttattattattttaaaaaatatataacctaatttatgatttaagtaaacataagttgttcaataaatatcttttacaaaaaatatataattcaaaataaaatgctatttactctatattatatatgaaaagtatattcaaaataatattattataaatacattgcaaaaaaaataatattataaatataaaataataataataataataataatataaatatttcacttataaaaaaaataaataattaccagaacaaagcctttgataatctgatcggagtaatattccggttgagattcctgcaaagtcagtaaatgatcaatcacagtattccgatcaccgccatctttccgattccgatgctcttcgatcaaaccctgtaaaaacaagtcagccttcttcccaagcctctcaactctcttctcataattattgatcggaatccacttcaaaaccggcaaaaaatccgccgggttctcagctccagcattctcaagaacctctttcataacctccctaaaccgccgagcctcctccgccacgtcatcaccgtagtaccgttttccggccatcattctcattatgatgttaaaactcatctctgtcaatttcgacctcagctccacccggctccaccctccgccggcgccggagaattggcggaggagccggaggatctcgtctttacggatgtcgagaaagaggttgagacgggttgaggataagatctcgacggtggcgatacggcggagattccgccagtggtggccgtaaggggcattgactacgttggtgtagttgtagcctacgtgcttgcccatgataagaagtggacggttggctaaaacgatgtcgtttttggtgaagcattcttctaccgctgatggggatgatatgattgccacgtggcgtgatccgaattgaagagagaaaacgtcgccgtattgggttgagagtttttgtaaagctctatggattggttgtttggttaggagatgaaggtggcctattatggggtatgaaggtggtgatggtggtgggtttttgtactgtgttttattggttttggtaattttgaagaaaaaaatggtgaagatgataatggttattgttattattattatttcttccattttttttggtaatttgaattaaagaatgtagtttgtgataatgtaatatataatgatgggaatttggatatgggccacaaagaaattaataataaagtgatattattttgtcacgttgttatgttgtgttatctttttcggttcatgaataacttttgtacaacaactcatagcattttaaatatgaatgctttggattttgctagctatttctcgtatcaaaagtaaatcttgatgggactttttggtcggtttgtaatgggttgcttagtgggtgataatagtgttagagattttatatatttgggaagataattaaaatatataacgagtcaactgtgaaataagagattgatgttaaatatatatatgttataatatatataaataaaatgtagaagaatttatagtaagtgttagagattttataacaatggaagaaaat

SEQ ID NO: 297308 - DNA, 5394 bp, Cannabis indica
actctattatttaatatattattaaattacttttaatacttttaatattatattaatacactttttgataaaaaaaaataaaaaataattcaactaccattgcttgacagtagcccacacaattttctttagtagtcaagcaatcaagattgcttttcttagactgacaaaagcttgatgagcaacgagcattgaagctgctctaatggatttccaatatcgaaattaaagaacaatttggactatttggactgaacgattagagtggtacatgaccaacaagcaagacctgccgttgataaggaattgaagctaaatgtgaatgcatctattaatcttcaggctcgtgttatgggtattgatactattattcgagatgggaatagtaatgtactagatgctttctcgaagccacttatcgcctttttctagtcttctttgggcttctcaaaactaatgctcttcgggaccatatgtttcatctatgttatcatcttttacagatattattgtagaagttataagtcttaataataataataataaaagaaccttcccattttttatcccaaattatcaaataatgattgattttcttataggaaaaagataagaaaaaaggaaatattaaactaataaacagataaatctagaaacctacactggtttctaattctattaccataaaatagagattaaattaaaatcttcaattatagaatgtagaattaagcttttcagtacaagtacagaaactccaagagtggcttttttggaccacattagaggaatagtaatatggtaatagatgatattttgagtatagaacgtcataaatatttgaccctctcaccagacagaccagttccactagataaagtttggtgtgctaagtcggccatatggggctggctgctatactactaagatgtgtataagtttcaattgtataaacattcatataaatatatatatatatatatgatagtatacatacatacactacacttatttatatcattgcttttattgtgttgttttgttgattaaggctgtggacggcacagcttaagctgtaattgattcatttgcttgcaaaggcagccatgtcaaaaggcaaaaggcaaacccaattaggtctccatgtctcacttttccatccacacaccaagctctctctccccttgtaaatcaaaaccagtagtttgaaaatattgagagagcaaaaggatggtgacattctgccattttaaaccaaaaccttgtcatgaatccaaatatctcaccaccatttcagctacaatatttggtcacagcccttcagctttcttcttccattttcatatttttatttccattaaattcaggaaataagatcagcatggaagatatcatcaacgctcccatgtcattttctttccctcagattgcggatgaacatggacatgacagtagagtttagaataatgataatgctacaattgatactagttaaacggattcaatatttgacacacaaaagtccccataaatcaaatagcatccatccattaaaacacaattcaataaaaaaagacaatgataaaacagaaggaccaaggagaggtgataagagaagctttttgggacattcccctgtatgtctaagcaggattgacacagcataacaaactatatattgcatgttgaaaatgcaatttgatccatggatatgtatatgatcttgaaagctactagaagtaggtaccttccggaggttgaaccaacttccggttatgtggcgcagccatctctttcttcagctgtgtcagtatatcttccatggtgtactcacgctgccaattcgcaaggagtccaaacttcttcgattccacctatcatgttcgcatcaaactaagaaattattatctacgtcaactgcctctttgagggaaaattacaattagaatggaatttaggtttgattcaaaaagaggatcacaatagaaaatctagtactctcatgcacttagttacaatgcaatacagataatgtcaacgaggtaattttcattagctgcagtaggaaaaattgtaacctacacaaatcacaatataacttttaaaaagaacaatgaaagtggagacttaccactccggtttcatggttgacacaagtcatgttgatccgtgaatgaaagcgaacacttggtggtctctctgggtaatctttatcacagaaaagcttcagctgataaatacgaccctcatgtacagtctggaaaatatatggaaagcaaaaactccatgtaagaaactacttcagaagtgaaactacacacactatgcagcaacaatttgaggaggcaaacaacaattcaataataatttatacacacaaccttaaagcatatgtataaacaatatagaaacgaaaagcaaatttgagcttgttacattgtgaggaccaattatagtgccggtccaagagcgcatgtaaatgtcatctccatcatccattccatagctgacggtgccatctccgattcccttttctccccgttcaagttcctccagcaatctaaagttacgtgggactgcatgactcaaaccattttagataatgagtcccaaaactgcacactaatagccatattatcagacttgagataagcctgtttaattggttatgtaactgatcacgagtaagctcagcacagtacttttctaattatggggtgatatgctccccctgaataaataaactagtaatgaataattcgtacattactcatattccctccaccccaattgcctttttttcccaaaaacctaaatcaatttcatatctgaaatggttctaaattttaaaatataaaccacagtttacaaagcacaaaatgagaaaagtaaattagtcagcaagtctattacaattgtggtttaacaaacagtcaacaaaattcaacaatttccaatctttggttcagaaaaaatgattacaaccaaatttacaacaaatagcatatgcaatgagaacaagaattaaaaagtgtacagcttgataagttcaaccaaaattggtttgattttcttaattacatgtcctagaaaactcaaaagtcaaaacaaacaacagatgtaaatagaactttataaacatattgaccattgaataacaaaaactgcaataagggaactgatttaacctaagatattaacatatcaacattataattcttaaacatgcgagacatcctagcttcctcttcgagtgagaagaacaaataaatgaattgatacgcagttgggtacagcaatttgaccgcataaagcaaaattgcatgacatataaaaccccaaagtcagtacagtttaacaaattagatgatcatcaagcatcaaactttaactatttattccatcaaaattcaatttttgcatacaaatatgatcaaacagacaaaatatacacttatgatcttcattagacccttgaacaaacaactcaatttcataccctgaagcagcaaaacctaaaatttatattcgatgtataacctcctcaagtagagacaacttatatgagcagacagcagagatgcaaatttatatctataaacccaaaaaagaaaccatgaaacaaattaaattttctttcttaaaaaaataaaatacaacaacaatcgaatcacttcattagacgtaccaacgatgagttacatagataagacaaatgcatgagaaaaaatgatcaaaacccattaacagatttgatccaagttcacaaaaaagcaaaagatcaaagcaaaaaaggaaagttctgatcatgggtcggcacaactcacccacgacactcgatcctccagagccaagcgtcatagataataaagtagggtgttctagagaggtgggtttaaggagatcagatcgaatcagatgagatgagatgggatttctgggttacagggaaagagagtcagatagatagagagagggattgagaatctttggggaaataatggtgaagaaggcgatggtgggaataaagaggagaaaacacagagacgaaaaaaggagattagataggttaaaaaataataaataatggcaacacttatgtgtatgggccactatttttaatttctttttattttttattttattttacgaaaacaataggggtaagttgaaaaatgccccttttattgatcccctaatataagagagtcacataaagagtatcttgaagtgacaagggcaaaattggtacaatatttaaaaaaagaggtaaaaatgatagactttaaaaaagagggtaaaaataaaagaagataatataaaaagtgtatagagtataatttcctctaagaaatttataataggccttacatctaagtgagaccttttttgggttcggagtccagcccatttggattaactttctaaaaacaatttttgtaatttacacgtggagattttaaatataccacagaaagtttagtatagagtgaaaattgtgacataagtcccaaaatttttaatttaatgcagataagtttccaatctcaaaagatagcaataatagtcctaagttcactattttgtaagttcgttagtcttctttttaaacagatctgttagatactaataaataccacatgtcaattttttattggtctaaattgttgacttcgcttttggccaatgatattgagtctcgaaagcgatataaaatcaattagtattaaataagaatatatttaatatcaagcataaactaagaacacgaaattttatagaagttcagccccattgtttaataatagcttactcctctttttgttgtatttaacttgtgagaaaagaagcaagaacgacttgatctctctcgaaagctttttacatgaatttgagcagcataatagctctctcagaaatatgatttcggatcccttcataatggaaggagtttttacacctgttgcccctgattttgcccaatatacgtggaccaaccagacagggacacgtggacatgaaggttttaacattcaaattaatagctaagtctttataaagaaaaggctttatcccggacgtacctcccggagaaggcatacgaggttttctatgctcctggagatcaaggtggcatcgaagcatctccgggagatgtcaggcttcctctgagcagtcatctcgcatttaatgccgcatgggaggaggcgtgttggaactgccacacgcaataaagtctgacgacacaacccccgatctgcacctacaaggctatgaccacttaagtctagtgacggctactctgtgaagaatcacatcggtcaaaagggaataaggacaagcctcataaaatccctacagcacctagggatttgaccatgcattacccatggt

SEQ ID NO: 297309 - DNA, 3386 bp, Cannabis indica
aaagttacttggtttgaacctttaacataacactacttaatatttatctatagatcaatcttggtttcataaagaatagaggtgtaatagttgaaagataatttgttattgttgtcctctcgagcatttttgctaaatacaagaactataaggctggtaaatcctataaactcattcaacttgataaatggagaatttttaaccaacataataatcataagtgcgatcatgctgtatcttctcaattaaacaccaaaactcttctttttgcaagacaaatctacaaaaaacgacacaacacaacaaaaattgccaaatacttggagagttaatggggtttacaaaaaatagtcgggcgttcggcgagtggtatcaggctcaacttgacgtggagcggggtcaaactgaaggaaattctgttccatattctctcctatctcaagaattgcagccatatttccacaccgataacagtaatttggcgcactaaacactgtcacaacgttcttatcctacaataagtaaataaacttccttcaaacaaaatcaagtcaggaaaaaaaaatgaaaagaacaatttgaacatgttgactaacctggcaccaattgtaaccctccataacaagctggtgagctctagaaataagagtgagcccatttgtgtggttaaactgagaggcaatgtcttgaccaaatgtgtatccagcaccccgaggagatattccccacccacagcgatcatccggatcagaccacaagagatcacacattggaccctcatgaggaacctattcccgtgcaaacatcaaaacaaaactaaagttacaaggcaacatacatcaaaactaagactagttaaccttcttcaaaaacaactgcacatgaagatgctaaatcagcagaaactgttctataatattttttgatagaaaactattgattaacggtagtgttgaatctaaaaattaaaagtaacctaagagcaaaagatgttttaatggattatgttctgtactttatgtctgcagcatccttttgaaaaggaagtacaatatacttgagtatagtgtgcattgttagcttacctcctgtatccggtccagagcacgaatattatctaaagtatctaaagatggagagagtccaccatgcaagcagaagatctacacatgaaaatgagtatgtttgtcagcttagatatgatatgtacatatatatatatcaaagggaaaagcaacaagaaaacaaacctgactctcaattaaagctgtaagaggcaggtaatcgaaaaggtcagtgaagtacttccagacattagcatttccatatttccttaaacattcgtcataaaatccatacctggatgccgaaaaaataacgtaaggtgtaaaggttgacttacttttctacattgtatgtcaatacttatactcaatttttaggaaaatatacagaaatcttttgatagccgtttaaattcaaactcccacagtgcatcaacatggtgaacaaccactagtggttattgaaattaacaatacaaaaattcaaaataaattggtcaaagatatttctgaataaccttctagtggtaaaatttaaagctcaattaatgactgtggacaataaagataaattttacaatagcaatacaaaaaaaacttggacaaactccagtatcagcagttaagagttctgtaaacttggaaagaatggagccttacacttgagtaatttgccgactttcatgatttcctctcagaattgtgattctatctctataacgcactttcagagcaacgagaagtgagacagtctccactgaatagtaccctcggtctgcatatgttgaaaatttatatcaaattaattatttttcttttaagaaaattaacataatcaagataaggtagtagtactaggatttgtcataaaaaatgatgcttcaacagttcagagaactaacacataatcactttatctcccttcacatgaatttaatgtattggttagtatttagaaacaactgaactacttcaactacaagaataagtatcactacagtctacagagaccactgagtactgaccatccataatcagggagagactttacttggttttagacttttagttgattatgtccattcatcttttctaccaaatttcataactcaaagcatgtaacagccatggtgaagtaaacaacttgtattatcagacagtgaagtttacaattcttatacagttattctaaaaaacttaaagctcagaaaatgtcatccatatacaagttcaggctgttaaaatatattattttttccatgacaggggaataatatgttctcttgcaaattgcatacctagttgagtagagggaagtcaaattttaaaaacacatgcaaaacccaatttcaaacctgtaaggagggaggtcctgctaagatacatttataagcaattgagtaaaagaaacttcccatagaaaagccacaagcctagaactatcaactgcaaaaacattgttccaataaacaatccgcaagcaatgcagtttaaaacttcttaagaagaggagacttcccatagaaaagccataagcctagaactatcaactacaaaaacattgttccaataaacaatcagcaagcaatgcagtttaaaacttcttaagaagaggaatggttaaggttttgtttttgagtgatagttttaaaccacactgctcatttagaattattagggaagacaaccttaaagtgaataaacttttacaatagaactaacgtttcggcattgacattacaaatctcttttaacgatttaattttgtgaacctaatttcatcgaattttattcatatatctgaatgtgtgagggtgagctagcctatggtgttttatttataaacttcgtattgggactgactcagaatttttggaatgggctataaaattttcatgataaacttattaaatgaattacaaaatactgttgtcaaagttataaaatcttgttacagataaattagtaatgttaacttttgatgcccattagaacttaactcatttatgaccaaaacaagaagatttaagttattcaataatataatcgtttacatattcttataccactcatccatccacctactagttgaacaactaaggtaaaaataggaagaaaaaaatggaagcccctcaaaagttgttaagttctaacaaccatggcgtttaaaaagaaccgtaaaaacaccagccaatatacaccatttcacttgtcaaatccaccatgaataagaccatttccccctaaaatatcccatccaatatacgaacatgaacatgaaattccaattcccgaatgataaattaaattaaaaagtgaatt

SEQ ID NO: 297310 - DNA, 2416 bp, Cannabis indica
aaaatttgcatcatactgcagcatgaaaatctatagttacctggctccatggcaagatcccaaacttctgtcacagaatcaattccgcgttcttgaggagcatgtaaaacaattgtcgtagaacccacaacacatagagcacaaccaagtattccaaatatatgaagtttctcccgtagaataatatgtgcaagtacagcactgcaaataaaatgatcatcagcactaaaatactgtaaattcaacatgtcatggtaggtataatttgtatgtagcctacctgataattatgctaagggcaccgagaggggtgaccagtatagccggtgcaaatgcataagctgcaaagttagcgatttctccaacaatcactgtcaaaatggaaacaaatcagaatgtacatttctttctcttccagcagagcagacaaaaccaaggcactataaatagctcaaatagttagcaagctgaaaagcttaacaaatatagtttataacaatacaaatgtcgattggaaattgaactgcccaggtaatatacaatcatatagatactataatagttggttaagtgaaaaatagccttgtgtaaaatttctgtgactcaactgaatagaagagtaaaagaataaaagctaatgaacagatccataacagaacaaatggaactcacttgtaatcatgcccacccaccaaagtggctcgtataagtaagaatatcctcccacacctgtggaacaaatcaaagtattcaattttaggtcaattttatggacctccgcaagagctcctaaaacaaatctatgatttaataataaataatcagaaaggagcaaactagcatcaaacttaagcaccaacaaccgcagagctagtagaacagatccaatatagcctaccactctatctaatcagtgtaaccaataatgaaagtattaaattagacataaattgccatagtagcacaaagatcacacaattgggccctattctaagtcctttatataggccgatcatctacagaattggatcagaaatcttgttcactaacacaaattcccaaatcccattttccactaccctcttcttcactatcacaaatgcccaaagctcatttctcactatcacccatcaatacaaaaactacggaattatagcaatatccacattaaactaacccagttcctcacatcacaaatccaactcccagaaggggcaaatgagcactgaacttaagcacgaacaacttcagagctagtagaacagatccaatacaagttaccactctatttaatcactaatgagagaattaagttagacataagttgccatagtagatcactaatgagagaattaatttagacataagttgccatagtagcacaaagatttgggccctgtcctaagccctttatataagctgatcatctacagaattggatcagaaatcttgttcactaacacaaattcccaaatcccattttcaactatccccttcttcactatcacaaaattcccaaatctcatttctcactatcaccatctatacaaaaactacaaaattatagtaaaatccaacggatactaaaataacccaattcctcacttcacaaatccactacttacagcacatttgacagttcaactcatttcccaaatcatacttaaaattaaatataaaatcaaaaccccaattaacttgggttcatctaaatctcaaacattgcaaatcaggatatgaacaaatttatagaacaaaaatcaaagctttacccgctctgacaccggaagccccagctttcttcaaaccctttttcttaacaatgaagctagcaccaatgaagaaacttgaagaaagagcaagaaccaaacccttgatattatcagaagacatacccttgtatgcatctctccaactgctcgaactctgagtagtctccattcccaaacaaaaccgaagaagaagaagaagaagaagagaatcgaacaaaccctaaacccacaccacaccttttctcctcttcctccaccacaccacccaccaaccgaacgagtcagtagtacagtcttatcataaaatcacatccgccacaacaaccattattgtttgggactgaaacttcaatgataagatatagaatcaatgctgaactgagttcgaactcggccgagtcacaacaaactcgggatcacaaaaaacagagacaaacacagatttagattgagaaaacaaaaacaaaaaaactgaaaactgaaacaatttgtcggcgcctgatttaggtgtctacagctgttgttgtgagtgtttgagatttctttcttggatcggaaacggaagagagagaaagtagagagagaaagtagagagagaaagaagtgagagatagagagagtgtgtgtgtgtgttgttttttctt

SEQ ID NO: 297311 - DNA, 6489 bp, Cannabis indica
gattggccaaaaaggcgcgttagtatatgcacttctttacatgttagatttttttattaatttaaattattgactcagctttcttcttcctttgactatatataaaccctactcccacggatcttattcttctccgatccaaatttcgagctctctccacaatcaaaaatggcgaatcgaatcttcatccttctcgcattcacagctctcttcctcttctccaactccgttctctgcaaagattccaccaccaaagacatctccgacgatgacgacgaagatctgagcttccttgaagaatccgacgaaaaaaccgacgccaccgcacatcacgatcacggaagctttccagatcaggaagatttcgaaggtgaaggagacgatgacttcgagaatttctccgatttcgatgagtcggagcacgatcaggagaattcgtacaaggagcctgaagttgatgagaaagatgttgttgttttgaaggagaggaactttactactgttattgagaataacaagttcgttatggttgaattctacgctccttggtgtggtcactgtcaggctttagctcctgagtacgctgctgctgctactgagcttaagggagaagatgtggttttggctaaagttgatgcgactgaagagaatgagttgtctcaggagtatgatgttcaaggttttccaacgattttcttcttcgttgatggtgttcgcaagccttatcccggtcaaaggactaagtaagtttcattttttctcattttcctttttaattgaatgagaatttgcatgttttagaggacgttttatttaatttgattttgtttgaaaattcagagaggctattgtgacttggattaagaagaagattggacctggtattaacaacatcaccacgactgaagacgccgaacgcatattggcttctgaagggaaagtcgttttgggttatttgaactctttggtggtatgcatttgctcttaatttctatttatgtttatttagatctacacaatgtacattgtagaaattgttaactttataacaaaattcgcaaccttaagatcgttttctctgtaagattatttgttttttgttgagtaataatatgtatacacataaattacactcaaacatgatacacagctagctaatgtggcaagtgtatgacctcttttaaataaagatgattggttgaaattaccatatgagtgtgtgttaagtttgtgtgtaaattatgtgcatacataattactctttttttgtttcttttaggagtcctattattgtataggataggtgggaattctcttttgtggagcaatgttcttctaatatttgtgctaacttagtgatcaattcattaattaatttgtttctcctagatatatgtgttaaaatgaagaaagagtgctagtaaaaatgtaaaactagtgattctacatgcacaaatttttttattgaattttggataccaaatgatgtgatagttggtttgtcatgtttttaattggtttattgtaaaatatacataggagaattcaatgtatgttaccaattacattccaataagtcaattgtcatgtcatttggtatctaaaatttgatgaacaacttggtgccagtagtatctttcatttaggaatagggagactgttctgcgtttcttatgaaatattgctaaagggtatattttttatttgttcattacgagttttactgtactttttaaatagggatcagagagtgatgagcttgctgctgcttcaagactcgaagatgatgtgagcttttaccaaacagtgaatgctgatgtcgcaaagctattccacattgatgctgaagctaaacgccctgccttggtccttcttaagaaggaggctgaaaaattgagtcacttcggttagtttctaaatattctctctctatatcccgctctatttcaaatggaatttgaaagtgaatttcaactacttgtctgtttcttatttttgctttttatttctgcagatggtaagtttgaaaagtctgccattgctgaatttgtatttgccaataagcttcctttggttactcttttcactagagaaaatgctcctgcaatttttgaaagtacaatcaagaaacaggtaaatgagtcgtatacatgtaattgtacaaatgaatatattggtattttaatggaaaaagctattccattggcctttactcacgtgtgaaattgtgtgtcctcagctgctcctgttcgcttcttcaaaggattctgagaaggttctcccaatattccaagaggcatcaaaatctttcaagggaaaggtatgccccattacttttcagagctatgaacattgttttatatattgaatttttttaaaacaaaagcttcattttgcgagctcaataaaattggttgcttgtaatgatattgccttgaaaaaatgtggcaaactaaatttatggcataatgcatacaaataagctttggcagctgagagtcacttcaaacagtcaaatgcagataaaaagaaatttttaaaattttatgtctttcggtgagttatttattccaattctctgttatcattgcttgtagcttatctttgtttacgttgaaacggataatgaagatgttggaaagccagtttcagactattttggtgttagtggggatgctccgacggtaagcttttgtcctttgtatttaccactttttgctctattttatgtattttcactttttagtgttaacttctagtgatttcaactatgcattgcaatttacatctttttccttgcaggttcttgcatatactggaaatgatgatgccaaaaaatttgtgtttgataaagaagtgaccttggaaaatattaaggttgaaactctttctccgtctctctcatttcgttttatttcctggaaaaatactggatttcttggtcctcttcataaccttagttgatgcacaatagctgaactgaacgtaaaaaaaatttcaggcttttggcgaggatttcttggaagacaaactaaaacctttctataagtcagacccaattcctgaaaccgtgagttattcattctcactttactcgccatttttatgctcccaagtttcttatactttaacctttgtcttatgactcaactgatgcagaatgatggtgatgtgaaaatagtagttggaaataatttcgatgagattgttttggacgagtcaaaggatgtccttcttgaggtaagaaacattaaaaaactgattaagttatcttcttctctttgtaagagggtcaactaatgttggcgttgaaaattcagatctatgcaccttggtgtggccattgccaatctctggagcctacatacaacaagctcgcaaaacatctacgcagcattgactccatcattatagcgaagatggatggaacaacaaacgagcaccctagagcaaaggtaatcccaaaataagacatggcaaatactgaatttgcatggattgtatagctaaacatgaatgaaaattttgactttgtattgagaatttttccttattttttccaggctgatggtttcccaacgcttcttttcttccccgccggaaacaagagctttgaccccgtaagtaaccaacgacaattcatttattatatagttccgcagcatcgatattctctttacaagatctacaatgcttattatcttgttgattttggtattgacagattaccgtggacgccgatcgtaccgttgtggcattctacaaatttctaaagaaaaacgcatcgatcccattcaagcttcagaaaccaactactcctacaaaatccgagagcactgagaccccagagagcagcacaaccgcggctccaaaatccgaagcagcagctggggaactcaaggatgagttgtgagaagtttaaatttttgttttttatttgagtttcttgtactctatggtagaaaagtaagttattgataggtgaagataactggcagagggagactgattaagaaaaaggggaaagaaaaaaaaaccactccttcctcatccaggttttgagaaagtaaaaaatgaagcagagaagagaaaagtatattaacgcatctaactttcaagttctatatcatgtgagagatttcttcttaagatttaataaagttttctttttcttcctcttggttgcttttgaggtttttatatatatggtcaattaatatattctattaagctaaggattaatgtaaattatattatattatgtactttaaaaaaattgggtgggtttcgagatttggatcgtgatctgtaaggagaaatatcagataagttgtgcaatctcggtagttcatcatgaaagaactctataattaagtttttttaggaagcgtatgtgaagataaagtacgctggaaacactctcgtgttggtttgtagtacgtgtaagggtctgcttaaagtggggatgttacactagcagcaatggggtgggtgtttcggatcttgagggtggtgttgctctgtggttctgggctctacatgttttgccctttgcctcttcggcatggtgctcgccctattcctattgcagctcgattttggttttagaacattgttttgtttggaattgggaggggtgaatggatctgatcttatttattattgcttgtgtgtgtcctcgtttgatttagtattgttctttagttatttgctttattattgtaataagcttagtttggtgaaatgtttctactattctaaatttgtaattaacttgtgtgatgtaatgtgattattactattgttgtgagatctgaccaagaatttcttaccaattgtacaaatgattatataactctattttgttgagcattttaagggattcttatgttttaacagaacatacactcgaataaaaagttcaaactttaacaaaattatcaatgagtaaacataatgcatccacacaatttacatggcacaaaccacattaaaacataggacatcttcttttccatcaaacctaagtcttgttcaaaatgcttggcttgcgccgcagtgataatggtggtttcttaggataatctaaccgcaacaatccatttaaacaatgtatatacaagaatattatgattccttgtaatagatttggcaatgacgggttcttacgataatttaatagaataaactacactattttctatttgtatctcaaatctagtctcatcttgttaaattctcaatttcttattaagctactagacaataataattaagagctaattagtatgagttaatggcttcttatcatatgacttacaatattgtgttatacactcatcacaaaaggatatgggtttccattaagcatatttgcataatgaacttgggtcaaaatatcatatttttgtttatagtgtacacatgctaaaattaactaaaaaagcatatgaatacagttgtgtaattccattaatgggtgcatatgatatgattaataattgaaagacaattggaccgcactctcgaaaacccctcttgtattaagaaatcaaattccttaaaaagaagtacaataacaagaaactattccaataattaatgagttggtttgtctaagtttttcaagttacctctcttctcactatgcatttaatttggcaccgtatcacacattcaagtcatgtgtttacactaattaatagtataactcatcccattaaacttacttttacttcaaatgttcactatatagtgattctacttgtattatttgacgaccgactcaatttaggctgacattatttaatatctattgtcactctttttattttatgaggtgtttaagtgagttttacttttaagtttattttaagataattttaaactttttaaatatttgggtttgaatttctcctaatctcaatttctctcaactaaaatctaccaaatgaaactcttattttactgagtttagtctaaaagtttaaatgatgttgtttttatatatatatataatatatatatatatatataatatatatatatataatcacacatacacatactattaggattttcacttaaaaaaataggtgtctacacatttggtacactgtgttttatctaaatgcaagtttggtactctgtatttttaataatacttatttagtaccctttattttaaaattatacttatttggtaccctaaattcatatttttttgataaaatttaatcaatactatcaatagtctaaaattttatgaattctaaattctaatttatttatttgattacatataactgagaattgtttggttaaattaataaaattgtattgattaaattttattttaaggtaccaaatatgtacaatttaaaaatatgaggtaccaattaagtattattgaaaacatagggtaccaaatatgttttttataaaaacacaaggtactaaatgagtatattcccgaaaaaaattgaaaaa

SEQ ID NO: 297312 - DNA, 3853 bp, Cannabis indica
tttaggcttttttttaatatttaagggccgggctcgacccgaaataatatataccaagccgggccgggccgggccgggccagaagcccgataagagcccgaataattcgggccacagtcggcccttcgggccgagggcccggcccgacccgcgaaaatagcccagattgacattcccaatttaaactcaaagctctaggcaacctcaaatacttcttgggattcgaaatagcttgagctaaagatggcttgtttctttctcagaggaagtacactctctaattattggaagatataggctacataggaaacaaaccttctaaaactcaaatggaccccaagatcaaattggatgatcaacaaggcacccttctcaaaaatccttcagcataccgccaactcattggtcatttattatatctctaattatccagacctaacattacctttattgtcctcaacctcagtcaattcatgttagatcctttgacacctcatatgcaagccatcaactatttactttgatatctcaaagaaaaactaggccagggcatcctctactccaccacctcttccttacatctcagaggtttttcaaactcggttttggcctcctgtccaaccaccagacaatataccaccagattttatattttcttaggtgactttctcatatcttggctcactaaaaagtaaccaactattttaaaaagctctgccaaagcataatacagagcactagcagccataagtagtgggattaccaagctccaatatctcctcaaatatttttaaatagcacaagacacaccaactttcattgattgcgataatcaatccgcaatacatattgccaacaaccccacattctatgaaagaaccaatcacattgaactcgattgccactttatccgagaaaagatcaagcaatctactattcgtctcatttctattagctccaatctttaactcgtagatctcttcactaagccactgccctctacaacacttcattctcacatacacaagatgtttgtttatgatatatacagttcaccttcaaggggggtaaccgttttagtgtgcacagttggtgcttagttaagatattactgtctgtactatcaatattgttagttggtttattattggcctttagcttttgttgattcagctagtttagttagagctagtttgtctaactctagtcgtgctatttcttggttcttgattagctagctaactctagttagctcaggtctgttagtatatatatgtattgatcttgtatcatttttgttcaatgagttaactttattttctgtaatgaaactttgttcttctcttgattcattccgcaataatcatgtggcctgaagtagctgttagaaaaaaaaaatgtgttcaatatttggttttcggtgctagcttttctgtaacccataaaccgctttatttaatccatttgacacctaattaagagtttataacaaccatgcgtgcatgatattttaatttttaagtgtgatcatcctaaccactatatatagaagtctaaaatgttcattttggataacctagttttctatcaaaaagaacacttttctagaaggtctaaggcttaataattcccaatgttattttcatgagagttttcttagtgcttagagataggggaaataagattttggacaaaagtgtaatacattgttcaagtcatggtgatccccactaatttacactcaaagttgtgagtgagtatatttttattctactattttgaataatagtaatatatattaacacatgtatatagtatatcatattaaatatatagtgatatataatatgatatttaaatttatagcatgttattgtatgtatatatataagtgatatatatatatatgatatatagtatgtatatatgcgtaatatatattatatatatgtagagcataggactgaggatgaaatccagaaaaactattcaaactgacccatcgaacaccgttggaactgaaattggcggaactgaaaatcgaaaaacatggttatgatgttgtagttcaggatcacaaaggtcatgtggtagtaggttttcacttttctgctgtctcaggaacacatccaatttttgcagaagctgaagctctttcaagagctttaacatggtacacggtggtgcattttcccctcggtttgattgtctccgactgtcaactgctcatcaccaaagttatctagaagcaatagaactgttcagctctttcagacaaagtttggaaaatcatctcctctttatctcactttcctaacgctaccatccgtttcatacctcgacgccataacactctggctcataacattgctcagcaggctctaggaaccaatgaagaggtgctttggaacaattgtgttccaagttcttagtttttgtaacctttcttgttgtttctttgattgcagagctagttctttcaaaaaaaaaattatacaactcaagaagcttttcttttgttacaaacaatctcactagtggtgataatgattaaaaatgcatcacaccatcacaaccctcaagaactcactcctctctttctttactctctgaatagctccctctgaatctctctatcatgatctggttctctctcttaatgtgttacccaactaacttggaatgatagccttatataggctttggtgtagacccgagtatcaactttcataacagacaattagttaagttagatgcaacaagaatattttaggaagagagtgatatttggccaaacacaacaatcttatatatatttgtttgtaaacaaaatgaaaatttagcaaatgaatattatataacttgtttactactatatataaatattaatttttatatattgttcctatattaataattaataatgaacatttttttgtttacccattttcattataagtaaattaatactagtgtccagatatagaatactttccaaaatttggcttcaccatctcaacttcattatcatggtcgaccttgaagttgggtggatcttaggacaaaaaaattatttggtcttttattttaaaaaatatgtaatatttttaaaaactactaaaaaatacgtatatttttaaaagaaaaatattttttgagacccctgaattgaatgggccctaaacgcagagttagctcgccttagcccaatcttgttcattataatatagtttaagacagttatttataaatattatttgtatttgagtaaaattgtttagatatacttattaggattaaggataaagaaaagacgtaatctattttatttagttctgggtatcgtttttaagctacggttttggtcttgcagttttctccaatggatggatgcattaacttgtaccattttctttgtatttgtgttagaattttggaataagacatgaatgaagtttcatcctaaaactaattggtaataagaggagtaattcatttattttatatattttattatctttctacacattaacaatgtgggacagaaactctctaaatatttgtaatatacaaaatgagttaattataaatacaataattagttcaattaattagtactactctaacgttttccaccagtgtttaaagctgttgtatagtatctacttgtcaatatttcttcttttaaataataagtaatttctgttagggaaatttgaattattatgcattttttaatacaaaattggtttaaagaacacttagtgtaggtaatttttaaaataggacaaattttcaaaaaaaccccaaaatagccttgtcaaaaatctcaatccctttctctctcttccac

SEQ ID NO: 297313 - DNA, 2467 bp, Cannabis indica
tagggcataaaacctaacaggggtgacctggtgacttatgatgtaccttgtcaccagcatgataggggcccaattgtgtactctcttgccctatcaaggccatataataataaaatgatattttatccatgcttcttgtgcatgcttttatgttggctacgtaatgactgtttgttgcttttgttgggccattgtgtgtcatttgtctatatatttacttgtgggttgtctgagattggtccttaagaatgacttatattttcttgctcatgcttcttgtttcacgagatatgtatcgtgcctaatccttgagcttgtttgcctataggtgcatttaggttgacttgctagcttgatatgccagcaagtactgccgcacgtttcacctacttaggagtgtccaaatagtcgatccatgacactcgagaagaagttattgagaaggatacaatggtcttccaaagttgtttaataatactgtgatagcatattgaagactaactcaactaatgattttattttattttatgtattcctgcttttctacacttggagaaagtaaagatcatacaacttctaccatcactagctaaattagtccattgtaccaaagataagaattatagagaagtatcacaactaaattagttctatgagacattttcacaaacaacttatagtttatttacataaggaaaaagaaccaattaatatgttcatataaaaaaaaaggtaatttacggtataaatacttaagtttaatttttggttataaataaatatctaagtttaatttttggcggtagtaatacttaagttatattttttgaaactctataggtatccgaccgttaaatatttagtcattatctacatgtcattttttttattggtatatttaaactattttttaagaaaataaaaatttaataatttggaccaatcagggattgtcacgtggcaatttacttaacacttaacagtcatgtacctacaaagctctaaaattataatttaggtattattatcgcaaaaaattaaacttatgtgtatttataactgaaaattaaatttaaatatttatgtcgtaaattactctaaaagaaaaaataaatacgaaacggaagcatagcatgattactgaattaagcagaacaaagatgatatgttgcaaattctaatagaaatatcttaaatgcaaaatgatttgaatataattacagaccaaagtttatgaaataacaaatttaaattatttacgagttcttcatgtattaaatttaggaaaattaccgtatatactattttaaatttttttttttcaaatttatattttggatttttatgggttgctatatgatttttgattgagatttgggttactctgttagttacaatatgaatttctatgtagaatttcgtaaaaataataataaaaaaaaaactattttaaagtgtaaaaatggaaaagaaaaaaacccttaaatttatttaattactttaggaaaaatgaaaagtctaactttcttccactaaaaataataattggtgtgttctgtatatttttgcacaaagtttatcagaaaaaaaaaatgttgtttcccatttgagagagaatacaaggaaacaaagagtttccttaattaaaaaaaacaattaaggaaataaataaaataatacaacacagataaataagggtgtcaaatagacaaatattataggacatgttagttgtttaggtggtaattttaattggaacagtgatgcaaatataaaatatagtttactttgtcaaaatttaacttcaatagtgtcctaaattattatacaaatatctcacataatcaaaagtggtttaaatttggatcacaatatagcatgatacaaaatttatgttgcatgctatgcttttatatttactattaaagcaatgctattaggcaccagtggtgcctagcaccttcttaacatgtcgcgttgagattggctagcgatactctctaaaagctattatattaaattatatgggactcaatacttagtttgaccaatagcgatattgacacatagcatttctcttactactatgttatttttaatattttattgttaaagttgaattaatatgttaatttgcataaaatgattttattattttattataaaattttatatttacctatgtattattattattattttaaatttttaataaaatattagatctagatgagcattaaatgatttattaaattttgcattaagatttataattacgtattggagcataataataaaagttgctgtaaaaatagcaatgctaggcaccactggtgtccaatagtaatgctcacaaagagaaatgctaaaaggcaccagtagtgccaagcactctcttacgtgcaatatcgttattggtctaattagtatcgggtcccatatagttaatataatagcttttagggag

SEQ ID NO: 297314 - DNA, 4962 bp, Cannabis indica
aaagacaacacaggcatactatataataatatagtcccataagcacgtaaatatattaatttcatgattttacccttctctggtcaaaattactaaaatacccctagctcaccaacgggtcttaacatgtcataaatcatataaattctcacatattaaattatataataatataattccaataatacataattaactagttagggttttgctaattcattctcttaatcgtaaggtattacacatttaatgatattgttatatcaattagaattgtttcgtattccttctgttagacacgtgtaaacttctaaagtgtagccaaattttgggtataacaaaagtattacatatgttctttgacttcttcgttaaagctcaccacttgaattgacccaatacttacatcttgggaacatggtagctagtgcaattgagtgggagcgctaatcatagatatagaatctatagcttctataactatttagaagtgaaatgatgattttcttagagcttcacttaacaaacataaatggaagaactcttatttcagtaattacattagtttattgaaatataatttataagaaggtaagtgtttcaaggaaaaatacattggagggtaaaacaataaatttatccctactcgatgtaaatcatctatagatgatctttgattattttgatttaaaaaatgaataatttatagtgtatccattcttgttgaatagagcgttctatgtaattaggagtgcaattccaaatctatagcggagtcaagaggaattaataagatagagaatttactcgctaaattctagaactacttattaataggtcatggtccccatactacttgagataattttgtcttgtagactcaattaattgattataattaatttattagaattctgaataaggttatatcttatttatgagtttcactaagcaagggcttcttttagaagaaaaaataaatttagggtttgtttattaattaagagactttgaaaagactaattaataaataagttaaatgataattttatttgataattagttataattattaaatagatagaattggtatttatagagttagaattaaaagatgacatttgtgaaaagaaagataagtttcaataaaatggcaaaattgaaatctaatcctaaaagctatcatataagctagaatatagcgtttggccaagatgatttaataaagccatttttttaatctttttctattccattttaattcaaaatctaaccctaaaagctatcatattactagaatatgatggctcttattttcataaccctatgtgactctctttgtcagaaaaatagaaaatatacagaactctcatcatattcgaattctctttttcttcctcttgttattttcaaaccctaagtgaatgagtaatttcccacacaattcgaggcaatactcaagatagtgtagtcttttgtcaactgaaggagaatccaagttcagattttgatcatactttgtaatagaaatgatcaacggttagagatctgatacacttacttcgttgtcatcaatgtaaagttttctataacttttatctatttatttcattattttagggaattcatgttttggatgttagattataaaattataatcaaacatacatgttagtaaatctaaatcctggtaaaataatttccaaccgtttaaagtgccctatgcaagttgtttttgtagcttgatgtactcagtggtatgtaaaaggaaattttagctcatgccgtgagtatgggtgagaaaatttgttgctaattcaggaagtgaacactagacgactctaaagtgggtcatgaggtatctaaagggtactctagacaatggattaacatttaatggtgatagcaactttaaagaggaggtgacatgttatgttgattcagattttgttgagagtctagatacaaggaaatcactaacaggatatgtcttcactattcattggggattgtgtgagttgaaaaatccaaattaaataagattgtctcactgtcctccatagagtatggaggacagagtatatggctgcaacaaaagccattaaacaaacaatatggctgaaaggattgaccaaagagcttaatctcaactcagatgatatcacagctcactgtgataaccaaagtgcattacatcttatgaagaatctcatgtttcatgagagatcgaaacacatagatattaagatgcactttatcagagatgtgatccaatccaagcaagttagtcttaagaagattaacacaaatggcgaccctgctgatgttttcacaatgagtgtaatcagagaaaagtttagacattgtctaaacttgctcaacattagagcatgttaaagtctcctctgagactaattcagtggaattcagaagttgtcatctattggtattatgttattggcattaactattttgactaagtaaactaaactagatggaaattgtgatgtttagctcacttagtcaaatttaacaagttctcccaactaccaactgtcaaggtagttaattcagtcggggacttaacttgctgcccgaatattataaaaggagagtcttaggactcatttgagggatcaaggtttagacaacacacttgagattagaagaatccaactataactaagagtgagtttgagggttgtaaaaaagacttgtatgtatctgattacaagctttcaagtaagatgaattgtaatggtgcgagtcaccatttaggtgtgtgttattgtgtacttgatccaagtttgtaattgattttgttagtgccaattatcaataaagatcacagctattagagctgcttctacccaaggatattagatctaagttttattcaatatttgtgataaaacatcgttattaagtttgtgtatctttttattactgacattgttgattaagtttttgtgtatttttcagtcatcttgagtttttgatggtgtatatgtgcaccatatatatacaatcactaattatatagttaaacaaacatgctagatgtataataattactccaaattataataatttcagttacatagtgttttcctaacacttttctttttaaacgtgcacacatacagatttaaactatcagattgcattctgaaaattagtgttaaaaattgcataaatgtaactaatggtcgaacgtgaggcacatgtatgaatccacccaattatctaaattgtagaataattcaccattgtttcaaaaataccaggggaggtattcttattctcgtaatctaagtgcacatattaaaatgcaatttacctttttttttcaattattatttttagtattctgtacacaactttttttgttacaaacaaagacccaaattagaattactcatgtatttttttagggaagaaattaatattttattcagacatagaattggtggtcaactttctcacttctttctctaaagtatagcttctctttttctttgtagttttagtatgttctgtatctgtggtcctggataatactactaaataaataacactgaatttcttctatatacaacactctcacaaatgctagtagtactagtagctcaagacaagcacagttcaaaatcgaattgtatggcatagactccatccccatctctcttccattcctcaccttccacccctaatcttaaaccagccactccttttatgccatgtggcatcccaaatatccaaactgaaacaaataaccaccaagcttctctccatgcctttgtttatcacatatacaccatttcaatcctcatcaaaccaattctcatctctttttagcaattattaaacaaaaatatccattataataaatataaatataaggatcaattgactattaaacccatggctaacttgctttatcccatccaagtccaattttatctcaccttaacatacctccaaattatccaaaacaaggggtagtcacagaaaacacataaaattataaaagtaaagggacacatcactcccctcacccaatgacatcactagccaacaattttctttcccttccaaaaactacattcattaaccttcttagccttttatttgtgttcccaaactttttatttttcatttggaaaaaggaaaacaactcatatatgttgtcttaaaatcatcatatgaactagaaagaaacatacatttataaccatatcttcctctctaaacactactccatttctaaggagaggaagaatacaacccaccctcctcccccccaaaaaaaaaatggcagtgtgcacagtctacacaactcagctcaacccaacatgttcatcaatctccacaccatcaaaatcccacttgggatttcaccaaagacaagtagtgctctacagcacaggcaagagaaccaacaggagaggaggcaattcttcttcttcttccattagtaccagcagctgcagcccctatgtgataacatgctcagctggtgactcacagacactggtgattggtctagctgctgactctggttgtggcaagagcaccttcatgaggcggttgacaagcgtgtttggaggcgcggcagagccacctaagggaggaaatccggactcaaacactctgatcagtgacaccacaactgtgatatgtctcgatgactatcactctttggatagaactggtagaaaagagaagggagtcactgctcttgacccaaaagctaacgactttgatctcatgtatgaacaagttaaggctctcaaagaaggcacacctgttgaaaagcctatttacaaccatgtttctggtcttcttgacccccctgagctcatcaaacctcccaagattcttgtcattgaaggtcttcacccaatgtgagttattttgtctttttcttttttcaattattgataacagaaaaaaaaaaaa

SEQ ID NO: 297315 - DNA, 9335 bp, Cannabis indica
aatcacgtaatacgcctatgctagttagggtgttacaaaaagtgtatatttcctgaagccttcactatctatttatagcatactacatagggttaggcttgaattatttggcatcaaaataatgaaaatatcagatgatatttcctataaaagtggccggccaaggctttatggatttgggcctcactttggcaaattttgcaattttatcaattctgcatctcactttctcaaaaatgccaattttcaatttgaaccatttaaatgcaaattctaactatttaataactataaataattatagtattttttaattacaatttatactactttaaatgaaaaataattaactaaacaattaaatacataccaaaattacagcttaataataacaagccgttctatacagaaaaagatttgtctttgtattgtgttagcctgtaaagggacgtgttttgtcatgatgtctatgttgtgggttcgttgttttttttttttttttttttttggagtggggtcttgtttttaagtcctttagttaagtagctttagttattttttttcttgggaagaaaactgaaatatttcattatacacacagtacaaaaaagagctcaaatattaaacaattagatccataggaacaccccaagaaccatttaaaacattaaattaatctttgtccaattatcaaaactctaatattatttaactacttagattattgcaataaaaattctacaaattacttgatttttgaattattattagtacttttatcaatatttgcttgtcattaaaagcaaagagttttattatcataagacaacaatgacacaaagctgcttggactctgcaaaaagcttagttacaatttgggaattgagaaaattattataataccaaaatccagactgtctcactgtttctattattattattattgcttctttatctttaacataattaaaactctctttttattctcttctttttgttcttttcctactctacactcttatccatacatatagaccttggaccatgggctttgtccttaatgggccttgacatatctaactcggcccatttatgatttatccaggtaacagaggcccaggaagaactccattagactggaccacaaggctaaaaatcgccgccggagcagcaagaggattagctttcatccacagttcctgcaaatctctccggctcatccacggcaatatcaaatcaacaaacatcttaatagacaaatcgggtaatgcccaagtctcagatttcggattgtccctattcggagccccccaaccttccaaatccaacggttaccgtgcgccggaatcaaacgacggtcgaaaactcacgcagaaatccgacgtgttctcttttggggttcttttattagagcttctgaccggtaagtgtccttcggcggtggatggaggtggaccagggtgcgggtacggtggggttgtggatcttccgagatgggttcaatcggtggtgagagaggagtggacggcggaggtttttgatttggagctaatgaggtataaagatattgaagaagagatggtggggttgttacaagtggcgatgacgtgtacaacgtctaatcctgatcaacggcccaggatgagccaagtggttaagatgattgatgagattcgtggtgctgaggtgtcaccgagtcatgatgttgttgactcggtttctgagtcgccttctgtgtctgaaggcacgtgtggagcgagtcagtgaacgagtcgagtaggaaatagggaaaaaaagaaagacaccattttgtgtaaatcacggttttttttaattagttattttatttatttttagtctttgtttacatttttatttgtagtttgttttataacctcaaaagtcaagtcaagcctaattaaatcaatcgactaatgaattattatatatatacctacaaatttggctgttttgcatgtgatcatagttgttgagaaggagcaatttatatataattggcatattttattaccacaaacgttttgagtttaaagtataattaatttaaaccaaagattttcttctatatattattggcatattttattaccacaaaggttttgagtttaaagtataattaatttaaaccaaagattttcttctatatattattggcatattttattaccactcactttgatgagtagagttttgtgaatggtgattagtgttgttctttcttcccaaacattcatgttttgtgaaaaatataacacaaaggaaagttcataaagggcttcgataatttcaagcaaaagtatcaaaaactagtaaagcagtcaaaaaccaagtcatagtttcccttgagcaccgtgcaagtatgaattatatgaatttggaaagaaaaagggtttgtattataagttcataacagttaaatcccactaagaattgtttcccatttcatataaattaaacaaataaaatattaaattattatatatatataattaagtattaaattacatataatttagctatcacaatcttttatatggtgtcacttctaaatagtattaaatatttaattgcaatactcgatattttaatatcagttctcacatattttaattaaataattaaataatataaaaatttgttaactaattataaaaactatgtatatgtataatatttaatatcttaagatatgaaagagcaagaaaaactctttaatgtattaacaatgtaatggagtggcaaactatttgagacttgttcaagtggctataggagggtgcgtgtgtgttggaggtcctgagttcgaattccaggttatgcaatgtaatatataaatacttaaatcaaaaaaaaaaatataatggagtgacatataaaaaaaaaatcaattaaacaaaatgaagcaccaatattgagtacaagaatggtcatcacatcactctcatttgtgtatccctaaacttaatggaagtgcataattttggggccaaacttgacaagcctatccacagcactaggcaagaacttcctagcaaataagaagcaaagattagtaccattatcattatactcacaattagtattattattattccttaaacccctcaaaagctcaaccgttacatctgttctccaaaatctagctgggtgtggaccaccctttgaccagtcaacccaagtcaaactcctgttggaattgccctcccaaaacttgatactcacaaatgttggaaggtaatgctcatcagcataacaagagccatgacaatacttttggaaaatgggaaagtagatttggtcagaaacaacttcaatggccaattctcgccccatttcgaaccattgagacccttttctccattgctttagggagatttcggggtacatgtggtaattgtatcggcctcttcctaccgccccgggctcatcgtaggccatgacatggtttttcttggcgtttattaggtaattgtagactgttttgaagtcgaagagtgggatacaagcctcagagaggagcacaaatcgttggttcgatatgtcgagtagggcattcgctagtagacgccgctcggcttcgatcatactcacttttccccatcctacttcctaaaattttgtatgaaataattagttaaattatttgatacaacgtacgtgcagaaatcgatatttaattacaacaatcacttgatacttttattcaatataatattctataacaaacaacatcataataaaacataacacataatcaactagcttaaatgatactattctagaatttcataattacttctacataattttcataagtaaattttttgaagaatattaacacataatttagttgataaaaacaagagatgattaatataaaagtaataatatgtgtacacaaaatattatctcaatatcgatcaatcaaatgtgatttgctgaaaattactctacatcatattttggtgcatattttctcttaatcctaatataatatgtggcttgttggtgaggtgagagtactaataattagtactattttctatttttggttgccaatgttttgttgtcattggggtttggtagtcatttttagaaactaattaaacgtgttaagtacaaaagattgtgtggggaagaactaaatataaagacaattacattattcttaatttttgttaggtatgaggtttcatcttactacctgaaaaataacaacaacaactagttaccaaataccatttattagaggagaggagcattattatgggtcactaaagtgtctagtacctttatgatataatgtcttataattaaataccgatttcctataatctgtatttaattaaaaatagtggaagctgatatcaaattgcactaatagcaatatattacacttcataaggtattaggcacaatcaacattgctatcggacactaataatgcctaacactttctataagtggtgttccacgattagtattatcgatattctctaaaagttatttttttagttatatgaaactcaatacttaattacatcaataattgtatgataccgaaaaaagtactagatactaataattctttttagcaattctctaagcacaatgagtcacctttaacatttctcttattagtgagtatgttgtgccgttagctatggaaaatgactaactcaatggtgcaaagagagagagagagaggccatgtgtgtggatatgtgggtactaagtcatcatgaaatgattattagataataataataatatcacagccagccatcgttttcaggatctaaactagtgtgtgatacatctcaatctcatctcatatgaaatgaaagagttttaacactaatattgtaatgatttaaagtacaatgtagctatctgtttttatgattggaattttggaaaagggtacttaaaattcatttgggttaacaattatttctcatataaacaatatcagaactgaaatagttgtctccttatgtaccatatattaatttagatatgacatatgttgatttcattctacttaaagggactagtatgaaattattaaaatattattaattatactagtatgtaccatatattatatgctaactaactaccattaatattttatttcttaattaatcaatctttcttgcttgttattcatttttaccaaaatttaaactcatttttacataaaaaaaaaagtaatctgacattgtgtaatattttgatgtataattttcgtaaaatattattattaaaatcaaataaaataaatagaaaagtattatataggtcattcacaatttctagttttctaccttgtgttaaatcccttctcccctgttttttagtagacaattggcattagtttctctgttattattatttttacttagtgaggaaaaatttctctagttctaactagggccgacactatgttcgaatgggtcttgtaaaaaaaaattgaatttttattataagaataaataatatttttaaaaattattaaaaatatatgtacattttttttatttgggtcttaaaatgagtgaatcctaagcgcgggccttaactaagagtcggcctagttctaacttttattactaaaccaaacattcttactagtttttctcttattaatattgattaacttgtgttacttaacaccccctgtttttttttttggttgggagaaaattgtcattagcttttctaatcatttttgcttagtagttagttctataacatggtccccaaactaaacataacaaaaagcaataaggagacaagcaccaaattttaaggacaaagacaaataaattggttaaataaataataataataatgagaaaagttaactaaccttactgggaattcttctaccaaaaaaggcagaattttgaggaactgatccattgtaagaaggattagaatgaacataaattgagtaaaacccttcatgtccttcaaagaatttatcccaaaatggagccataaaaacaggtcctcttgttaaaaacatgaaagcaaccttaggaactctttcaaatggatattgtggaatctttggagccattgaagctctccacaacaactcttcatcggtcatatcgtgtgtcacatttggcggtgtcagataatcatccaatccaattcgacggctgatattcggccttataaatttcttctttttcttcttctttagtagtgtcattttgagtagtagtagttgttgtagtacttatcatcaaaggaggacttaattgagttgtgttttgataagttggtaaagaagttgagattgagaattgtgtgaattggagattgaatgagaattctttcatgtaagttgttaagataattccaaaggttaaaccacaaccaaataggattatatatgtgagcatgttgatgaaatggatttgggcaacatttgtgagtcttgtgagaatagccattgatgagtacttggtgttgtgattttgtgaacctttcatcatttttggaaacaattgaaaaaatgaaaaaatgagaaaaaagtgagatttttcagatacccaattgggaaaaatgaatgaaacaataaagaatagtactaaatatatataaaaatgtaatctttttacaagtataagatgaaataaaatgttaaagaaaaagtgactttaacaaaacgatgaatcaaactaaataactctataacacgaaacataatatggaattaattttgatgtaaaaaatatgatgagagaagaagaataagaagaagaagagagagaagtgttgtaatggaatttgctatagaaaaattggcttaaataaaatatgtaagagagaaaaagagagagagaattgtgaggaaaaagccatgaaaggcttttctttcttcttcttttgatggaccatagaataagactttctctcttcttctaaggaggcctcaacttgattaataatgacagttttctctgtctctaaataatattttattttattttagagttgaagagttatagtcaactaataataattttattcacaacaaatataaaagtctattttcataaccttgattgattataaaagctctataactgaaaaagattttaatatatgttagattaatataatttaaatgcataacaatataattgaaaattggtagtttatatttatataagtaagatttttcatcaaaattgtgtgctacaattaatggtaacaatgacaatcaattaaaaaaatgaaataggtaacaaaaatgatgttaaccattaatattagaaataggttaatattatatggtaattttatagtgtactttcgataaagagagtttttagtgctacactatagttatttaggacctataaattttcaaaaaattaaaagtaaattacaattatatgcgtgacatgtgattgtttaaatcttatttttagcactataaattatttaaattttttaaaaaatttaaaagtgatcttaaataactacaacacatgccatattgaaaacatgattaaaaaactttgaatgtcgaaagagaaaaaatctactaaaataatcatttagaggggtatagagatttccaatattataatatctaatattctaattgatattacggcaaaaaaaaaaaaaagtgctaatgcacacccctaaaaaaagtgcactattgcaccctttaattatttcatctaattttttgtatagttgtatacgttatagttattttagacattctataaaattttaagaaattttaaataatttaccatttaaaaaaccgtgttcaaacaatttataaaataaagagtcacgcatgcaaaaacgtttaaactctattttcggcgtgtttaatttctccaaagatctcacaattttttaaaatatcttaaataattataatgtatacaactataaaacaattaagacttaaaaaattctgcatcaatcagtgcatcaatataaaagggtgtattgtaggagtagcatattgtaattgatatttattacttttcaacttttaatttcgtaattaattaatatggaaaaatatataagttagcagtctttggatttggaaattggaattaaggatcgataacgtaggcgttatatatggactttgaaacgtaaaagtatggaatttttgtgaacatgggacattcaaatctatttaacgtgtcatactacttaattatataatacgttaattaattccacttttgattatttttctgaataatcttataaaaaaaaaacccatgcaaattttgttaaaatatactatgtgttcaatatctttttctgtgtcatactaatattattggttaagaaaataatttttaaaaaatatcgctaactaatagtgaaggcccaataacaatacttgaaattttagtatacaaaatataaatacactacaacaattttagtttttaggggcgacaatattaggggcgacatattgtcgcctctaaagagagtggtattagaggcgacataaaattgtcgcccctaaaattgtattaggggcgactttagtgtattaggggcgacatttgtcgcctctaaaaatattgaaaattttcattgaaaaaaaagcgggatttttcccacccatagtattaggggcgacttttgtcgcccctaaaagtcttaccagttttcattaaaagctccaccccaacccccttctccttcttcattcatttttcattttttttttctattctctaaaacaaaaaaaaaatccttacaaaaacaaggctcagctccccccgcctttcccaccggcagctccgactccatctcgccgaacccctgtctcgaccgcctcccccttctttcttcacagtcgaaccaccccgatttattccgaccggccaatatcgtctaaaccgaatctatcccactttttttgttggtaagttttgtttctctttttagatttttagaagaagatatttgtgtatttttgtatgttctctttaagtatttagttttttttttgcgttgttgaaaaatttaatttatgtgagtgtgtttttaatgcagaaatcatagaggaatataaaggtaaattttatatttttatcttttttggtcattatgtattatattgaaatgaaatttgattatgtaaatatatttatagtattttgtatgaatttgtataaattaggttaataatatcaatttttttttaagaaaaattgatttaatgttgtgaaagtgtgatgaaaaatatgatttttttttttattgttgttgttggtgtttatatgtgtgtgagt

SEQ ID NO: 297316 - DNA, 2578 bp, Cannabis indica
ttttttacatgaactcacaaattacacaaaaaaaaaaaaaaaaaaatcattttttcattaacaaattcaataaaaacaatttatttaattaactaaatgtgatatttaaaaaaataaaaagaaaaaatatatatttacatgaaatacttctcaatgggcaatacccattgacggttactaaatgtttacccgaaatttagccatgatcacatgaacatcattttatttgacacgtatcaagaaggaaaatattttttttgtagtagtattactcatagttgtcaatcgtgggaagagccctaggccctgcgcccaagttaacatcatgggctccagaatgggtgctcagatcccaccatgtcatttccaataccgtcctttaatatttcgcgccaataagtctagaagactctgagtcttaaccttggaaactcacatatgtcaattttgcatctcaaaagtcaacccaggcacttagggtttcacccagtccctaagttgacatttggccctagggttttagtttctggtccaatcttagtgcaaaccatgggaactttttaattagacatgaataagacatgccacaaatatgaaagaggcatcaaaattaactttggaacactttgaagttggagcactggagcacccgatgcccaggttcacatggagctgttctagagcctaagttgatatattttcaacatggggcacttcaaagcctacttctaaagatgttttttgggcgctttctctgtctacctccagaatgaaaatacaagtgctttggggaaacaaacagagcttcactgtgactagctaaactgtggtcgcgaccactgtaatgctaaaattcgagcctctctgccacatcctctagtcgcaaccatataattagtcacgactacagtgtttgtggtcgcgactactgaagcatatggaaaaaatattttttttgacaacacttttcacgctttgcacaattcttaacattacaaagaaactacttgaacaatttttaaataacaaaagaaaaataaagaaaattgaaattgtctcaaactaattaaaataattgtaaaagcttggggtgcctcccaaaagagattaatttaacgtctctatccagacgctcaacctcattactgcttcaaattggataaagtccactttttgcatctactagagccctcgtatcaaatgaataaaattgtcctccaatattactaatgttggagctatccacaagattaaatttaccttcataatttccacacaccagtttttttaaacgacgtttaaaattgctctttaggcttcctttatttgtacctacttatacaagggaatcattcaccaacttaatcttacaacaggtaggaatgttagttgcagcaaaaatattgaaattcatttcttcatcttgcactcgcaatgttaactctcccttttgtacatctattaatgctcactccgtggccaagaatggtcttccaaaaataataggaatggttgaatcttcctccatatcaagtattaagaaatcaacaggacagataaacatagtaatctttaccaagacatcttcaattatctcacgagaatgagttaaagaacaatatgccagttgcagagtcactattgtgggcttagcttttcccaaacctagtcttttaaaaacaaacaaaggcattaaattgatgctttctcccaaaccacatagagcttttgattccaacgaaccccctatcgagcatgaaatattgaaactactcaaatctttaagctgtggtggcatttttttttttgcaggatcgcactaagtaagtgccattgtcttatattcttccaacttcatttttttactaaaatatctttcatgaacttcaggtaattggcatttgctccaaggcctccgcaaatggaatgttaatgtgcagtttcttgaatatttcaaggaatttcaaaaactgcttgtcaagattatacttgcagagtctttgaggatacgagattttgatgtggtggtcaattctcactagtggtggcttgtattcttcttgcagatcctcagtaacctgctcacccctagccctcttcttcactggtgcctgtgcttgtacctgttgatcatgatacttttcaaacacttgctgctctactcttggcccctcatcttcttctcactcctcaatgctattgccttacaagtctcttttgggtttacctctgtaatgctaagtaaatcaccttgagtacggttaaccatttgggcagccaactgtcccatttgattttcaaaagttttaatggaggatctagtttccatcatgaattggattaataaattagtttgaatattcaaatctccactagaacttagttgttgagcttgttgttgtggcctatttctctgctggaagaaaccttattagggctggccagctagcttccattgataagaattttgacgtccatccataaaagtatactcacaatctttctagtatccaatggcttgggtttattccattggtaaactattcacacaaatcacaaatgttggaattattttacc

SEQ ID NO: 297317 - DNA, 2710 bp, Cannabis indica
ttaagtcaatacaactaacgaggattaggctattaccgaactgctcgggactaaacctctataaaatttctatgtcttcttaatattattatttgctttattacatattcttattacgacatatcgtttatcgcttattaaaagactcattgtcgttggctaaaagcgaagtcaacaaatacttttagaaacaaatttttagataagactttcgaaggttgactttttaggatcgacttgtctcctctaataatgattaggggcaactttgaatggttttaggggtgacttgtcacctcttataatgattaggggtgacttttgtcgcccctaatactcataaatgttgtagtgagggataaattatatcttagcatctaaaacttagaattttagattacttgcttaaaattaaaactaacgttgatcaacttgaatctgttggccgccatgtctgttaaagaacatatttctgtgatctttaaaggattacctgtcgattatgatacgttcatcatatttgttaatacacaaaatcaactatacacagtagctgaaatcgaatctctcttgctctcacaagagcatcgaatggacaatcatcacaaagaacttgattccattaatcttgcaactaatcgaccatctcgaggttaaggatctagttttgtctttctctaatgcagatcatatgtccaatcatgtgtcttcttctgtctctgctggtaaaggatgaggatcttggaatccttatgttgttccacttcgtgccactggtggtccaacttctaaccccatggataattctcaaggtcgtggagttttagccgccttccctagtcaatcaacttcacacacctactctaatggtgctactggctctagacatgtttgtcagttatgctccaaactagggcacattgcagctcgttgttatcaaaggttcaatattgactttctaggtgtaggagcagctaatgtggaacatttctcagcaaacacagccattgtagacactgttgcaaatgcctcatggtaccttgattttggtgccacgagtcactgcatagccaatgctaccaatttcactcacaaggagccttactttggctcagatcaaatccatatgggagatggtgcaggtctgcagattcaaaatgttggtaagacaatattccatacacctcactcatctcaatctttaggcctaaatcaacttctttatgttctttaaattaccaaaaatctcattagtgtctcacaatttgcatcaaataacaatactttctttgaattctattctaatcattgttttgtcaaggattaggattccaaggctgtgttgatggagggacatcttaaacatgaactctatgtcattcctgcttctcaaatgcaaattcaaggcacttctcctagccagtctctctgtaacattgccaactctaataaaactatcaatgatttttgtgatgcttgttgcaaaggtagaattcacaaatttctattttctagctctcaaatagtttacactaaatcacttgacctcattcactgtgatctttggggtccatccccagaacttttatcatctggctataggtattatgttcattttactaatgcctctagcagacacacttgggtatttttacttaaaataaaatttgatgctctatctactttcattaatttcaagactcaagtagaaaaagagtttgaatgctctataaaatccctgcaattttattggagtggtgagtaccaagccctagaactttactttttaagtcatggtattaaccacaaagtctcttggccaacaacacaccaacaaaatagtgttgctgagagaaaacacagacacttaataaagtctgcccttactcttcttgtctaggcttctatgcctttgtccttttgggatgaggttgttagagcctctaccatatatgtcattaataggctaccatcccctgtgatacaacactccacacctttcaaggttctgtgtaataataaccttgattacaaccagcttaaagtgttttcatgtgcacgctatcctaacacaaggccttacaacaagcataaactggaatttaggtctatctagtgtgtgttcctaggatatagcctcaagcacaaagggtataagtgtttatcacaaacatgtagaatttacatctttagagatgttaattttaatgaatataaatttccatattctatcttatttcccataaccattgcctcttgtcttgctgctacttccactacatctgctacaattcctgtacgtctctccacacctcatcaacacatcttaccttctccatccccacctacttctccatctctttccacctctactcacgatcttcaatccattagctctaattccagtcacataccagacttgagttctagttccacaaccactacccctgttataccaactattaatgaacaacctccacaagcccctgatattcctacaaatcaacaccccatggtaacaagggcaaaggcagaggtgtcaagccaaaagttttactaacttctaaggagccactaaccttagctgcagctctcaaggatcccaagtggcttgttgctatgcagaatgaaatccaagctctcactcagtgtaacgtcctcgcttcaagcctccattgagcccttacacccacggaatgaatggctctta

SEQ ID NO: 297318 - DNA, 6240 bp, Cannabis indica
ttttttttttatatttttaagctaatattgaaatttaggtgtgtaattggatatccaattaaaaaaccgatccaatccaattagtaattggattggattggattggattttgaggtctaattggattggatcggatgatgattttccaaatccaattactaattagattggatcggatgaggaaaaaaaggttggattggatcggatgcccactcctagttatatagctatatataatctaagaatatatatataattccctttaattaagtccaaatattttcaataaattcagaaattatataaatatataatatttatatcttttcttctaagatttcattttcttttccttttcttttaaaataattaatctatgtgtgtattatatattatgagcattttgaagcatatataacttagcatgaaattttaccaaattcagaagactaattgtaaaagctatgttatatccttataatcctaatattgacgaggatcatatatatataaatggattattaattaggtactaataataacacatatgcaaaaggtgtctagttggagtttgtaatttgtaattctaattaacctctgccacaacttaattaattgctctatctacgagtattgttattagttaacgatattctctaaaagttatttttttatataggacctgatacttaattataccgataggaatgttacaccgagaataatgctaagcaccaataatactttttagtaattcttatattataatattatacacacataattatgatgacaacatgcatgcaaatattcaacaaattaattaacaacctaaccccattattagtctaataactaatcataataaataaaaacaattcaaataaatacatattaattattatgcacatatattcttttatagacttaggaacaaacaattaatatgatatatattcaattcaaacaaactccatgtgtgagtttgctttcgttgacacaattcaatataatatatacttcttagtttatgtttataactatttacttacacgcatttgaatatatatatatatatatatatacaactatatataattctcatctccacatatatacacatattatatatacaaaatattaaatacttaaacacctttcacgacaagttaaccactaccactactcaatacatatctatatatataatatatagctatatataaacacataaccctaataactttaagaagaaaaaaaaacagaacaacaaacatgtctcttattagatcaagaagatcagtacccgaaacaaaacccgacccggatcaacccgccaccaccgaaccaccaccaccgccaccgccacgtcagcagagcctaccccaaagagccatatcccaaaccctaacaaccacagccaacttagccaatctcctcccaacaggaactctcctagccttccaactcctcacccctgttttcacccaaaacgggtcatgcgacccggtaacccgaacgttgacttttctcctgttgactctcctctctctctcgtgcttcgtcgcctccttcaccgacagcgtcaaggcttccgacggcagagtatactacggcatagccaccttcaaagggatcttcctcttcgattagccccaccgggtcgggtggatcagtcgggtcgggtttacccgatttgggagggtacagaatcgggtttgtggattgggttcatgcggttttgtcggttttggtatttggggttgtggcgattagggataggaatgtggctatgtgtttgtgtcctcagccggggaaggcggcggccgaggttttggatatagttccggtgggaatcggggtggtttgtagtcttttgtttgtggtttttccgacccgaagacatggcattggctatcctgtcacaccgggcaaataatacaattttaatttattttttatttgattaattcaattgtaagttttaacacatatatgagtaatggatgaaaaaaaagattattattatttttggataaatactactttcagattgtgtgttttgtaaaggttatagattgaaccatttgttttgttaaatgataaaatagatattgtattttttaaaatagtacaaataggatattgaattgatttttttatcaaaataaaacttaataataatccaacctagaggtgttatgaaaaaactgcgattaaattttttacaaatattcgtgttaggaattgtcttcaagttgattataataaaaaaaaaattgttgaaaatagagttcagggtcctatttgtactatttttgaaaatacagagtctgttttgtcatttaacaaaacagagagtttaattaataacttttacaaaatataaggtccaaaatgatacttatcaattatttttttatgtaaatatttttttttgttttattatattgaagtgtaagatatatgttattatgtaaaatatatactactttctttttaaataaaaaaaattgttttagaaagaattgggtttactttcaagtaatcaattacaataattattgaaaatatatatatattttaattaattttacaaaataatattattttgatataaattagtcttttatataaacttaaaaagataaaaaagaaattgttgagtccaacatctttatacatgatatttacatatgcaataatttgtttgtttttgtttttggtgcaagagatcaatgttagtttcataatttgtttcctttgcaataattagaagtgatttggttaatacataatatatgaagttcaatgtgttgttcttcactccacgcaatgttttgaagttaggccgaagaacattacttgttaagttgtattataaaccatacaaatcataattcaaccaacaaaaaaaaaatcatacaaatcatatatgatttaagattaattaggattgttttctttccgaactttgacatgtaccatatcatgtcttctaaacttttttttctattaaaaattctccctaaactattgagattgttagatttaaggatttttgtctaatttcattcaactttactgtttcagtgattgtttatgtactaaaccatacttcccagactttaatatctaccaaattatgcccctcaaactttgatatttactaaatcatgtccctgaactttcatccatggtagaatttttttattaaaattacacaaaaatccttaaatctaacaatttcaatagtttagggaaaatttttaacggccaaaataattcagggggcatgatttggattatgtcaaagttcggggagaaaaaaatcctaattagccattatttaaatagagtaaattaagtgagattattttgcaaattttagtaattcaaataattagtttagcaaatttctctttttgccatatggtagtaaaattgtaaatatttgcccaaaatctaatatttttgtaagtttctctaccatcattaacacgaggttgggcctctacatgtggacctcattttcagcccaaatgataggcccatccacgaggcccgtcacaagaaagaaaaacagaaaatcaaataaaaataataaatcattcttttccttttcttcttcttcttcttcctttctctgagttcttgctctgtttttctggaaaaaatttgctgtgagttaaggtaaatacatgagaattttcacttttattttgataaagatatgatttttgttcggttattgttgatgaatgcttgaattaatacttccccataatcgaatatcatgcttcttctttttcttctactcaacaagaaatgcaagcttttagtttcagtttattgtttatgaatttacattttttgattttctaaaggtaaaatcggattgaaaaggaagagaaaaggttcttttttcaagaacagcttctcaattctggtgcagattaaggtcagccattattacttcttctagctttataattttttttttttaattcttttcaattttgattatttattttactaacagacgttgttaaagatatattttggagtaaagttttgattttttttttgttctttttgcagaaatatgtgatttcatgtatagtgttttactgtttacaacttgatttgggcattagggttcttgagtgtttagggtttgttaatgcacatttttatataatgtcatgtttaagttattaattttgatacaaagattggttgttcatggcagaaatggcttgcttttatgatttgccaagtgaacttgtggagaaaattatgttgtgggcaccagctgattccctagtacaatttaggtttgtgaacaagttttatcacaccctaatttcaagtttgatcaaagacccagaatttgtagccacctcatcattgccaaaaacaagtctttagtttcattactttgtttcacaaacccttctcccaatgttgatcatcgtttagccacacacccattgttaaatataatctacaatgatgttgagaccaatgttttgggaactgtggttgatactgtcactttaccagtttttcttaaggaagggttcaacaatgtaatgtatcactgtgatggactccttttgctagtgaataatcatgggagaatgatgttatgtaatccttctttgaaagaatctatgattctcccaaaaccgatgaatgttggattcgaagcttatcccaatgtaggatttgaactcgattctgaaaacaacaaatacaaatgtgttgccatttggctcggtgaagatgaatgtcaagttggggtatacacagtgggatctgatcattggagagagatcaagatgtctgaagacatagttgatgctatagccgatactcaactatgcaacggtttatgttggagaggcgtttgttactggatggtagtggtaagcgatgaagctatattcatcctcagttttgatatgagtaatgacaagtttcgtttggtaaatttgccaaattttgaagctttgggtgttgaagaatgggcactcgaagaatattcacttcgttttgcagtatggaatgattcagttgtgttgtgtttgaccccgaacggtgacaacacctcttttatcttcatgatgaagaaagacgctgcaggtgcttgttcttggaccgaatacaggcagattggaccgctagaaaagcattacagtcatttactaaccttttggaagaacaatgaaattctaatgaaagttgttggagatgataggtctgcatttcagttgacttcttacaacattggtaagcaaaagttgagaaatgttgtttatgatttagatagcaacatgaacatattttataattcggtttgtttctatgtaaagagtttaatttctgttaaggtaaagagtagtagacctcctctgaagtatgtctacacaagaagaccaaaagttgcaaaattgcagagaagtgatgaataagttcaaaggtttagtagtaaatattggtagattggtttatatacttacaagattaagaggggaattaaattgttttagcaattggtttgaattttgtaaattgtttttgtacagttcattgaacaaaataatcacatgttttgagtttttgatatgcaaaatcctaatcaattttgatttaattaagtttcttctctttctttgtttttctttcttattgggaattaactcattgtttcgttgagttacttttagtagtcttcttcttcttccattaatatgctttaatcaattaaagtattgttatggcacactaaagtgttagcacttctatgacatgttattttataatttagttagcgtttatctgttggaaaaattctcattacaagagagaataggaggattacaatcaaaaaactcaaaatacaaataaaagtatttcatcaagattacaagaaatctagaaaagaagaaggataacacacaaaaagcttgaccaaggttcaaggacctttgtcctaaaagtcattttctccctcatatggacacttagggaaactctagaaatgctcttaaggatttatcaagactcatatgctcagcctagtgtctaaggatgagcatatcctcacaaggttctaaccacaacaaatggtttcaaccacttctcatgcaagtgaacaatatgacctctatttatagagttttcactctcatatgaacatgaatgaccaccataaagcccttggatgttaccaat

SEQ ID NO: 297319 - DNA, 819 bp, Cannabis indica
tccttttttgtatttttttgtttttttcccttagtattatatatataaatctaaatacaactattcagatatataaaaagaaaaaaaacactaatagatatttgagttgcaccatgaaagcatccatgtatattatacacagttatatatggattttattttgaaatattaatgtcacacagtgagaaatcttgttaataataaataactacttcaattaccatcaaaatgtgcaccatgcatgtgactatgtaagagacctagcttgacggaagaggaaactacatgagaaataataataataataataataataataataataataataatagggttttcagtttgatatgatatataaaatataaatataattataggaggaagaaaggtgggattgagttgagttttggtgaaaaatggagtttaatttaaagcatgtcatggatcttaacgacaaagttatcgtattcggagtcctcattaattagccgaatcccaattttgcctatagtcagcatctcatgctgatggagaagcaaaacatgtgcaaataatctaaaaaaacttaactaggattgaaaattatttttctttttgttgtattttgatggttgtgttttaacttgtatacttaaatcttataactttaaaatctaattttatttatcaatgaacgtttattttcaaaaacaaaatctcttaaaatagaaaaatatgctactattggtaaatactaatgaaacttttattaagtactagtttctacataacttaaattaataactattatataatatcatcttttttttttttttt

SEQ ID NO: 297320 - DNA, 1614 bp, Cannabis indica
ctctctctctctctttttctctgttgcagaatgttagggagcaacttgcagaaacacttcctggaactggaggaggcagtaatccaaatgatagttttcttgtcaagttcctgttcttgctaccatttttggctcttggcttttgttactatcgatcatttttaaaggtaaccagttacaagaaagtttaagcctgaaacttcaactatattggatcttctcacccttttcttgtttatttatgtgtgtagactcgtgaacacttaaactcattatgtaaccatatcaggcatctttactataagattagatcttttggaacaatttcttattctagtgtttccacatcatccaccaataatttaaattaccaggtcagttttccttaaaaatcttgtatggtgaacttcaaatttttaacgtttttgttgaaagtttgttccttaaatcgatctatgatggtatgcaggctaagatacctgtctatttaggtgggatctcagtcgtcatctgttttatggccgctctagtggcccttgcccttgctcttgcaattgtgccacgacaagttatgccatggaccggtctacttttgatgtatgaatggacattcacgatcttctttttgttatttggaggttatcttcgtctaatatatcaatggggatcgacagcagcattgcaagcaggatccccttcctctcattctgattctcgtgatgatgattccggaaaaggtttgacaaccttttcttacattatcatttgtgtatatgtgaaatggaatagaaatttctctccttaactaagcttgcacttgataatataggtcatcatcgtctcacatcatcatgtgattttgctaattggtattatggacttgtaatggcgtttttggccatcattgccccatcattgccatgttttctaggaattacggctctatttgcaaggtaaatatgttcaagttttgtaattggttttaaagcctgtattgtttgacaacttttgagaatctttttattttgtttgtgttctcataaaaccaggttagcattaatggtagctgggggtttagtgttagcatctttcatgacctatgcatctgagcatcttgcaattagggcattttttaggggtcttgaagatcgtgatgctgcaagaagtagtagtagtagtagtaggacctcttctttttgttgatcaatgctaaatttttggtcctttgtgcttcatgttgcaagtttttttttggttgtaaattagtgcaaatttttgtcctaatactgttatctttcagctacttgaaaaagaaaggtaacatctcaattgggaatttggaatgtataattgtaatttgtgtagttatttatttctgagattatagaaaaatcttgaactttcttgtttggttctattattattctttatacgccttgttgtttgtgtataatataatgctgaaaaaaatacatacagtaatatacttttgccaaaactaagaataattttttattttgctggagctacatatgttagttttagggtagatactattttggaccatttgtaaaaattatcaattagattttctgttttcttaaatgacaaaat

SEQ ID NO: 297321 - DNA, 13295 bp, Cannabis indica
tgtaactgcgtgtggtcttggccatcttccgctgaaagtttttttttaatttattaaacttatcgaggatgttgtcgtttaaattttctattacttttccctaagtggtaatactttattttcaactgggtacctatgttttgaaaaatatttttttttaataaaggcaacattagtatcttaacgccagtttatttatggcatcttattttacgtaagtaagggcgttacaatcttaagttatatgagatctgatacttaattatacgtgcaattaaatatcgagtctcatataatttaatataataatttttagagattgttaataactaataagaagaggattagttttaggcatcactaatactcaattgtaatactaaattataccaatagctctattacattttatgagtattgttattaagtactagtggtgtctagtactttctagatgtgtcactttacgattgactaacaatactctctaaaagctattatattaaactaagactcgatatttaattacacaaataacaataataacacataaaatgatctataagcctttttaacatttcttacattttatagtagttgatagattaagcatttgtgtttaaatatattctcaaattccaatgttgcaatacccaaacagtctttatttactttatgtgaaattaccaaaaaacacatcacacaataaactttcggtgggctaccccataatctaaattcgcatcccgatatcaaatatcattaatacatttaaaaccagaaaattctcaacaacaataaaagaaaccaaagaaaatagaaatcaacaaattttgaaaactttcatacctaaatattttttcgatatataatttcactcattaattattattatcataaaattaataaataaacaacccatagaatcggacttcccactttataatttcaacttggtttggtaccatctcatctcaagataaaacgacacacatatataaaggcacatattacacataaccaaaacccatctcttttatctttacatacccaaaatctaaactcgacccagtcaactcattcatctccctctctctcaatagggtccttttccttatggttatattatatatataggtcgaaaaactccatacccaaaattaaaaccagaccattttctccattattataccccttaacccaccacaacttttcataataataataatataatatgataatatagagataataacctctctccttttcattttagactgagtaccttccctggtccctgaactcgtatatatatatatataaacagatatatacacctatatatatctctttatatatataacacttaccctgtgacaagatttggggcattttggtttttgtgtaccctaaattaaacaaaaaaaatccccaaaacaccctcatccaaagagaaagaaaaaaaagaaagtctcatcatattatctaccaacccataaaaaaattcaccccgaaacttctcacctagtgaagaaaaaaaaaaaaaaggtgatcttctccccataactccttcctccttttaaaggtactacattttcacaatctcttctgtaatttggctttagacattcttatatgtatctatgtatgtcacatttttttatttttttggttatttatttgtggtattctttttttaatttctttgtggtctttttttgggtgcggacctagcttactctctatatgttattaactctttaaacaatttaaagaacaaaaaaaaaatatattaatatgcttttactcagaaatgaaatgacccttctttgatttcacattctaattggacattgttgttattaattggtgtgtagttacataaatttgaacattatatgtgtgtatctgtactcatatttgggcatgtttagtgttcacgatatgtaacctggtttttgtaagcatctgaaattggggattttggttagggttttcctcatgcttatctgggtaattagttgtatcattaagtaactgtcacaagtttcttttatggggtttttaaattagggtttgttcctttgatttagatcataatctggtttcacgggtagaattgattatggtatgaagtgtacatgttctttttagaaaaaaattaattcttttttatcattttattttgattctaaactaaaacaagattacattttcttagtgtaaactaaaattacccagattttgatttttttttttcttgatttgtaacatttcagtttatatttactttattttttaatcatgtataatatataatatataaatattttaaaacaatttggaattggttatttgaaacaattaataagaatctattccaaatgtaattcaagccttaatgtttctataaaagcgttccgctaattttttttttttggtaccatctattggcaaattcaactatgtggcaagtacagaaatgatagaaaagaaagaaattgaggaaaaagaaaatattaaaaacaagagagtctacctagtgagtaatgtggccccatgatgcataagttcaagctctttatattataagttattttgtacgaatcttttacacattgtaacatttcttgtgacattagaagtgatcttattttaacctttcatgtaacaaattcaagatatgggcagataaatttagcaactcatgggcaataaataaacaaaagcaaactttcctaatgattgtgtgtgattttccatattagattttggactctgaaatggaaaatgactggttgagctggttattgaaaattcaatatttttgtatggtttgcaatattctaatatgattggattgattgtattgtttttgatgaagttgacaactattaattgatatagataatctttacagttttactgatcacttaaaagttggttactttgacatttaagtattaaatttctataagttagagttggtgtaaattagtcttgtacatttggggagatgaactagtagcttttaatcaagcaacattatttgcttagagatatcgatttttttgtttctttcacaaaaaatcattacaatgtttattagtcattattttatgcattgtcgatttggaggaagtattttgagtacatattctattctcaggccttttttccttgttctgatcattatatgaaattgaattttgtctgaaatgtaaggtggtgggagaaatttcagccatatcataaagcaccatatggcattagaaatataagaataaaatggaagtgatttcatgttccaaagttcagtatcgtggagaatctgattgccctcaacagattttgggtaaagatattagttatgataaagattctaatcttgatgaacatggacaaaaggtacagttgattaaaaatggagtggatgacgtattgcaacgtgtggagaggcctcaaacagaaatgcaggctgtagttcctgcaacggttgatgaaacacgagcttcagaaggcaactgcaatggagtttctcatggttacgatgatggtgataacaaagacaatggtgataaaaggaatgcaaatgatcagaattactgtgaagacagttgcctagtgtctgataactgtcatcttgttgtggatactatcgaaaatgaattgccaaacaatattagagaaggggattcatcttttatagagcccatgttgctaaaagaggatgaatctgtggccctgtgggtgaaggtattgttttttttttctttccaacattttatttaaatatttagatttttaattttgattctttccctcaataaacaaataaaacatttacatagatattcaaattatattgatttttcaagttttaatctgtaccaaggaactagtttcaacccttccccctccccgcttttctgtatgcttgttatatgttgatgttgttgttcttttagagcaataaaattgataaatatctaaagaaattacgattatagaatctatgatgtttgaagaatctttgcactaagttcactaatgttaattttcttttttacttcactgtttatccaagtacagtggagagggaagtggcaggcaggaatcagatgtgcgagggctgattggccattgtcgacattgagagcaaaacctactcatgataggaagcagtattttgtcatattttttccacacactaggaattattcttgggcagacatgctacttgttcgctcaatctctgaatatcctcagcctattgcgtataaatcacataaaattggactgaaaatggtaaaagacttgacagttgcacggcgttttatcatgcaaaaactagctgttgctatgcttaatattgttgaccaatttcataccgaggtatgccatcatggtttccttttgtgaatagtgccctcttttttatttttttgataatttctaattactagaattttggctgaatgttcacgctcaggccttgatagaggctgcccgagatgtggttgtctggaaggaatttgctaaggaggcttctcactgtagtggttattctgatcttggaaggatgcttctgaagctgcagaatgtaaacttgccgacttggtgatagttctagaactagggagacaaaaattgaattctaaaacttaacagctgattttttttttctcacaattatccatttggttatatttggatggtggacagcagattatatacatatacatgttcaatattcttgccttatgtttggtaaaaaaattagggttatatttcttactattctgatgaatgtttccctgatgtctcttagagctattcattttggtcttttccctatttgaagatctgattttctatatgtctagcacctcttcttgtcattttcttcgaaactcatggttcatgtttcatggggaactttgaatgcaaactgagtataggatttgtattttttggattttaaaactaaaagtaacttctccttgtgtacttatatttgttttcttcctcgatgagtcagtttttgcttcttttctttattttgtttcctccttcctttttcttttcgggttagcagctaaatgaatgtatttttttccctcctttgcagatgatattaaagagctacataaattctcattggctgcagaattcgttcaaaatatgggagcagagatgtcataacgcacttagtgctgaatctgttgaaatgctgaaggaggtatatataataatttagttgcacatcgatggagctctattgttttttgtttttatgggtggtagtgggaaaactttaaatttatatgccatgtccttaaacatcacataacccattagttataataatattgtcagcattttgttacagtaagatttactacaaattgatgatgaaaggattgatgcactttcatctactattagcaattactgttattttttcatttggtatggtatgaagaattcttagtgaattcaacagacctgtattttttttgaaaaatcttaatgtactataatgtttggctcaagcttttggttatttaatctttttccctcttcactggttcaggagttgtttgattcaattcagtggaatgatgtccattctctaagggatgcgttggtccagcccacgttgggttctgagtggaaaacatggaagcaagaagtcatgaagtggttttcaacatctcatcccttaacaagtggtgtagatcagcaacaagaaagtagtgatggtcctttgaccccaagtctccaagttagcaggaaaaggccgaaacttgaagttcgtcgtgctgagacacatgctttccaggtagaaagtagggagtctaatcaatctggaaacctagaaattgattcttactattttgacaacagagacattataaatggtgccacattagcatcagagccttgtaaaaaggaaaatttgactgaggtagctgtatcaacagactcacctggtaccacttctaataaatggaatgaagttatcactgaaaaggaaaatggtgtggacagacaaaccaaagatattgagatgacacctgttcatctagcgactcctacaaagagtcggcagtgcatagcttatattgaatctaagggaaggcaatgtgtgaggtgggctaatgatagtgatgtttactgttgtgtgcatctgtcttctcgattcactggaaactccggggggacagaaatggctctctctagtgatacacctatgtgtgaaggaacaactgttcttggcactaaatgtaagcatcggtctttacctgggtcaccattttgtaagaaacacgggccaaagagtgatatgaaagcttcaaatttttcggagaattcacttaagagaaagtatgaagagaacgtccctggtcaaaaagccactcactgtcaagatgtagtgttggtaggaggtgttgaaagtccacaaaaagtagattctgtctcagtcatggatagtgagggttttcatggaagaaataacgtaattgagaatgctgagcatcttgttaaagaatatgataatccgaaagtgttgcattgtataggctcctgcttgcccaataacattatatcctgtgtggaaagtccaaagcgtcacttatcatactgcgagaagcaccttccaagctggcttaaacgagcaaggaatggtaaaagtaggattatatcgaaagatgttttcatagatcttttgaaggattgccatgcgcaagagcaaaaacttcacttacatcaggcttgcgagattttctacaggcttttcaaaagtatattatccttaagaaatccagtacccaaggaagttcagtttcagtgggctttatctgaagcttctaaagaaaatagagttggtgagctctttatgaaattggttagcactgaaaaagagagactgagaagaatttggggcttcactgctgataatgatgcagaaataccctcctctgtccaggaagaaccagctcaattgccactggtgattgatggtaaccacgatgatgaagaaactattaaatgcaaattttgcttagaggagtttttggatgaccaagcacttggaaaccacataatggatagccataaaaaggaagcacaatggctattcagaggctatgcttgtgctatctgttttgattcttttacaaataagaaagttgtagaaactcatgtgcaggagaggcaccatgtacaatttgttgaacaatgcatgcttctgcagtgtattccttgtggtagccactttgggaacactgaggagctatggtcacatgtgatctcagctcaccctgtagatttcaggctttcaaaagcagctcaacagaccccgcctgctgttgttgagtctccatcaaagcttgagctgcgtgcttcagcctctgtagagactaattctgagaaattaagtgatcccagaaggtttatttgcaggttttgtggcttgaagtttgatttacttcctgatctcggccgccaccatcaagctgctcatatgggaccaagtttagtcagtgcccgacctgcaaagagaggtgtacgatattatgcttatagaatgaagtctgggagactcagccgtcctggatttaagaaaagtttggcagcagcatcatataggatacgaaacagagcaactaataatattaaaaaacgtatccaagcaactaagtcacttaatactggtgggatgagtgtcctgcctcaaggagccgaaactgcaattcttggtaggttggctgaatcgcaatgttcggatgtggcaaaaattttgttttcagagatgcagaaaacaaaaccttgccccagcaactttgacattttatccattgctcgctccacttgctgcaagatcggtcttaaagcttctttaggtgtaaaatttaaagtattgccagaacatttgtatctaaaggcagcaaaactttgtagtgaacataacatttatttgaactggcaccaagatggattcatatgtcccaaaggatgcaaagcatctgatgattcattacttctgtctcctgtgagatcccttgcaaatagaattgtaaaccgcaaattgaaatgttcttcagaacctgtggatgacaaatggcaggtggatgagtgccattatgtcataaattcaattgacttgaagcagctatccttgcaaaagggtcgtgtactttgtcatgatataagttttgggcaggaaccgattccggtgacctgcatagctgatgacagtgtatccgattctgataccatccttgagggtagctctgattgtcagcattatagacatatgccttgggagaactttaaatatattacaaagcccttgcttgatcaatccctttctcttgatgcccaggtatttcttcttgcaaagtgtatttttcttggcactcacatataatggttattatgatcactgtgtaatgtcaactggaaatttatgcattaaatctctccctgttgtttcttcaccctatcacccacgaatgcaaacacattctgatactgataacatttgacacataaaatccatttcttatttattgataatttgttgatactatctctagattatattttcttttaatattttgacttttttatgtattttgtttttcttattatctttagagttttcaattaggctgcacctgcccgcatggaacctgcagtcctaaaacttgtgatcatgttaccttttcgataatgactatgacgatgcaaaagacatttatgggaaatcaatgcgtggtaggttcccatacaatgatagaggtcgaattatcttggaagtaagtactctgatcaccattccacatttaaatttccatcattaatacatttagcttttcccttactatgacttttttttcttttaatttttcccatttgttcttgggtaggtgccctcgtagaaagaagaaaacaagagctgttagtcataatcaagttattattgctagtttaagatctttagcgaaaacgtatagttcaaaatcttttgttggatgattgagatccctaaaatcagaaacaaatctcgcactttaatcttctagtaaaaatgcgaacaaccgcccataggttcttacctccgtgtttcctggtaaagactaacactttctctcatttttgttaattttcaggaagggtaccttgtttatgagtgcaatcaaatgtgtagttgccctagaacctgtccgaatagggttttgcagaatggagttagagtgaaacttgaagtttataaaacagagaaaaaggtaaagcaatcagatttgttaatagtttgctggagaaaatctgatttctctacactgatcacagggatgggcagtcagggctggtgaagcaatcttgcgtggcacttttatctgtgaatacattggggaggtgttagacgagcatgaagcaaacatgaggcggaagaggtctcattttcttttctaactgatgcagctttttttccccctttacttaacatgtttgatcaaatttcgccaactttgttggtagttagttacatttacttctcatgttctagctattctcagttatttttcttttcctttttgtctatctaaatttactagacctttggttctgctggcatcaatgtatagaataatcatatttatttgccagagttttcaatatttttctaatcattgtttttcaaaatttgtaatgtaatttaattctttgcccaaaaccgaagtataatatcaacttcttttggagtaagctcaaaatctagaatgaaatctttttttgttgtgataatatttctggcactctttttagtttcattttacactgggtaatctaaaaaatgctggtcttattttatttgagcgattacattttcccatgttctatggttatgggttcattgtggtaaagtcaactgtgcaggcaacctagattttgtttaaattccaagcaagattggtgtggtttaatttaaactacttcttatgctaaaggctaatttttttactggtctttgtttattaggtatggcaaagaaggctgcagctatatatatgaaatcgattctcatgtcaatgatatgagtaggctgatagaatgccaggctcggtatgccatcgatgccacacaatatggaaatgttgcacgattcattaatcacaggtgagaaaggagtaatgaaaggttgccacttgcattgtactagatgttgtaagaaattataatcccttgcgggatcgtactttttttttatcagtatttattcttgccatttttatttttatttggtttagtacatttacagttatcctatactctttgatgagataacggcttttgatagaggtaaaggtggacaattttttgtacacccaagtgtgataaaagctatgaaaatgtttcttctgtattaggcttgttagtcgtagtgcctcgtactcatatcatgaaatctgccatatgttgtagttgcttgccaaatcttgtgagtcaccaagtccttgtggaaagcatggactgtcagcgcgcacacataggtctctatgccaaccaagatgtaagaattgtgcaagattttttcgcaatcgtttcccttgaaaatatgacacttgggctattgttactgaaatttgtatctctagactgtgttttagatagtaaatttaccgttttatatatgtttttgtttttataatcttatgagcagatatcattgggtgaagaactaacatatgattatcggtatgccctgctgcctggagaaggatatttatgccaatgtgaaactcccgtttgccgtggccgtctgcattaagccttttatctagatgatcctcattctctctctcactctctatgatgtacaaaaaatttgagttttcaagctggaagatctcacaggttgaagagcaaagttttctggttatattgccattgaacacagctgagtacaattcaagcactttgctcgatattttcttcaagccatgtttagattgtggcacttggatttttcattatggtcttcccccaagtaaggctacaaccttttcctctggtagattctttcaataattttttctcacatcctcatcttaattcaatgaaaaaagaggacagacctcaagccctccttttataaagacttcacattgaatttgttagtattgaagtcaccctggactaatgaattgtagcttttctccttagtccaatttccctgttagttattatttatttggtaagaaatgctaatttgaccaaggttttgatgtcttcctatttatgcactttgcaatatttttctacttttttattaatagcacaagggagttgtgaattgtggggatatcatggaagtaataatgtattccccatggtaagaaagttttgtatttttagtataatttgtacattgtagttaataaaaagttactctatttatttagttacatattgtgaagttgcaagtgaataatgctatcatatagttctttcatagtttgaattcttttcctatttttatatgaatgcccctctgaaaatcttatcttgtttagctgggcattattactcattatttgaaaaaaaaaatggtgttttgtgacataagtcatgtacgggaatgggatatcatttcacacttgaaacattcttttttttcttgggttttagcaaacatcagattcaaaatgtacatagaagaattagcccatttggccattatgccaattctttagttgtattaattagttgggagaagcatgggagtaaaggaccactctctgttgcactgaacatagcagataaggaaaataacttaggcagagaataagacacatcacatgggcttgtgggtctttctttttttaactaaattttcaaataaaaacttcaaggcatgccaaccttgatttggcttgttttgcctcacacactcttttctgtactctcttacaaacatgtctgtgtttgtttcttccttagtttcagactgagtctcaatgtatccaaacactttgagctagttgatagattttgtcttcaaattgaatgagaatataataagtgaaaaggactaagaatactaggacattatacaatttaagtatatgcatatgcatgcataagaacatatagttcttttttcattttttcttttaggaataaagttgtattattaaaggagaataataattcaagaaaatgttaattatgtgtgatgggattgtactcttatacttgagcattttgatagatttcttgttgaaactgaatcagtttagactttacacttgtttcacttttaaataaaataataattgtgaatgattgatgtaggaactggttagtggttatggtattttgcaggctggaaactatttaaaagttctcaatagtgagcttttaatatgatttccttcaaagtctactattgggaccctaatgattatatatgttagatatgattattgaggttgtaatttaatgtgcttacatttgttgactcaaatttaagagtaagcattattttactcaattgtcttgaaaattatccagggattagttgtgattgctaagataattagttgataaagcctttttctttttactatttatgataatttaattgcaacaaccccaactttagagttgttacactttatttattaaattattaatcatattcttatcaaaggagtaataataatatcatatgtgggattgaattattacaattatttgttcaactacaagacaacctatcttagtagtaatttctttttgaaaatcaaacaagaaggttttgatatattttggggaaatttgtgactaaagctgtttcaatttgtatgcactttcttgcaaatctaaggtgttggttaaatttcacccaactattcaaataattaaaattatttggacaaataaagatatgccacgtgtacatacggtggcatttatagtagcatttaagggagaaatttaaagaataccaaaaaaataaaatttatgccttttaccctatttttggagattgaaatgtagaggcttagagatgagaccttagcacttgagaagagattcgattagtgggccaagtttacaataaggccacataacagcacacttggtttcttttttggaataattacatcaagtacaatgttttataaaatatttacatttttacgttcaaaaaatggttttttacatttttacggttttccaaaaaataacacgaaaacaacataaaatcaacaaga

SEQ ID NO: 297322 - DNA, 5169 bp, Cannabis indica
cttgccaaacatagtgtaaaacatctcactagagaaatatacaaacatctgatatggaatcacaatgtccttaaaattttaacaaatgttttatttctttaaacaatgtaccatatctataaatatatgtatatgtatttatatgtacttttcttttgtttgcaacaattgtgcttctttcccagctagaaaataatcttgtttaaaaagtttctaccaggttcagataaaaatgaagaaatcgcagaaatttaattttcttcataaaagcccatctattaagatgtaaacataccgggcattcaccatcaagattatctgaacatgcctgaagatgacaggctacaagttgagtgtctcttctacaattcaactgctggataaaatttgacttcaacatttgagactcctcaattccagaggtcaaaagttccccttttttctgcttgcaagggtgagtgaaattaaacttactatacttaagcaaaaatactcaccctctaagtaataattactgagaaagaagaataccagcaatttctcatgctttaggcacattaaatgctgtttggctttctcaaaaactagcttatatagcaacaatctggtttcagttatcctgcagcaacatcaatataccagtcaatagacagaaccagctacagcagacaaaaataataatgcaactccatggcacaatcactagaatgtaaaataccaccttttattatgcctaacactggagtggtcagcaactttctgtagaagacaaacagaacattagaatagaacaccaattaagaagaaacgtgattgacaagagcggaatatgcataaaaaatttaagataccctagaacaaattcctttgctcagcatacctgggactggatttcagaaccaagcatctcatatttcttaatcttcaagaaatgaagcaaaacatcttccaacatgctaatctgcacatattgatgaaacattaattacttatttaactgaaacaatgaaaagattaattgtagccaaaatcacacataaggagaatttactgcttggacattgagcttatttattgatggcaagagcaaaggatctgcatccctagaaaacttggccaaaatctgcaaaataactcttttaagtgaagacaacacaaccgagttgacaaaaagatttaccaactttgtcagcacagcagaatatgtcagtatcataatacatgaaaagtaatacacttacatcaagccaatgcttctgtgatctgtcaccaacagttttgtctgattctgtagactttttattagcatgaaatgaaaggagctcggactcattatttccaaactggtgaagttctggacttttcggtaccctgggatttttgtacatgtgtcttccatcctcaagaacaaattctgctcttcttttgcgttcaaaagagatctctgcttctttttgagagaaaggactctgtgaaatatgatgttcctcatgaagattgttgttttcatgcctaatgatatcagactgcggtgatggcatgccaccaccatttgatgctttagataattctgttctggaacaattctctgttggttctttcctggtagaactctgaattgctctactcccaaggggactcgaaataagattttccatcgacggactttgagatgactctctgttaatagtgcaaagcatagttgactcttttctaggggaattctgaagttgcagtttcttgggggatctcgaagtcggttctttcctgagaggactcttggtaatcaatttcctgggggaactcttggttagaatgttgttggagggactctcaattgaatctagctgtgcagattttttatttggcgtttccatcatggggcattggattggcacatccttgaaagagctgtgagataactctttaatgggcgggctctaagttatccatttgaccaaaaagaacattatcattacaagtgacagaaactattactcaatttattgaagaaaaaaatgtcatcagcaatgtaaaagaaacaatgatgataatgattccataattgacaaaaatagccaaagttaatgaaattactgcagaaaaggtgcatccttcgattgacaatttaacacttttcagtaaaatccagtccaacatccagcctaaattaaaagtccaatgtttcaagaaccatttaaatataagctcaaaagagaactagatgctttaaaattaagacatattgagtgtaatatgcatatgatgttaaagtgcacagaaaaacaaaaggattgcaaaaagtttgagacctcaagagttgtagatctgggagtagctccactaccgtaaattgtagaggtcggtgattttgttatgatttgaatgttctcaaagtcctccggctgaaaattggagatgactttattcttaggggattgatgatcaaaagccaatgtggactcagttccacgagcatacaacatcttatttacagaattctctgaaattagggcacgttgcattacttttcctccggatgatgccgactgaacgtgtgaagacaatggtgttctctgtataccagttgaaattgaatctagaggctctccatcttttacaaggtcctcaatgtctttgttaaatcgttcctccaaacaagcaacaggagcacccacagactcatgtaggagttcttggccatctttatccagaaaactactgtagggagaacttaaatatgagtacttggacaatctatgtttcaagttgtcagtcccctgcttgatattggaggaacccatgtatgatatattaggatttatcgacctagaactgcttttttgaattgacaaaatgccctggtcatgcttcatgtaatcattactttgggcatttgtcagttttgagaaaggagacactgtgcttgtatctccggcaaacgtaggagtattcatgatagataggtttcttaaactgattaacggactagggctttgcatttgattggagacaccagtagtttgaccattattttgatcagacaagcaatcagaagcaattttgtaaggagatctaccaatcctttgacccaaattgatgttagatacagaagggaccttagccgaattctcatgagtatcgaaaatgtcaatttctgaatctctaccatttctactatccatgtggtggttggcctcatatatcaaaacctcactcattggtgatttagaattggcagaaatgttaactggttcaggattgagatcattgctggtttcagccaataatgcatctaatgtgggtgatagccacccataattatacttatttgggtttgcatccaccatactcatgtcatctgaatcttcaccaactctaaccttttcaaagggagccaaagattgagagcttaccttcttaaattctgttagtgccatagagtttcctgaatcagtacgattagaatcctttgttgctgtcttttcatcaaaaacaaggcggaccgctgttggagtcttaggatctccagaatctgacatcgcaatacttcggtaatgcaatgaaaaagttgtctgatccaaagtcgtctcatgatgttcatctgaggcagcagagtcagatagtcttccgggtctaatgaaactcgacgatacaggaccaaagaaattgtcctctgcaaaaaggaagccggatataaatcattctcagtgttcatatttttaacaggcaataagaacttagtcattcaattcaacaataacccagttacaatagtaagaaatacaatgagcataacacaaatggaaacaaggaatcgttcttttattgtatgcagatacaaacagttcaatagaaggaatagacggagaacatttcacaacaaacagacaattagcacgaatctttaatctagatagtttaattttataactcgaaagactaaactatttgcagaactcttcttacagaaaattcttcctcgaattttttttattagtttttttttttttttttttttttttggtttctacataaatatgattttcccgagaaccaaacagacaataagggctaaaaacaagagcttgccatcattggatgtgacagaaccagcagtactgctcccaggggagggcgatccaataggcctgaggaacgatttcctgccatcactactcccttcatcgtctccggaatcatcactatcaccgccaagttccctgaaaaatccgatcacctcgttgtcaggctccaaggcagtgtccatggcccgagagctgggcttggagtcaggaggcgtctcgtagtcctcatcccggtggaaaaagtgaacggaagtgatctcggtgtccgcgaagctgactcggcgagagcgtttgttcttggtgcggagagcgaggttttcgtcctctgtcttggtgttagagccttcttcggggaccttggaggccattgaaggaatggaaagcgaaattggggattagggtttgaagaaggaatgaggaattagaagaatgtggtagtgagagcgtggagactcatctcacatcagaggacagaaggagggaggaaggaaggagacgcagtgcttgtttgtgcgggaaatcattttattatttaatttattggtttgaaaatgaaatacaatagagttttcttcttcttctttttatttatttatattctttgaaatttgaaataataattggttttttttatagattattccccttaaaaaaataataataaaatcaaataaataggaattttaacaacatgctaggaacgttttgcctctacaattttttaatttataacaatatatactttaggaaaattctatataatgcacctcttaaaatgggtatattgatacacccatatctattttaacatttgaaataattttttggtcaaattttttctcatagtcatgtacgttatagttatttaagatatcctgcaaaattttaagaaattcggaaaaatttaacacgccaaaaactgcgttcaaacagtgcattgcacgcgtgattattttattttatacgcgtgtaaaatagactgtttgaacattattttctatattgtaaattattccgaatttctcaaaattttgtaggatatcttaaatagatataacttacatgaatatgaaaaaaaatt

SEQ ID NO: 297323 - DNA, 2347 bp, Cannabis indica
ttttttactaaaattggaaaaaaattcttaaatttaacaatctcaatagtttaggaggatttttaacgaccagaaaaattcaggagcatgatttagtacatgttaaaattcggggaacaaaaatcctaattaaacttaaggataataagaattgaacacaacttttattttaataaccctcaattttcctcttttttttcttttatttccttgaaataataatgtcatgaatgaacacaagtagatttactcttaaaaatgccttttttctgtggtctaatctcaaagataggagagtcacaattcactctactatctactctttcactattaaaaacatgtccagttctcatgaaccaaaaattatctgtcttcttgtaaactcgactcctcatatgtggatacccatcaaaagcatagtcagaaggattgaaaataggagactcctttcgtctcccattatgagatttgctctttaacaaagagtttgttgttggaggactaaaaacacaagattctctccttggcacagctgcagccgaggcagcattggccttcaggcaattctcaatcaccctcgtctcttccctgaacctgtctcgtaaatctttcaacccgcgaataattttgtgagatcttggccaactcgggactctccgagccgccttcttctttggactatgaagacaatcaaagcagaaactcctccatctccttaagtcaaatgcttttctttgtgcattgtctgaaagacatgaatatgcctacaaaaacaatgaaatgttagctttcactcgttctgtttcgggttcataatttaattttcttttacagtttttgaaattaacttacaacccctccaaaaaaaatgaatgaattgaatgaatgcactcacacctaacatattttattatagttgaatatgttgtgggacttgatgagtctggtttaatttctttaattactctttaatgaaactggtccacatatatgtacaatgcctttatatttgaaatcacgtgggactaccagtagcttcaacccctaaactctttttctatccaattctaataatgtaaggcataatttgacaacatgacttaacatcattccacaataaagatacttgggaatttgaattatatatatatatatataaatatatgcatataatctaacctctgagacaagcttgaatgcaatttcagccttgggatgcttgttcttatctggatgaagttgtaaagctgcaccaattaaacaaaggctttaataaaataaacataatgtttttgagaatgtaaatgtgtgggacattattattattattttcattaaccaaaaaacacataccaagtttatggtaacattttttaataacatctattccagcatcttcttccacctatagatttattttccgatcaataatcatatattttttaaaacaaaaacaaaagatagacagaaagaaagaagccattaaaatggtatattatgaacaaaaggccagagaaaaacgtactccaataatacggtaccaatcaatgaatggtaatttattattattaggctggttgcaatgttgcctatgaacacatgtgttagaagaatggcctgttgaaatggagcaaatttcaactaccaactgggttttgaaatctgattcttgtcccactttccccatttccccaaaaagagagagaaagagagagagaaatggagaaaatggtagagaaaaagatgaacaaaaacaaaggctaaatggggtttcaaagataaaaagggtggtttagttttgttgtgcatgtgtatatgtatatatgttttggtgagtttattccttgttttttaagagagagagagagagagtaaaatcaaggtggagcggttaagaaataaaagggcaaagattgcgggagagagatttgaaagtggatcagttggtgggaagaagaggttctcttaaatcatggcccttgatcatgccacgtgggagaatgtgagaacatctttgaaccatctcagcctttcattttatgcatgtgtgtacgtatgaatttggtaaatttacattatatggtatgtgtatgtatatgatcttaattagtgttaataataccaaatataatgtttgtgattgtgaatcatatattatatatatgtatatattcttgtttaatctcaatcacggtatttatgtatggtaataatagtgactgtggggtcactctctcccttattttcaaaaaaactaattatgctcttatggtttatgcttaattagccctccttctagttgttaccataaataatttttaaagataataaaaactaaaaataaaaa

SEQ ID NO: 297324 - DNA, 5767 bp, Cannabis indica
tgagctatgcagctcttttatgcatatcattattattatcatttgctccctatatttatgaatatatataaactaattaagcagagaacataatcataaagacgactaatgattgaattgagtgaaataagggcatcctatagaaatcctaaacaatttactgcatcaaaaataaagttcaaaataatcaattgctcacttatcataattgctcacaagtttctaaaactcgaacagaatccttactatagctctaatatattggtttgcaatttctctatatacccaaaaaaaaaatgcccataagcaaaataatgcactcacctaagaattttatatacaaattaattaagcagagaaaataatcaaaaagacaatgaataattgaattgggtgaaataccattggatcactaaagatatgataaccagttacatcaacaccttccaatatgtaagaacctaacaaaaaaatcaataaacaaaaatttagaaacacaaaagaaaaacctaacaaaaccacatcacaacgtatggattagtcatactaccaggttgttcatcgagtttgggccacaaaaaatcgaccttagtagaaagacaagcaccggaagcaatcgcaacggcggtaacagcgacatgagtgattgtagaggtaacggcgccgtgaagagaagtcgatccagcggcgatgacgttagcggaggtgaagacggagttaagagaagaagagacggtgaatttgggaggagagagtaggtaacggaggttggaagtagtagtagtagtagttcggcgattgaatcggtgagccaacattgggtggtagttggatttggttggggtttggcttgagaccatcgtcttctccggcgtcggtctctgcctcttccctctgattctctctctaaaaattttgtttctctctctagaaaattttcaggtggttgtggtggttatctttttcggtttaaatagtaaatttaattaattaaataatagtaataatttgtggtttggaataattggaaataaaaaaaaataaataaataaataaaagaggaaaaagggaaaatgctctcattgagagttgaactcaagacctcccgcttactaaacgggtgctctaaccaactgagctatgagagctttttgtttggggaatatattataattttcttattgttgttgaatataataagattaaggctaattagaatttttgccccctgaacttttaaggtcgttaaaattttttccttaattattgagattgttgaatttaaaaatttttttttaactttagtaaggaaaatctaatatgaattaaaatttgggaggtatgatttggtacatgttaaagtttgaggggtatgatttcgtaaatattaaaatttgaggagcataatttagtacatggaaaattaatggattagtaaagtttaatgaaattggataaaagtctttaaatccaacaatcttaatagttggtacatattaaagttcagaagacaaaaaaatataattgacctaagattaatttcacatcagttgtcaatttcacgggttgatggtttctactgctttgaaagttcccttcattgcaatctcttattttcatgatttcattgtagatgtctttcattgtagatgtctttaatcttttgtcctttttttctaatgttatatgttactcatgtcaaatgtacgaccaataaggctgctcgggttggttaaatttgcattagggatggataatgcttgttttagttaaagaatatccctcacacttatttattctattctttcttaattatattcacggaattatttggtaattaagtattattattattattattgctgttttgcaaattcttctcttctctttttgatagaagctaatttgtgactcaaaagagacaagaggtaagagtacttgttaattaatgggtttacttaaaattaatgattaattactatttaatgaatattattagtgtataatatactaaagtatgagagaaaaagagatcaaaatctactaagatcaaaatctactaagatcaaaatctactactccatcatcaatcccatgtatatatttatatataggaatatatgcatgtatgagggttgagcatcataaaagcatacataaatcctggtatttgtaggtttatatttttttttcatcaaagacatcctgcaaatctttgaaaacgaaaaaatatacatcggagaaagttttctttcaacttcgagtgccaccatgtaaggcgaaggaaaaaaaccgaaaaagccacctagtgaacggtcattagcctctaaatcaaatctaagaaaaaatttggtcaagacttctcagcgtgcaaaaggttgattctttcagctttttaacaattgaaaattgccccctttgctcaagacgaacctacaaaaacgaaaagggaaatggtcgaacgttcgtgagtaatgtttcgttatttgtcatgagaaaaagtctagttcgggttttttgaaccttgaaattagaatgatgaagtgccaactgaagagtatccggcagctctcatctctttgagtgtcccggccaaccaatccaagccctcataaagtccatctccacggagtgcacatgtcccttgaatgtgccattttctgtttttgagatcgaagaggccaagtccttcgcatacttccattggtgacattgctcctttctttgttatggaaagagaaaaaccgaaattaggcaaaaattaagagtgtttttctcgaataaacgaaatactagtgcaacataccatgtcttgtttattggcgaacaccaagatgacactgttgagcataaatggatcgctgatgatagcctgaaacagagaaatgaaaactaattaagttagaaacaaacagctaagggaatattttgaattatgatttgttaatgaatcctgaaacctgaaattccgcctttgcttttgtgattctctctcgatccaaggaatcaacaacatatatctgcaaatcgagcaaagaaagaataacactctcataaacaagccatcaagcaagaataccgaaaacactagcaggaatattaccaagccgtctgtgttattgaagtaatgcctccatagaggccttagcttctcttgaccgccaacatcccaaacagtgaatattacgttcttatactgtactttctccacattgaaacctgcaggagaccgaaatatgtttacagagaagttcataaagaacagtagtgtacagtaatcttcgaataggtataaatagcaaaggaaatgatatccaaatgtaagtacgaacgggaactttcccttaacagaaaaaagagaaaagaaaagtcttaaaagagaatcgtgatgctatgaaagaacccaaaatctcaacagtcgaaaagagtaaaaatgagtaatggcacgaatctttttgtaccatcccgcagaaaaggaaggaaataaaaacgagtgaaatcaatgttcggtggtggaaagaaacggcatatagagtaaaatcttaaatatgaaatacaaccacacatcaaaccaagaggggtggctcaaatggttaggttagacatgttgtttgctcccacaatgtccgaggttcgagtctgttctgattaactataattcagaatgggctcaaaatcccaacagtcaaaagagataaaaatgaataataacacaaatctttttgaactttccaacagaaaaggaaggaaaaaaacgagttaaatcagtgttcagtggaatgaaaacaacacaatacgttaaaatcttaaatataagatacaaccacacatatcaaaccaaagggggtggctcaaatggtaaaacatgtcgttccctcccacaaagaccgaggatcaagtccattctcaataaatttataacatactcgaaatcccaacagtcaaaagaagcaaaaatgagtaacggcacaaatcttagtgtaccatccaacataaaaggaagggaaaaaaacaagtgaaaacgacatacactataagatgttaaatataaaaaatataaccacacatatcaaaccaaaaggggtagctaaaatggttagacatgtgattcgctcccacaaagtcagaggttcgagtccgttatgaataactataactgctacaatttcctggtccacagagcctagttcataaacacaagatacaaccacacatttccaacttcaacaactaaaaattgacataccaattgtgggaacagttgacaaaacttctccaatgtgcagcttatacaaaatggtagtcttaccagctgcatccaggcctagcattacaacctaatccaacacaacaaacatgaaacattataagcaaagcaaactaatcaaacactaagagtaaaaacaatactagcttactcaaaggtaataatacatcacaatgctcatcattattacaacctaatccaacataacaaacatgaaacataagcaaaagcaaactaatcaaacactaagagtaagaacaatactagctcattcgaaggtaatgcatagcgattcatcataattacaatattatttttgtaaattttaaaaaaaattcaaatagtttacagtgttgaaaacaagtttgaaataaactatttgaaaatttaaagttttgatattacaattacaataatatctaaagcttaaagccaaaaaaatcatcattaagtgtgaggtttgaaatgagcaacgtactcaaaagtcaaaatcattcaatgtcatttgaaatctacaacaattaattcaattcaaattcaatcaaacaatcaatatacccatgtgactgacatgtccatatatttatacagaacgaaaacaacagctataagaagtctgaacataaatcatcactcataatatttctacaaaaaaatccatagcaaatacatcgaattcccctcatcaattcaattacaagttataacaaattcaaaaaaaaaaaacaaaggaagaacaagagaaagagaataaatatacatactcgcatctcggtattaccaaagaaagcatcgaaaagcttgcgaaaagcttgacccatagtaatcgaggtttcgctgttgttgaaaaacttatgtgttttctttttttcaagtagagctcatcgactatcagtggagcttccgattccaattgagatttgagattgaaggttagattaggtcagattgattcgatctttgaaagaagaaaatgaaaaagtgtttagcgtttgattttctttctttctttctttctttccaaacactttttaggaaaatcaaaagaaggaaaaaaaatacagagaatagtcttctttttttatgttttttttattttctattatttttttaagggtaaaaagagtaatttaacatataaatacttaagtttaattattagttgtaaataaatatttaacgtgattattaaatgttaagtaaattgttacgtaacaatttttgattggttcaagtcataaatttatttttaaaaagaaaattaatttaaatataaataaaaaaatgacacgtgaaaaatgacttaatataacttagagttccaaaatataacttaagtattattaccgagttgaacttaggtatttataccgcaaattacttgagtgaaaattacagattaaaccctcataagaaaaggttcttacgcatactcacccatccgacttgcatgtgttaagcatgacaccaacgttcatcctgagccaagatcgaacactc

SEQ ID NO: 297325 - DNA, 7071 bp, Cannabis indica
ttttttttttacaaatttgagtctttagttaaatatactgttaaatactaaatagatgaccaaggtgaaagtaaaatttcaaaatcaataaagtaataatctagttggtattaaacagtaatatacaaatagtacctcaaatttgtagaaaaaaaaagtaagagttttgaaaaaaaaaaaacaaataaattatttaccatcaaggttcttttggcaacattatgagtcatacaaataggaagtgtataaatttttagtaaaattgaaagcattatctgagaccaaaactttcacaaatggtctggtgtaaaatttgatgaagatgtcagttttcaaatcttagcaagttgcacattttcgaaagccaaagaaaggaatttgattgggcaacctatctcttatataaagagataatgtaaaattgttagtgaagtaaattagacgtaatctcctattataaaatattatgcaacatttgaagaaacctactaaattaatctactataaatttatataaaaagatatttctttttaagaagtaatccactaattctgataaaatatagctattttaaacacttactctactaataatttcatgacatggaaatggaataatgcagtttaaatataaatttatgataatatcactagctaatgtagtgggaacctacaccattacattgatattaaatgaatgaactagagtttctacaccaaacttcattcaatattagtttactaaaaaaaatatttatgtaggaactctaaaatttaattttgtattaataagattcaaatatattttaaaaaaatttatgtgtaataaattgtttaaatcttaattttagcattcaaaattgtttgaaattttttataaatttgtaataaatctatgcaaattatactactaaaaaaaatgtgttcatataattcgcaacatgtggttccgagcctcaatttattcgaatcaaactatttaagaccaaactaaactaatttattgtgaatggtttgatcaatctaaactgtttataattctctagtttgatcggtaacataatagatcaaatcaaaccaatttatataattattttatatatacttaatatatttttttgaataaaatactaatatttgagaacaacttgtaaaatattgattttaatttaatattgtaatgagaatatttttaattattatttatatagtataaacttattaaaagtagaaaaatttctaaaaagattaactactctattaaattgatttaattatttaattggcttattttaaatttttttaaaaaaccataataatacttacttgatttttttaaaaaaaattaaaaattcaaactaaaccaatccataaataccactactaaataacaacaatcactattcaataatttcctattatatattatccactaataggttgcgtgttctttttactttcgaattaatggacaaacaaattgtggcttgaatttctatccctatatcaacttaattcatattggaatcaattcacattttaattttaattgtacggatattactatgatatcattactaaacatttaactaaaaatattaattttaaaaatattaaattattaaattttaatccaataacaaataataaaagaaaattttgaatttctatacttaatttaactacttaaatataaaaaaaatatcacgttttacattatattaaaaatttatttctatacaaaatacttaaaccaaacttaacttctttttttgtcggatggaacaatcccaaacttatattgtataaaaatgagagattttttttaaactaaacataaaaacttaaatttttataatattacccatgggtaatattgcactcatatatatatatattatatatattagtgaattaattattgaacacgaaataataaattgactaactgtgataatggcacacactacacttcacatcgtgtcccataaaattaaattaaaaagaagaaaaaagtgattatgctgctatcaaattcatgcaacgtatcaataagaaagcagataaaataccagatggaaaaatcatcaagacccactacaatttcaaaccgaaaattggtccgacacatagaacccgaacccgaacccgaacgcatgaacatgccaccacctctcgtctccaaacttacaggaaggcatccttctcaagcaactttagtacatcttgctgatcgttgagcttcgcaacatcgataggagtcttcccatctaagttctgaagagtactgtcatcacaaacaagccaaaatgagtgagtatatcttaaatggtgtcgcacacaacaacaaaaattagatttgactctacttacacagcggcgccattctcaagtagaagtgccacacactccttccttccataaccagctgcataatgtagtgccgtatttttgttcttatccaaagcatccaccttcgccccagcctcgagaagagcttgagcacacttgacctgatattaaaacagattcgataaaatcaaagtctgaccaacaatacaagcatgcctttaaacaaaaggagaattcggtacgtagtaatagatgatatcataatcatacctcgccgtatccacatgcaaaatgcaatgctgttcttccctctgagtcttcctcatccttattggcaccagattctagggcttttttcagaccctacaacaagaaaattttgtaactccggatactgatctaaacatgtatagaacaaactaattatggtaattaaaaccgttctcgtgaaacccaacaactaatacttgattaataacaatttggatattttatcaattcttttgcaactttactcaagtgataaaattttgtgaaaatttaagaggccaaatataatcgaaaaaaaaaacaagggaaaccttggcaaaccactacaaatgacaatgcaaaaaagaatatcataggtgaaataccaagtccaagcttaactcctctagttttttcaataatcaagaaggatattggaatggcaaattttctccagataactactctaatttattctacttctttaaagatttcgtctagcagaaaaattacactctgatcacaacttccagttgatgcaaccttttttggtttctactttccatattatcaaaaaataccatttaatatacctcaacatcaccaacactagcagtgtgatgaacaattgattcatcatcatttcctgcctcttcagcttcttcagttccagccttctcagtggaagtggctgcatctcctgaaacagcaagacccatacccatagcttcacctagcttcttcagaacatcctgatcattccaatacctgccaaaacagatatttcgtcagcgaaaccaaacgttaataaaatctctgtatcttagttcaagtatataaaaatattaaaaatgacctcatcatcgcagcaggaccaccactctctatctcttctaagataggcttcaaagatggatcctccttaatgcgtgccattcgttcatcaagctggtccttgtttgctggattttgcaaactctcaagcatggtagacatggatggatcctaagcaaaaataaataaaccataaatgacttccaagtattcaccaaacaaagactgacaacacaagcagaacttgtaaccggagaaagatccgcatacctgcattaatgcattaccaaggcgctcagccatggtcataaactgaggattctgcataacctgctgcatggtggaataatactgctgagaatcaaactgaggaatttcttcttcaacttgcacgccttgaaaagtcttctggagctgctctgccatctggttaaaagcaggatcttttgcaatttgttcagctagctccttgatgcttggatcctaaagatacaacaaatgataaacatgtgagaaaacacaggcaaattgctttaaacattagaattaagctcctctaagctaaaatttgactagaaaaaaaaggaaattgaatttgagagaggaaataagagaaataagtaatacattaagcaagccggtcatggcagagaaatcaaaaggatttggaggagcatcaactcctggaatagggctggctctactttctcctgtctgtgactctccagctgaagtttcggatttgggtacagtgctctgtggtgaagctggcttttcatctgaagaacatatgatacacgtgagatttcacaaataaaattatcttataatcagaaaaataaagtagcccagaatcataatttgaagtgagagaaagtatctatgatgcaaaaacgaaaccccattaattaaaaatattgaatgaaggtttaaggcactagaagtaactatactcccaaaatattctatccctatttcttattggagtatattccccaacataggagtttccgctacaaatgtcagaaattcaaagatatgccaatctctagctagtgttataaatctcaataaaccattttccatcaccgaaagaatgtcatttccattcccattacacccattactgatttcaaacgcaatctctactaattcaatctaaatagccagattttctaaacaactgaatcacttcacaagaaaaaaaggaaaaagaaaaactagcttttacaatcaccaacccaccatccaaaagggggtttccatttgaaaccattaaccctatccctgtctacatcaatcaattatcaaatccatccaaagctaaaacaaaatcaatatctaacaacaataccgacaattatacaaaatcaatacacaatatccaaaaacaaaagaaaagaaaattgttctctctcactcaccagcaggttgaatccttctgcgaattcgacgccatgataatacctaaatcaaaacccaaaaaacttgttacaaaaatccgaagctgcaaccgaattatagtatcgaatcaaagatctctatagtttgaaataaaaacaattgaagcattaaagcgattaaaaacatattgaaaaaagagaaaagagaaaattggaacctgatcctttggagatgagaaatgaaacacgcaaaggggagattcagattcaaaaacctagtggagtaatggagaagagattaagcttaagacctgtgtgtgtgtttgtgttcggatatggtatgtggtgggtttggcttgtttattatcgattcactcacacactcttggcttcacctcatcaccaccaccgattgtatctatctatgtatatattatgtatataaagaattactaaaacctattattcaccatttttaactggtaatattagtggtgtaattaaatgtcgtgtttcatgtaatttaagaaaataacttttttagaatattgcgagccaattatgaggccacacggtgttggaaggtattcgacagcactgtgtccaataacaatactcatgtatattataactgtagaataatttacgtcgaaactcctttatgttttaatttttatatattgaatcttctttttttttgtaaaatttttataagttttttttaagaaaatatttaagggtgaattaaatattaactgaataattactgtgcaaagtctattgaaaatttttaaaattaaacccttaagaaaacaaaatatattaagactacaatttttattactagttttttttagatgcaattataaattttttatttatgtatatatataataataataataaataaaaaaaagaaataggtcttttctatttagaaaataagggtcttgcataatggatcaaattgtctaatgtttagaccgatcttgtacttgtgtatacgtgaaagtaaaattttaaagttaatataataataatttagttaatatttaagggtgatatttaactgacactttaaattaaataaaaaggaaattacactagattagatacttcttttaacttgatacttctttaatttttaccctttcttttaaagtctgttatgtttatttttttttaattattctactaattttattctcatcacttcacgataattttcattattctttaatcgaaattttgtcctaactttttcacaaacttacacatctatctacaaataatataaacctattatgtttgaaattatatcttagttatgtgagagtgcgagaataatttgggtataatactcataaaaaaagtatattttaattaaattttatttagaggtaaattttgttaatgtattaaaaaagatggtattcttcattttctccaaaaaaaaaagtaaatataaggtaagtttgccaaaaaaaaaaagtaagaaaatggtgtaattttataaaaagataaaagtttacaattttactgtcacatgaatttttttataaaaatactgtctttttataaaataaccgtaaaataataaaatagaataattaaaacaatagtagaatactaaaaaagtaattgtagaacaataatgaaaacttaacacagtacaagtataaaaattacatagtacttttgaaaaaaaaaattcacttatagtaaaaaagtaaaaaatttgaatatgtggtataaaaatcctaaaaaataacccatgaatttgtatgtattattgtacaccgtactaacaatataactcaaccctctcttgtgggcccacctcaatcctctcatcttcatcatctatcgcttcgattcaaatcaccacacccaatattgtcccttttgctcttgggccctgagccttacttaggcccgttactttgtatgggccaaaacttattgaaaattgaagaaattacattatatattcactttattttatttattttgatcttaacctctattttcatttttcttaagatatacccactattaatagatgatgtccctattatatccctaaattaatgtaaaatatagggatttttttagaaatatactaaattaggtaactttttacaaaaataacgttatttttgaaatgggaacataataacgtgacacgtcatcatcttcccaacgttaaccttcaatggagcaaaggttattt

SEQ ID NO: 297326 - DNA, 5059 bp, Cannabis indica
agtatttaaattgatggatgcccaaaaccgggtttttaagatggagggtcaatcattggagagttctcggaggagtaaattgtttaatgtgggattgaagaggtgttgagacgagattgaggacggttacttcgtagacaggtgtaccaataataagaaaccttatgagtcacattggtgcaccctctttttaatagcagataatctaatacaacatggaccacataactaggcccacagaaacaataatagccaataacaacaaaggattttggacgtacccgtacttttaattttggggtgtttattgtagaattttccaatattattattattaatcattacttaatattttattaaaaatatataaacttcattatttttatttttttattacttaaataatgataatgataataataatataataaataaagaaaataaaattatgtaaaagttaatgaatgataaaagtaatattataataaatgaaaaatgtaaaatttattgtatattaaatttaacataatattatattttgtgctaaatttaatataatttttagcgtaccaaaattgacacttttagaatatcattggaaattggaattgtaattttttaagtgtaataagatataacaatacatcactcttttagcacttaattttattgggaatgctagctatctataagttgagtaaaaaaaatataaagctatctatatatatatatatatatatatggcgattgattgatacaagtgtgtgtaactggcataaaagtcctcgttactctcctaattatagtataattatcataaatgtaaactctgtaaacataagatttaatgtataattggacaataaattcaaagtgaaaatggactgtaatggcgggtatttaacctttaattactaaaagtggaaaatctaattttaatcaaagcaagctacattaaccatttcttcttgttatggctatggcgatatgggttgtttcttatgataagagcatctctaatgaaatactaaataagtggtgtattattattttttagcacttttcaataaaaaatttctctaatagtgtgttataaattgtatcaaatttagcacatgctaaaaattgggcaaaatttagcacaagatatagcattgtgccaaatttgacacacaataaatgctacttttttaattacacttttaccattaatcatcaatgaaatactttaataaatatattttatttacaatattgccactagtaattttttaaaatatttaatttattgtttgtcattaatgatattttactttttagtaccaatttaccgtttaaaattttgcaaatattgtgttaaatataaagtttgttcatttttttgtttcaaattttatacaatatttacatcttggattggagatggtctaaattgttatgtaactactaatacaagttctaaatgcatgttaaaagacatgttttataataataataataataataataataataatctatttatacaataataaaaaacaaattgtaactgtaataatttgcggtaacaaattaataacttggttacatagaaataacttgaaacaacaaaatgattggaaaaaagtaaaatttgacataagagaatttacgtggtatcgatattttttcgaatactactagtccacaaggctatgatcagagaatgaaatcaattagtaaagtgttaatactgaaaagcgatcaactctgtaccgtctaataagcgatagggtggccaatgaatatatgtatagaaagtaaaaataaaataccacaattatagtagttcactctccttatcgcgaaggtaataaagttacgtctacttagagcttttattatcactaaaagttaattgacttacaagagaacttagaaaaatcactatgtttagcttcgcttcacaatttctagagagagaaagtgtgaagagagacaagctctaacctggtagagaaaaagtaaagtgtgaaaaatgagctagaagagctcttcttttacaagaaatgaagtctaattaaattacaacaaaaaaataagaaaatttgcacaaaatttgctaggaactcctacactagattgtgagtcaattttgaggccaagtcaaaaatcattctcgactaaaaggatctatttgtgaagcttatgtgattcacgaggcactaagattttgttctatgtactatcggaaagttgaaacttgattcaaccgaaaaatcgaaatagtgatgtcctcctaaataagcttgaaagggaattctccgtattcaagcatgttgagagacctattggtaagaggataattttgtttctaccaatacaataaaagcttaaggcaaagtggtacatactgaataattgtattaaagtagagaagtattcaaataagacattttttgcattcttaattcactcatttcacccacgaccatgtcttacaaaaatctatttttgtgctctaaggatatgaatgagctacaatttagggatcatcaaaaccttgacacaattcaagagaacaagttttgtgattggttcaagtctcgagtaagtatcgctttctactaattttgtcattcaatatgatttatgttagtattattatatttctaactcaatgatagattaatcaactttgagcaaacaaccttagggaaatatcagatgagttgtacgccatcgcaaattcctctcgttgtttattattattatggatgtattgttaacggtattaaattcctagttgaggaccagaatgacaattgtaacatccaaaatagtggcattttgatgcctggtgaaggtggtaagaatttttatcgcgttttttcactagcatctgggtagcccgtggatggtatcaaaatgaaccattcatacttacatcccaagaaaatttggtatattacattctcgaagtgaagaatggagatgattggaagcttgtcatgcttacacgtcgcataatgtgtgggatttctcagatgtggatgatgaacaaatcgcgaatatacaaaaaaaaactcttcaggaatctagttagttgtacaacttccacacactagcctatgtcgaatatgtctgtgatgatgtcgacccaactgaagtgaccagcatggactgtgtgcatcatgaccatcaaaatttagataatttcattgtttgtagtgatgttgaagatactagtggtagtgatgatgaaaataatgtaacacttaatgatggtgatgaggatgatgattatgatgacttgtggactttaaaatattgtaatattttaacccaccattaattatatcaaatacatgtttctttttctaataaattgattatgattgtaattacttttttattattaataaatatagcttgtatgtgtagaatgtttggcacaggtgcaagaaacagtaagaaaaaggaagttagaggagcatacaaagggaaaaatatggaagaagaactggccaagcaggctacgggacagaaattaaaattttgatggcatccggagactcgggcccccatacacgactatgggaacaagtttaataacatggtcaagctctttgttcgcaacaccattcccatgaataagctcacttgggaaagcgttgacaaagccaatattcagtctatttgggatagactagtggtaacattaatttttagtataatactttaaataaaattattgtacaaaaaatatatatgactttaatgtttatttttttttccaggcaaaatttgagttctcacttgacaatcctaaatctttagactacggtttgttagcaatatcaaaagggatacgggtttggagattgaacatgaaaaagacatggaagaagaatattgctgaaattgggagaggtagaggcgaataggagatgtccacaaggggtcacacgagaagtgtgggaaaaggtcatcgttactggaaagaccaaaacaacaggtagaaattaaaaattctaaaattgaatttctattaactaatgcgtttttgcgcatttagttgaaaataaatttattttgaattacagtgaagagccgaacaagacgcaaaaaattgaagtcaaatgaagattcaaagtgaatgggggttcaagaccattgtcggccacatcgtcagtggggtgtattgctataaatattattgctcaaaaactaataagtttttaaataatatatcactaattctttatatataaaaaaatatgctaatcccgagacgagagaacttccatgtgccatgaaaacttttgagaagttccacctcaagaacaacacttgacacgatgaatacacacaatgattgcatgcaagtaattttatatctttaatcatatcgttctatatttaatttctattcaattaatgttttttgtaggcctaaatggttgagatacgcaaaactcaacttgccctaagcaatgtcactcattagtacaatgtagaactcacccaatttcccacagacaggtatgctatgacacaggtgcttggtgaatcatcatgccacttgagaggcattcgccctttgcctagacttagggcaagattcatacaggaaactcccagggcaagtccctctaggcaaccctcatgttagcatcaaggaatatgaggcgttgaagtgaagggtaaatgatgcagactcataatcaatacataatacgtttcaagaatagttcagtatttttttttgggcatcgtgcctggcttcaacttgcctaagatgtctctgattccaccgatacgtcctactcctggcattggctcttcatcacaggtcggctctcctagccagaacgacgatgatggcatttattttttcattattttaatgccaaataaatctaacctaaccctaggtgattgactataaataggtagtgatggcttcaggaaaaagatgatgcatcttattccttcagagaaaaactgagtgccttctctccttaacctagccgccactcctcctctgtcttcttcaccatagaaaccgaacccttga

SEQ ID NO: 297327 - DNA, 2507 bp, Cannabis indica
ttatttaaaaattaaaataaatttatcaattctatctctagaaattcgagtaatacttttaaaattgcttttcattagttaaacaaaaaataaatgtgctcatgtatatgcatagtttagtattttcatacttattctcataaagagaggtgtaaaaagtttttatacataaacattctgtattttctatgttctttttggcagattaggaattctttaaattttaatatgtatcaaattatgtttcctgaatttttgtaggtctttaaaaatttctcctaaattattaaaattgttaaattcaaagacttttatctaattttactaacggaaatctaacatggataaaactttaagagcatgatttgttacatataaaaaattaggaacacaatttgatatatatcaaatttgaggacacgattttatacaaactaaagtattcgagagcagtaaatatcaaagtttaggggcacaatttatcatatagataattgtcttgttagtaaaattaaacgaaatgggacagaagtacgtggatgtaacaatctcaatatttgaaggaaaaattttaacgaccttcatagaaaaatataattttttttaataaattgctattagacaccaataatgttggagtgacgaaggttttatgaatgattaattatatttttaatgtatatataggcaatgatggaatagtgggaatggtatttcccaaggcaaaaaatgaagtggtagtaaaactgaaagaaggagacattattccagtaccactaggatcactctcatggtggttcaacacaggagaaaacaattccaatctcaaaataattttcttgggaaaaacaaaccattctcacattccaggagaattcacctatttcctccaaacaggtcaccaaggagtcttatcaggcttctcaaaccatttcatttcccaagcttttggtctaacccaagatgaggcccatattatggccaatagccaagatggctcattactcatcaaaatcccaaaacagcaaaccttaccaaaacccaataacaataatgacatttaccaaatggtacataacatagatgttgcttttcctcatggtcttagagttgacaaggaaattgggggttggaccactttgactcaaaatgagtttccttttcttgagaaagttgggttgagtgtgagtttaattgagttgggtgccaatgccatgagttcacctatttacacaactgattctagtgctaagatgatttatgttgtgggtgggaatgggtgtgttgaaattgttgggattaatggggaaagggttttggagagtgaagttgaagctggtcatttggttgttgtgccaagattctttgtggttgctgctattgctggtggacaaggtttagtctgcctttctgtcatgacaaactcactgtaagtataaatacactttcaataacttgatatacatattattattattattcaatataatggatttttatgttatttgtaggcctattttagaggatatagcaagcaatgaatctagctttgctgctttgtcgaaagaggtgttacaagtatcgcttaatgtgaagccagaatttgcacaagtaatcaagtcaaagattacaaaaagctcactcatcctctcttcatcaaaccgtaataattagttgaaaatgttatgaacatttttctataatgtttgtttagttttatggatcctaataataaaaaaggtcgatctacttatgtcgtgaagtttatttattttagtgaaaatagaaaacttacttgaataattgacatgtttctttacggaccaaggtataaatttatgaaatttttacatgattgattatctttatattaaatgtgactataaataaaaaagaattttttttaaaacattacaatttaaatttaaacacatatctaaaaaaatatctttatattaaaaactttgcacatattcaaaaatattgttaactgaggttttcgacaaccaataattagagttgtaggaagtctcgttgtgaatattagaaaagaagatttttacgttacattagtgagctttagtccacgagtcattgtatttaaggcattttacaattttgtatacattattttaattaattacaaaatatgtgcaaaaaaacttattatcattttctcatacacttttatatataattaaaaactttttttaatttttattataatatatatggtaataattattgattagtatatatatggtaatattggttatgtttatttttatgtttccaattataataaacatactaataatataaaacattttatatatgtgtttattggctatgtttatttttaggtatttttacacctgatgccacatttgctcattttttttatttttttggtcattacacggttttttaaacttttttaccttttacatttttcaattttagttttcaaaaaatttcataattacaaaactacctttaccatgcat

SEQ ID NO: 297328 - DNA, 3684 bp, Cannabis indica
ttttagccaccattctgattgaaactgttaatgttgcattttcctctagtattcttgctacaggaggattggctggcactaatagtgttggcctagacattcagcaagtcttgggtctgttcaacaccctgagacttcctattgttaacttgatctcctgtctgggcttgtatgatagtttaccctagttttatgatattgcctacttattcgaggaactccttcgtgttgtgtgttgagatcctctagttatctttctagatgtcatttaatggaaggatccccctagtatggttgtataacaaccttcttctgttaggcctttgaccttggtggcctcagccattaacctttgtatataatccttcgaaggtttgccttgtcattgtttgacctcaataaggtcttccaactataatggtacttgatgtgtgccaaaggatcttctcgtctggtatacatcttccatattggaatcttgaaattgggcaagggtaaggcattgatgtatgccaagaatggagagccccttaacctatgtagctcaaggtttgatggttttgaaccaactaagccctttatcatgtctcttaattaatctaactatgcttatacagaaggatctgatgttgtaagatcctggttgagtggcctttcttgattggattgtagctctggattggacaggacctcgtctgccacacaataagaatgggtatgctaaggtcagctagccccaagctttgcctttgactctggctagtcatccctgggttaagcaactggccatgaccagccattaccaccatgggtagttgttcatggtcggccaactctattttgggcaatgttttgctgccctttctccccttattggccgctgtggcctaagtgttgataggggtagatcacacaaatttctcaggtttggtggatctaactgcttgaagtgattgttcaatggtggaacaaaatcatttcgagtctcacgccatgagttgatgttttcttgggtaattccacccattctaacatctatccaattaaagatgggccttggaatgactttctcccgaatgttttgaggaggaatcttgctatgtaagccagccaaaggtgccccactaaggggctggccaacctggccgaccccccatgccattaggtgcaaagtctggctactcctactactagatctgtgtggcaggacttgtccgtcttcaggcagggaaaagtatgtcctcaatcatgaagaacatggttagacttttttcctgtagaccctacctaatttgtcgactagtctccctaggagaggatctttaattagatcctaacctatcctagtagttatctcattgaactgccttatcaggtcactagcttctctattacggtagtccagctccgcctgttgagattggaggatgtactcctagtcatcaatccatatcagtaattcacgtctttgttgtgcgaatgcattgcaaccaatagcgcgtgattctttagtttggccaacttggcatacaacttctctaagtcttaccaattcaaagttttctctaagtcttaccaattcaaagttttctctaagtccacatgaggctcaccaattactagtcaaccaattcctagctttatttctccagcataatattagggactagagttagtctcggtgcaaaggggttgctccacattaacaaaaccctctatacggggtgccaatggtggatctactctaggcagtagaggctagtcattgggatcaatcgtgttagtagggtcaactgaaacaattttgttggtcgagtttgttaggcctacccacttagtagggttaccagcattggctacatatgtgaagtttgtggaaactccaatggtgggtagaacacaaacatatggattagtagtcatggagtcttgaggaagacccaatgaggctaaagttgtagctgaatttttccttgttatagccatggtgattcattaaatcatagacaatgctctccatgaaagcaccaaattattgaccttaaatttggccaatcaataatgaagtcatatttattatcaagatcactacgtgtacaaaattagaataagtaaataaaaacgatacaatactttatagaggtttggcccccttagttagcaagtaacgacctactccccttttagttgtattgatatgagagataataccactaaggtgataagtgttgatagttctagagtggctctctatgtattacaatagtgagaatctgaggaagttctcaagtggatgagatgtgggagacttagtctctactacagtgttaatggcatgtagaagagaggctgagctatggttttgagttcttgaactcaagagcttaggaataacaacttaatagctttcaggtttagcctagtgctctttatataagagagagcatacataagatattagattaatatcccttagaattagaagatatcacttatttgttacacattaaataaagaagaaaataagtcattacttagccctaaagaataggtaaataactaaagttaaacccttattttgtggattgtttaaggccaattcatagcaaaaaatgtgatcgaggttgaaagctacagaggcacaaaaagtgcctaccagaggagaagctagcccatctaccatttgttggaggctgaccagcctatgtcggcactagggccatcaaggggtggtaaggccagactctcttggttggccagtttgttgtctctttatcttgcttaagttcgtggacacttcgtcaactagtacgttgtgcatagtgacttgctcctcttactttcgatctctactccacatggcatcaatcttgcctatgtagacatgccacctcacgtggataataattagggtaacatatacgttttctagatgatgtgcttctttttgccatggcgatgtctgtctaatttatgctttaggggctacaattattttctcacacctctggtctcctcctgaataagtcaaaattcttagtttattgttgggagatggagccttcaaagatacaaagagtgatttctacttctagttatgtaaaaagtgagatgccattttagtgtttgggaataccaatatcttagcagaattctaaggttgattgtgagattttgctagaaaacatggtgcatcgtattagaacagaacatggatctccctgggagtattgcactcactaatatggtgttgatagccattcacacctaatggtcgcaaataatattacttccaaagacctaatgcataaagtaaattcaatctgctgatccttttcatgggaagtaatatcagaacaacttagatgaggaaaagttgcactgagtaaaatgttatattatttatataatataatatttagattaaataattaggtgtgaaaaaatattaattttgtcaaatagtaacaaataataggagcttacatagtttgaacataaataataaaaaggagttgcaaatcttgaaatgattataatgacaaattttgtaactcctaccaatattatcactcctaataaattacttaaagatgttactaattgtattttgatgtgaatgattaatagctattaaaaatatagttgttggagaattgatttattcatttataaggtgtataa

SEQ ID NO: 297329 - DNA, 7294 bp, Cannabis indica
aaaatatttccaacattaattacttctaaagaataggtaaatatctgaagttgaactcctacttttgttggttgttagagtggattcgtagctaagaatgagcccttgtctttccagtgtgaaagttgtagaaacatcaattgtggctgccaatatggaagctagccgaccaaacttttgtggtgggcaaggcaacacatgtcattccttggctagaccctcctagttggccagtttattgtatctccattctgcttgatcactttgtcccttcatcaattggtaaattatccatgatgacttgattcacctattgacaggctgtactccacgtgtcattaatcttgcctatgtggacatgccacatcatgtgggaaaaattgggataacaacttacaagctgtgagaggtgatgtacggtgtagaatcttcctagctactttggcagaggctgcccagtagtggtacttcaaattagctctggggaagttcagttcatataattctttcatgttagaatttcatacacaattctcctcttctcagtaactctcatctcacttagaagacctggtagaagtgaagcaaatagtaggagaacccttgagagcttacatcaatagattcatgactgaagctacaaaattgaaaagattgattgaggaaagaaggctagtcgcagtcttaggaggcattgaacctctaggagaactatggaaagacataaaaagacttactgtagggtcgatggaagaattcttggatcatgcagatagatttataaagctcaaagaagcagtttggcgtgtagacaacgttggacaaaagaaaaatcaacaacacaccactgcaaccaatacatttgtccagctagaccaaaattcacaaaatcacaatagctcaaaccaaggtaagaggtcaaataatggcaacagatagggtaatggaaagaaaagcaagttcaatggaaactccaaacaacatccttgggattgtgtattgactttaccgacctcaataaggcgtgtccaaaagactgttttgacttcactgacctcaataaggctagtgtgtattgacttcaccgacctcaataaagtgtgtccaaaagacttttttccactttcaaaaatcgatcatcttgtggatgtaacagccaaacatgaaatcctaagctttatggatgcctattcggggtataattagataagaatgcatccacctaactaagagcacactaatttttccacagatattggtttatactgttataaagttatgtcatctagcctcaacaatgttggggctacctaccaaaggttagtcaacaagatgttcaaagaccagatcaggcgtaacatggaagtatatgtggatgacattctcatcaaatccaaaaaggctagggggaacataaaggatctagatgaatgcttcaaaatcgtcaagaaatacaacatgaaactcaatcccttaaattgttccttcaggatcaactcatgtaagtttcttggattcattgtcaatgctcgagggatagaagctaattcagagaaaattcaagccctcctaaatatgaagtcgccaaaaagatgaaagaagtgcaaagcgtaaatggttagatagtcaaactaagcagattcatttcaaagtgagcagataagtgtgttcctttcttcaacatcctccaaggtaataagaagtttgaatggacagaagaatgtaagaatgattttcaagctctcaaaacccttggagaagaaaaattaggaatctaccttgcagtcactgaatacactgtaagcattgtgctaataagcgaagagaacaatgttcaacatctagattattatatcagcaaaagactatttggggttgagggttggtatcccctgattgaaaaattaacttactgtttgatcctagccacaaggaagttaaggccttacttccaagcacatccagttcgagtctacaccgaccaacctgtacgccaaattttgctaaagcctaatgcatttggatgactactcaaatggggaattaagttaggatagtagaaataacttaccaaccccgcacagcagtaaaagggcaagccttagtagattttgttgttgagtgcacaggtaaggaggcagacaactctaaagataatcttgagccagaaggtgaataagaaagagcacccccaatcaaaagaaaactgtgaagataaactaatctggaagttacatgtgctgaataccttgaaatatataatgactcataattagtggtaaatcatgtcctgtgcgaatgcacagctcaaggagaaacaatggtggcatatttcagtaagatccatgacctgcttgcacaatttaagggatacaaccttaaacaaattctaagagaagaaaatgcaacagttgatgcactggcaccgctagcaagcaacacattaacaaacaaaaccaacttagttccaatccaatttcaaaaagaacctagcatcacatgcacggaggaaatcaaaatgatagacaacacaccaaactggaatactcccatagcagcctatcttaaaactggagaccttctaagcaacaagaataaggctcaaaaaatgatgagaaaggttgcatgatacaaataatagaaggtgtaatgtatagaagaggtttctccatgctatttttaaggtgcataacaaataaagaagttgcacggctcttatctgaagttcatgaaggcttttgtggtaatcatgctagggcaaagtttgtctaagaaaataccaaggtaaggttatttttggccaacgatgattaaatattcaaaggcacatgtgaaaaaatttgacaaatgccaaagattttccaaaatccatgaagcacctccaaatgagttagtgcaaatgcaaagtccgtggccctttgccatatggggaatagacttgatcggacaattgcccaaaggaaaaggtggagtacaatatgcagttgtagagtagattactttaccaaatggatggggtcgaaccattggcaacaataacatccaagaaagttttggcttttgtggtaaataaacatcatatgttggtacagacttccacaaaaaattgtttcagataatgggaaaacatctgacaaccagatgttcacaaacttctgcacaacacatggaatcatcaaaagtttctcagaagttgcacaaccccaaacaaatggacaagtcaaagtaatcaacaagacattaaaagacaccatgaaaaaatggctcaaagaagccaaggggaactggctggaggaactaccaaaagtactttggtcgtacagaacaactgaaagaacgacaaccgggcagacaccttttgccatggcctatggctgtgaggcaatattgccctttgagttagaacctccatcccatagaaaattaacttatgatcaagagactaatcatgccctcctgattgatgaagttgaagaaaaaagagatttaaggaatctaaagctacttgctcatcagcaaaaagtggctcgatacttcaataaacaagtgaaagaaaggaaattttttgtgggagatatggtactcagaagagtgatcctgaacacaaaagacagtgcagcatgagtgcttggacctaattgggaaggaccataccaagtaactaaagttaaaaaatctggagcatataaacttcgtcggtatgacaaaaacatggaaatagttctagtaccaaggtactggaatggtgaacacctaagaaaatactagcaataagtgtgaaaggtatggggaccacacaagttgcacaatgctcgaacaccactcttaagtggtggccttctgaccactttcaaagtaaaaactgttcaaaatcattgctcttaagcaatgtcttttggatggattataccgttcaaatgttttatgtttaaattagataaagatcatatagatcatgtaatagcttttataattcaataaatgtacgttactatggtaacaacacatatcgaccaataaataaataaagatattaattatcattcaaattgtgtcaattttatgtcttttttgcaaattatagcaagttattaattacctaaaatgcgtacaaagggtttgcctaaacctaaaagtttggcagacagaattaaaacttgtgaaatataagtgaccaagagttataagttcgctcggtcacttgggggcaactgtacccgtacaagcattggtaaaaaacaagctcaagcaaaaaattaaattcagatttaagggaaaatattcatattaggttaacaaagcaaaataagtctaagattaaaagttgtttggccagccaattgtcttaagtaaaatgaaatttttttccaagtttaaaagccacctggtctgccatattgtactaacaaataggcccttaggacgaacagatgaaaaaagttttgaaattttactccattggagtctcaagttctttatattgatcaaatgaatcttgagcggtaatagttgaatcttcacaagtaaggttctgatgctcttggatggtagaggagtctttattggtcagctttgcttcttcctcaactttttgtgcctcgcaaaagcaaagaaagctagtacatagttctcctttgatatattcaaagttggcctcaggattttccttccagaactcatagaaaatgtctagggaagattttcccaagctctaaacttccttctgagggcttaccgctcagcataagaagtgacccattcagcatcaagagcttcctacaaggcatttttctctctcgtcatctccttaaccttcgcttcctagttttgaaggagggtatatccttcatggcattcagttccttggtcaccgcttcaaggtcctcctcgagcttggttatggacgatatgtctttaatatcttgccttagatcttcaatgatcttgtttgcagcaacaatttgcttgtttaccgcgcctaactgaaaaactctttggctcgacctttttttttagcatcctctagtgcctttttcagttcgttggtagctgttgtggcctttagagtagcaaatttagctcaagaataagtgtacgccaacttcagattaacctacacaagaaaacaaagttaaagcctgtatagagaaaagcctgtataaagataatctttaagcaaaacacttactcgggtgacctctttcaatactctatcgagcaaaaattccactcgcatctcctccacccttatgagtttctcatttacctcaagcatcacattgtcttgataaaaactgagtattttttcccttcttagtttctggctcgagtacgagtggagtgcctaatggccttagcagtctgggcccctcagagttggcctctttggaaattttgaccaaagtagtagaagcttgagacttggtattcttcttggtcggaggaacaactttaggagcagcatcaggaatctctgaggagtcagtagccaaactcctctcagtattgacctgagtagcttcaagcttggagcaatactcttaggcacagtatcatcaacttttggacgtttaatcggagacttctggctggatgcatcgccttctttttcttcaaagcatgcagcattctctctaacatgactgcattaaaagaaagaatacttgttaaaaacataatcatacaagggtaaacaaggttaaaatagaatgataaactaccatgtacatcgatgggagcaccctcccgagcaagtagtgaaggggcgtcctcatcagaagaatactcctcttcttcctcgatcaccatgtcctttccctttcctaccacctagaaagtttgacgatcaacctcatcagtgtcatccctaatccttatgggcccctcaatcggtacttgatcactctaggaagtcttcttcttcttcttcagaaccgcttgcttgattgtaacctcctcagtcactcgcttgggctccttaacttcatcagacgggtagagcccatacttaatgaaactagcctcagtagccaagaataaaatattccaagctaactctggaagttcaagtatttttgggctcttatccgaagctccacggtaaaaggggacaacaataaaatggaatatgttggaaagtgatttgattggaccttgacaaaacagtagtcctctacaaacccccaatcttggacacattcgtgtttgtagtgtcggtcagccactcacactcattctaggaaaagtagaaatacccagacctatttttcttggggctggattttagaaaacaaaaaaaaaaagccaattcgtgtcatgggcagatggctgaccccatccttgggaggcatatagcatgaatagtgcagatagatactttatgcccttgggggtaagttgggttggacatatgtgataataattggctatttctttaaagaaaggatgcaaaggcaacaatgcaccctgtttggcatgtggtctcgaccatgcatataatccacctctaggatttgttgctaattgtcctagactaggaaggaacacttccaccttctcgaggatacctttttcaaagagattagtcaatctcttgaaggttagcacagacggtggtgagacccaccgagcacccctcaaacctcgactgtttgaaggtcgagcctttgtatattcttcctccacgtaatctcatcttcttcttcttcctctccctcggccttgaaaggactggtagggcagacctcaccctcatccttaacctctaggacttcgatgtcccttctagaaactacttcatcctcactcaaaggcctggcttgttctacccaactgttgtaaatagtcaggcaaggtgaggatgaaatgagaagaccttgctcatagttttcttggtctgtgtcgtcattctatgtctacaaacattaagttttagatgtatgccttgcaacagtgatagcaatatcagctacggtagtactcctggcagatggatttgcttaaccctcttgaagtgtgtctacaccagattagaccctatacgttcaagaagaaggaagatagtgtctccaacatttcttcaattcctaaataaaatggtcgtacccctctccacgtatctaatcgaggtattagtggtgttgcacctcgggctctgggaactctgtatggtcactactcacttcccaatcctcaaaactagaatttaaaagattatcaccgaatgaagtgttgggttttatgccctaaataaaactctatttcaatgtaatcaagattattcaatatcaataaa

SEQ ID NO: 297330 - DNA, 2105 bp, Cannabis indica
acacgtgtcaattaatactactggaaacaatatttagactatttgggcagagagagagaaaaagagagagagagagttataccggtgtcccaattggaattccatttttatcacctgcgtgattaatcaaggtgacatagtaaatttcgtcaaataaaaaatgtaactaattaaaaatgataaaaacaaaatgaagggggtgataatataatagacatttaaaaaaatggtgcgtacttgttagtgtggcttgtcgatctcccacatagctaacgttacgaccagttgttaaaggagcactttctgcataattggtagtgtaataattcaacccaagaaaatcaatagacccttttaataactttgactcttctttactgaatttgggcaatctgtttcccgctgctaatcttatacttcggggatagtgtccaaaagtaactggatgagcaaacctgcaacataattaattaggcagttttcaattcaaattattattattattattattataaacaccttatgcatataatttgaagtactacattgctgtgacattccctcaccatccaaacaagaaatctagggctctagaagctgcctttcgattagctgaggtattgtattttggctcgaaccaatctgtaactatggtaattccaattttccccttttggttaggctgcagttaaattaaattcacatgatcaattaacatagtagttaaataaaattgtaatatacatatatatatttatatctaattaattaaagtacttattaccttgtatttctgcctatacaattttgtggcagtggcatgagaaagaagcaaatggtgagctacaatgtaaggttcagttgctgagttaccaaccgtgcaatttccaaggtagttagcatcgaccaggcgcataagtaccgaaagtataaccattgattgtaaatgcattgggttcattcatagtcacccataattttacacgatccccaaatgtcttaaaacaaaaattggcatagtctgagaagtctttcctattcatcattattttataagacatgaattgcacgaaaattaattatacatttgtattatgctttattgacttttgttagttctagaagcaatttatagtaataactaacatggtatatttcaaaagataaaaaggatgttatatcacttacactattttagggctcaaccaactgccatattcttgttcaagtgctagtggtgtgtcaaaatggaataacgtcacaaatggtgtgattcctacgttaaaatataaatttagaatattaattaaattttgaactttattcatgcagtataaaaatatgtaaaacgagttatgttgtttcatgtacaattatagcatatactaggttattattacgtacaatattgcaagtatagttatgtttttagttttaatttttgttatgtgtatttttaaaattttataaataaattagaaaccacttattaatattttcatttttttaaaaaaataatatttaaagttttaattttttttttaaaaaataaatataaaatttaaaaatattaaaattaaacatatttctaatattaaaaataataaaattacaaataatatattaatatatatttatattaatcttaaataaataatattaatatttatatatatatttaaaaaactaatcttactaacatgttaaatttaacaaatataaaatgtaaaagtatttaaattaaatatattcttaatattacaaataacaataaaaaataataagataacaaataatatattaatatttacatatatttaaattaatttaaaataaataatattaaattttacatatatttcaaaaaattaattctactaacatattaaatttaacagaatattcttatactcttaaaatattttgttaatctaataaaaacggttaaatagtcatattttatatataaagatacatgataattaaaaattaaagattttttcaataaacattaaacatctaaagttataaactcataaatttacacttcttacttttgtatatctgatgatcagttcttaaaagctatggtggcgtttggtaac

SEQ ID NO: 297331 - DNA, 1688 bp, Cannabis indica
aataaattaatttgattttttttaatgatcttatacatttatagtttagacttaaaatcattggggagaagttattttttttttttttttcaatttttcccaattatattatatgtaggacaattttttataagacttctggaaaaaattctatcggtggaaatgtttctaatctaatatttaagtgacacgtcatttaatgaaaaaaattattttcatattgtgagaaacattagattatcaaatataagtgttgttaaaaaaacaattatgtctatcactctgtttgaagttcatgggaaaatgaaaattttaatacattttttttttttatttttttttcttaaaaggaagtagtaaagatactgtaaaattgaaaaatctttataattgatcatcttagacagagtgtgtattgtatgagatgtgatattctcaataaataaacaaagaaagcagccaaaccatgcaactttctttctcacccattatatatcgatatatattataggtgagaactcacgatgaaaaatattaaaacagaatcaaaagaagggagctcacctccaaacctttgagcatcacatgttgatcccaagaggggttttgtgagggtttcatcattatcgtgatcaaatcccaaaacatcctcttgaaatatctaattaaactagctagttagtagtaccaaaatgcataatatataaatccaaaccaaatctttagaaataaaaatggaaacaacaaattaagtaccatatgagtaattgtctactccctttaaatccaaataaaaaaactagagttcttaaaataaagattagtttttcaattaccatatgagtaattggtctactccctttagatccaactaaaaactagagttcttaaaataaagattagtttttcaatagataattaatcatcatcatccacgcaattccttaacctgtgcccttggagaacaatatccattaaaatagttgatctgcatatatatagctccaattaagatcatgtttttatcgccatgtttaagatcgccccattgaccctttcaacgagttccaaaagctatcaactagatgatctaaatcttcttctcccgttaatgaagcatagttgctctgtccaacaccttaccaaaataaaaatcaataaacaaacaatctctgttataacagatcaaaagagaacaaacacaacatgaatacatattatatattacttcaaacaaattatataggggtgtttggtaagatggttagatttggtgagaatgagattgttactttcattccgtttttgcaagtttgtgtttctaagttacccctattatttacctttatctaacactacaaaaaatcttatttttagtcacaataaaacttgtgactaaaagtaaaaaagttgtgactaattataaatcatcatttctatgtttgagtaaaaggtccgtgacaaaaagtattagtcacaaaaattacaatttgttgtgactaaatgtatttttagtcacattattggttgtgactaaaactaaattagtgacaacttgtatctaaatactatgttttaatcacaagtaactttttgttgtgactaaaagtcacatttaattacaaaaaattattgtgactaaaaaattatcactaaaagtaactatttttttgtaatgtaatcttata

SEQ ID NO: 297332 - DNA, 5059 bp, Cannabis indica
aacaatgcaacagttattgctttgacatatatgcatggcaatacatgtggaatagcaacttaatttctctagcagacaatgtacctttaacacttaacatctgtttctttttcaccttaaataaaacatgaaaaacaaaatatattgaagtgtgccacattcgcaaaaaacgcatgcattatgtcccataaaatgaagataattttgaaagcatataaatccagatgttttattattgtcacttagctactcaatctcacatggagagacccacatagagcaataatttagaactgttccttttgtgttcaaattaatttgcttgacagactaaaaataagaaagaaaaaagacttaaatgaaactaaaaattacataataattacctgtgcaaccaacctagcaagtaatgctaggcgcatctgactacaatctgtcacacataaatgcttgtaagagtgaataatccgtttaactgcaaattttctaacactttgttgttgttcttcgcttagctccatatatactggaagctgaggtagatcttcacaggtatcttcagatgaagatgcatttgaaaggtctggtgaatgctgatcaaattctggaaaatatgacgtatcaacttcatctttcactgcaacatctggaaacccttctggaacaaagtcatcactagtgtaaacagcagaatctgtgggatctgaagacttgacctgttttgcaggggcaatttcctctgattcttcaagaagctccttgagaactgattgacccaccacagaaatcaatggaccttccatttcctcctccatggagacaacaggctctgaataactctcaactcttgtcccaaaagaatgtgaaataggcttattcaaagaaaaagaaccatcacattcagattgcaaggaagaagcctcctctacagtaggaattaatgcaagtccagtggtagctatgcgacgtggatctagccgacggggatcctaaaaacatagcacaagaagttatttcaaaatcactaaaaattcaaaatgtataaaggaaaaagtaaaataaacattaagagagtgaaaaaaaaaaaaaggagtaaagtctaccctccgtggatctcgttttgaatcggtaggaaaattattcgccataggcaagtcagaaatcaaagaactagtagcagaagagaaaggcatctgcacagggagagttggggattgcacagaatttgctcgaggagatccagaactagcttgtcctggattatttaaagaacttatctggcgaggtacagggaaattcccaaccactgttaagggagggggtgtcataggcaagtgcctcatgttagttatgacaatatcagccaacaaatcaggatgaatttttgaaataaggatttcaagtgattcagcgcctctttctccttcagcaagcaaagcaccaatcattgcaatcatcttttctacaggagttaattcaccatccaacaagggaatatcatgggacagaccattaacagaactgccatcctgccaaaaatcagtactttgaaccggcacactcaaataggtctctaaatcatgacgcattttcttagaaggtaactcatggttattagctgagtcttcattgtccaaaggcacagatctcttttttagcagatcccctgaaacaagtagcgggcttgacaattgatcatcctgagatagaaagacaagagaggcgaaaaccatttgattagagcatactaaaaggagtgagagaagaacagcttaaggatgctgctaccaacaattaccttccccagccgagcatcacgtaaagcacgttcagcatttttaaccattttgtcaacttgccggatagcttgatctgctgcatctccagcattcatggttcgtagagcacgaactaagctatctcttgactgataaaaaagagaggaaaatcgaaaaagtgatccacaacttgtacacttagttttcactttattaacgttcacaacagttcagcaacctaaaatcaaaatttcatattgaaaagagatgacaaaaatgcaaaaaagtgtactcatgctacaattataataataaaggattggcaacagtgacaggtcctatcattaactataatattcataacactcatattaataagcattgtacaagaaaaacatctttacctccataatagctggggtagtagacctaagaaatcccaacagcgcggttcttatggaatacaggatactggaagcatgacatcctttcatcaactcaaagttcggattaaaatcaagcagcgcagtgagaactgtactgtagtgaagaggcctctttcttgctatagctgcaagactatcaaaaaaataaatgcagtatgagattactagtaaatagttaaaacagcaagatttgtagtacaaaataaaatgaaatcaacattttaagcagaacacgattaagaagcaagaatccaaagataaaaaggcagaaaccaatacaacaaacaaaagataactaatttttactttggaaagatggaaatcaactttaacgcagatcttcctataaataaagagattattcagacaaacatgcgacatcatagacaccaattaatataactcacaaaacagccaaaagttgaaacttaatatacatgatatgaaaaaatatcaggaaccctcatatggctttacagcattgtttcatcaagcacagttatagtaaaataatatatcaaatacatactctacaaacagcaaccacatttcagacactacattttctcaaaaacagaatattaaatattcttaaaacaaatgaacagatgagaaaactagatcttcaaaaggagccttaactaaattctaattgccgaatttcaatatatcttatcctacttgtttcagaaaactttacagtcaaaaagttaggcaacattgacaatttttgctcaagtatgcatccccaaaacaatttaactttgtcgacctgtgtaattaagttaaattactaacttagcccacacagggctttattcctttaagcttatatgctcataataagagatcattagttattttatttattacatagaactcccgcagtatcatcttaagacatctaattatatcttacaaaaagcaaacaagatgacgagttcaatctatcaatgtaaacaaaacacattcattggggaaataatagtgtgcatgcacaacaaaagttacatcctctgtcaacatggttaaggccactactagacatctgtgatttatactcggtataaaactatagaaaatcttgacagagtaatattacaaggatagtaaatgcatacaagtaagtacgatttggaaaagagaactccagaagtcaaagaaataataaatcaaattgaccaaaccttccaggagcacaatcagcaggaatctggcaagaatattatgaaacattcatggttgaaaagtacaaccagcggaattttaagactgccaaaacattgaagaacataactgttctaaaccagacaactgactagggtagaacacaattttttttttaaaaaaaaaaaagaggagaggctgttgtcttagactgaccaccctctgatatagattaaaacccccacttttggggaggaaaaccaatttaaacagagtaagagagagtaaaacaaaatgcagaaaaacaacaagcaaaatgcagaaaaacaaaacaaaaacaaaaacaaaaacaaaagaaaagaaaagaaaagaaagaacacacgattgagcaatgcaatacatgaaactttgacagatctatatcgtgaacgttgatgagtgactaaacagatttaggggtgacaaaactaaaggatttttcatttttccataaattgataaagcataaaattcaatgaaataaaaatagagaacaaactcagctcgcaactacttctgtataacataacaccacctaaacttagtttaaaagtaattccattccaattccaccacacttctaatcattgcacaccaaaatactcctctcaaaccttgaaaatagaacagactactactaaattattagtctctatttactaaaatgataatatgatctccatgaacctgctgcttcatacacaaaaaaaggctttttctccagcaaatttagtaaatgttgaacaagaattgctccactaaactccaaaacataatcttagaataagcctttcatacatcatctcaatcaacatcttgaagttgcccaaaacaccattataaaaacggtttgcaaaataaataataataataataataataataataattcaatagtcatgacaaggaaacgacaaacttatgtaattggtaaaaaatattcctaagcctctcttagggtggacttcatatcatgattaactcaagcacttgatctctctacgagaatgttgttagcacagacacccacacagcaaaacttgctcaaattaacatttaactagcaagttacacaagaatgccagcagtactgaagcttaccaaccccaatcctgtctgaaaactagcagttttcattcattctcaatgatatacctccttcaaggtgttaggaaaagtctaatgaattttaattcttttaaggaaataaatttccacgcaaacagagtttactttgctgtgttttaggaaagttccctgcacgtgacctgtagaattaaagtcgtacagtaaaaaacgtattttacagcttcaacattctctcaaataatccaagttcaacataattgagatctagctaaaaggatcttcaaactaaatagatgaatatcatcaatacatttcacttataaatcacttgaagcttaacctgctaccaacagctattccatgatagatctatagtcttagctcatctagcattaaaaaatcatgggtcactatactccacaagcaaataccaattcaaaagcctaccaaacatgacatcttttgactattctgatagtgagaacaagcttgtaacaacaattaaaccatatttgaacaaaaacaaatatatatatatat

SEQ ID NO: 297333 - DNA, 6085 bp, Cannabis indica
ctcagacacttgaaacccttctccaaaagcttagctgaaagcaacaatggagattaacccaatttcgaagaagaggaatacgcctttctcctccttgatcaacactgccgttggcttcttaaccagaagcaataacggactctccaataatggtgctcgcccaagtgagccagaagaagtaacacgcaagctaaaaagacccagatcggctctttctgatgattgtgacgacgtgatcttgaaagatctggttaaggatctccgatctaggagagttttctcgcctaattcggtgattattggtaggaaattggaagctgagttcgattgtgagtttttggatgagggtgatttgaagaaggtcaagaatgcggaagttgtacggattacttctgtggttgaagaaaagattgcgaatggaagttctgagattatcggctctgatttgaagaccaatgtggtaaggtttttgagtttcgcgtgaagtaattctatgttcttttttctcagtttttacttattttttgaggtttttggtgttatgttattgtaaaatttgaagggagattcgaatacggaagctgctcctgagaacggattggtgaaacccttgaatgggaattctcagaatatcgactctgattcaaagaccaaaatggtaagggttttgagttttgtgtgcaattttagtaatgcattgttttgtttttgtggattaatttgaagtttttttttttttttttttctgaattacttatttatgaagtttttggtgttaattttataatttgaagggagatttgaatacggaagttgtacggacaacttctcttgagaacggattggagaaacctataaatggaaattctcagattatccattctgatttaaagactaaagtggtaagggattttcgttttctgtgtaatttttgtaatgcattgtttattgtgtgaattaatttgataattttcatgatttttacttatttattaggcttttgatgttaacatgggtttagatttcagttagtcatgtgtgttttccgcaaaatctgatatgggtttggattatctttgatagattattaaaccatgttctcgacggaaagtgtttaaaactccaggctcggtcagctacgggagaatgttaccatatttgatggacattactaaagaggagtcatgtaagaccatttttttactctacggttttgttcactcttatggatttgagtacataatgctttagatgttgagtggtttaagttttttttatttttgtataggcgagcttcagattgatcagcgccctaaacttgagaagggttttgaagaaaagaaactgcaaattacacaggctccccaaagtgaagaaatttctaaagatattgctgaagaaatggaagtgtcagtggaaaagactgtgcctgattgtgcccttgagtcttgcgatttgggagtttcttgtaatggtcagaccttcaccaataaggattgtcatgtgccggttgtaaatgataatattattttgacatcttctgatgatcctaagctggaagatggagtcatcgaaactgatggaaacatttcgaacgttaattcatctcttactgttgaagtctctagttctggaacagataatgtacttggtcagtattctgaggatttaagacaacttgctaatgaaggggtagaaactcttgatgtggttcaagtttctaaggatcagaagctgactcagttgaatgatcaaagaggtagagatgatggtggggttgcaaatcaactcgggcatttgaaagaagaatctatgcagatgacacctccagatgctgatattttggtaaaacagaagttcaaggaaacgtagctaatagagatgattgtaatcggcagagcaaggagaactgtcttaagaagctatctgaagaaataaaccatagaaatggcagtatggattataattcaagacagaactccaaatgcagaggggtaagaaatgtttggaacttaatttttgctcttgtagtttgttaagtttcacatttgtatgtttgttttaaggttttttttactgtaatcattacagcattgtatgttggatttgtttctttaaaccaggttttaaagccacgttcgcaattgaagctattcaagagtccaggttcattcagctacgggagaatgcttcctttcattatggatatcgctaaagataattctggtaacttcctttaccttatctgtacaacctctctctcaagaacataattgagtaatgtaattatgtaatgtaacctttcttatgatcccatttctagatgctttcggaaatggctattccacaaaaccagagaaagacttggaacagccatcaattgcttctgacaatgaaagaacacttccagctaaatcaagaggtttggaatgtaaagagaatcagaaagttgattctgatgctccaccactgaatgtacagccaacgattgcttctgacaatcaagaaaagcttttggataagtcaaatggtttggaatgtaaagagaataacaatgttgattctgctccttcatcactggcaatactaagttctgtcaatgattcatctaatgatgaaccaaatctgacacctcccatatgcagttctgttttgaatgtagatgagattatatcgaacgtactgagtgaaatcgaaacatcccctgaccatcaaagttcaccacaggatacaacaagccagcaagttgaatcatcatgcaccagtaattgttcgtcttcatcaagagatgaacttgaaatgtcaaactctaatcagttatcagtggttgaaaccgaatgtaactcaccgaagttgggtatggttgtaaaatcagtggagtcaaatagccctagctataacactccatcaccatatcaagttggactcaaaaaaggaattctcaaaagaaatccacgaggctgcagagggctttgtacttgtttgaactgtgcttcatttagattacacgcagagagagcattcgaattctccaagaatcaaatggaagatacacaagaagtggtcttggaattagttaaagaactatcaaacttgcgaaaagtattagaggaatctgctaacattgctaatgatgatcagattgttgttcaagctagtcaagtaagctctccaacatgtaatgattttgaatattcaacttctgaatttgtaaactaaaatttctgtttcttaatcaggcaaaagaagcctgcaggaaagcagctgaagcagaacaacttgcccaaaaccgccttaccgaaatgaactatgatctcaacattcactgcaggataactgtaagtgaaacaagttcttgaatgaatggtataaatattgtaaattagtcacatagcttaacattatcctaatttcatatgttaacagagcttggaaaggccaagagttaaattcgccgaagccaaggcacagtttcccattgagcaagtattgaaacttgagcattaagaaacataaactaggtaactttagctggctgtgcattgattaagccaaatttattcatgtacattttgagaatgtgaagtctttttgatatttagaggaaatcttggttatggtggattctacattttgttcaagaacctaaaatagtataaactttctagtttattaaagaaaaggaaaagcctaatatggtgtaatggtttaaaatagttacctttgcttttggtgttttaggtacttttttttgactattgttatattatttgttcaaaatgtgtaatgtaaatttggggaagtgcttcaaatgttaattctctataaggtttttcatttttttttattcctctaaaaaaatcagaggaaattactcaattaaattttattttaatttgtatttttctattttcaatacttgtaatcaaagatactttaatatgtggtataagactcttattgtatttaataagaagaaatactataaattttaatacaatacgaatcttaaatattataatgtttggaaatggttagaagttaagatctaaggctcggagtcgacctttggggttggatccaggtctaagatttgagttcaggttcgaggtctaaaattgggtttggggttagggtttaaattagtgtttatagtaaacataacttattaatataaatttatactaaacatattattagattaaataatcttatataatatgattgaacacaatacagtgtatgaagccagtactaattttggatgatgaagcattaaagaacaatagagtgaaaagggtaaaaaagaaaatgttcttaaatgaaggtaattatttattactactacaatcattaatcataagcttgattacatttaatatgagagtggtactacaactggtaattatgttatctgacaaacttacttttattaataataaagcaagttaaacacttgaatacaattaataccataaagcaagactttttttgagtttttttttttaaggataagtttgaaatgtttttttagatcatttatgcaactactactgataagcctcatccatactttggtttttactctaagatatttttttgtatttttctgtgtgtacttgaattaattactctgatttttgctgtaacatagagacaaataggtcccaatcctaaaggaaaataatgcaatcccaaaaacccaaaattagtagtagctttttctattttggttcttttgtttttctctattattattgggatttttttgtgttataaatgtgagctttgagaaaaatgtatagcaattattattaaagtttgaatagattacataaatatccagctaatagccagtaagattgaatagatagacttgtttgtctttgaagctactttgaatgaatgatcttattccaataaaaagcttttgttttcaatggatgttaaagagtactcacaacaatgcatttaaatatattcttccattttataatcttttgaagaaactggtttttttttaatttctttaactataatgattatctaactataatcactcgatcctgttcctcaaactttttatgttatttaaaatttttcagaattattattaaagcgttctcttatgtctaaaatttagggagataattcgaaaataataatagtttaagagacaaatcgataatttaattatattaggagaaattttagtaatatcagtgtgaatttaaaatagttaatatcaagttatcatgatacatccatcttttctagaggtacattatttaatggtggtgatagttgaaacaaaatttaaaataaggtagacataatttggagtgataatagttgagactgtcaaaattttatttattcattttttttacacatataaaacacacaagaggttggtcttaaatagatcttagtgtctataagaaagacatttaaggggattacataaaaacaactttagacaaagtaacatttgaacaactcactacattatcttttcttctatctttacattattatttattaatagtcattaggagtagtactcatctattttgtttgcatttagtacaaatgtgtagagtagttgaagttcttattaaatgttgagatttcatgccacaacaaagtatggcttttttggtaaagatgatttcaattcaaattcaaaattaaaaatgaaaccataaatgtagacatgaaaaaagaaaaatattcatttattgaaatacctcaaagagataacaaagctaataggaagaaaaaaagagaaatttgcgtcgtaaatacctaagtttaactctcggttatagataaatacttaagtttaattttttacggtaacaatacttaggttatatttctaaaacttccgttagtatcttgtcctttaagtgtcaaattattattcgcacgttatttttttattagtatatttaaattaatttttcaataaaataaaaatgagttttttcatttttacatttctaaacagttttttttttttttacatttttacgaaattctacatagaaacttctattgcaactagcgttgcaacctaaat

SEQ ID NO: 297334 - DNA, 5432 bp, Cannabis indica
tttttactattttagaaaatacagggtccattttgtcatttaacaaaacacagagtccaatctgtaacttttgcaaaacacagggtccaaaatggtatttaccctatttaatattactatatacaattttaattacttgatgatattagtgattattatttttttaagaattttttaacattcttttatggtttttgatgaacttttgatttctatagttggctgcttataaaaatttgggcaaaattcaattttagttacgttaaatttttagaagatgggcgtctactttcaggtttgttctttttatcctctttgtattttgtaagaatatatcattaatatatgttagttgtttaagttttcataaagtaattaaataatattattacaagtatagtttcagttattaagcaattttatcagttatttgtaacaatatatcattaatatatgttagttgtttaattttggctaaatattatttaagttaccgattgaactctttgttatgttaaatgaaaaaatagaccctatattttccaaaatagtaaaaataggaccctcagctcaattttcaacaattttattttttaatataaccaactttaagataatttctaatacgaacagatacaggaaatgtaaccagttttgtcataacatctctagatcgaattattattaagttttatttttacaaaaaatcacttcaaggtcctaattgtacaattcgagaaaatatagggtctattttgtcatttaacaaaagagagagtctaattgataatttttacaaaacatagggtctaaaattatatttacctttaattttttcttagattatttagtttcaaaatctatttattcgattgccaaatagaagcaagaattcagttaattggtacataactacagtcgttgtgggaacaatgtcacttactagtattacttgttaaaacaatatgtatacttgtgtgttggatttatcacatcaactttatttaaaaaataatataataatagagaatttttttgtgtaaccttttgtgttgtggttaaaataaaagagactacaacaccatatttggtgttggttgacgagtgaacatttgtacactcatcattgggcattatttagataaattattgtttatttcttaaaattttgtataaatttgatatgttttctattgtgcacagtattaagcacaaaataataaaattatgacaaattgggagtaaactgtagatatttgggtaaagtgctgaaattgagaagcaaacaaatcgaggaacaaataaagtgacaaaaaaaatagcctatggcgctatcgcatcatgagttaggcactatggtgccgtcttggaaggaaagaaaaaaaaaagatgattttcacattcattaattaggagaatctctcttggtgccatagcactgcccgtacacaattcaaattcttatctttttctataacatcattctttcatcttttctagcctataaaaagagcattataacttcggctccagtataactagagagagagagagaacacaactttaaagagagaaataaggctgagagatcaagaaatcaacctaaagctgcattcaagaattttcatctattgtacttcttctttcttctttatttcctagttattattcagattctaaacaatattttgagatgaaccactatgtgtcactagttttcttagtttttagggtcaaatggatctctaattatgacttcgattttatgatttaatgcgaagtttagtttagttgaatatttttcatttgattaccttgtttaattgctgccatgattacgtgttatatattattctacttcatatgattatgattaaggctattatcttgattgtgagatttattacttgagaggggaactttgaagtagatcaacttaggtggtttgagatcgagtggtaagcattcactcaggtaaccaaaataattctaaattgtgaaattgagacatggtatattaatgattgttcctagagtgagacttaatgaaagtaaggtataagggtggtatagcaatataggctattatttacttacacattctttatgcgacactcgagagataaaaatttagaattaattataacagtaccaatttacttacacattctaaattgatccttgaattgttgatagtggtatagcaatatgtttgcattttttaaaataaagataaaaattgattttctttatgagtgaaaccctccccaactgacccctttctctgtctttctctctctatatatataacattgtggtttcaagtctaaatcttggtgattatggtggaattgaagagcgattttggtgtcgattgtggtaaagctcttcaagactaattaacgtagttgaaattttatttttgctattgtttgaattttgaatttttccttttaatgggagatttgcatgtgttgttgttggttgatcttgaagttgatctatatgttgattttaggatgcaattgggtattgttttgatgatttagactaagcttaatcttaatctttagactaccttttgttagtttctgactgtgagttggttaaagaaaatgatgtggttttcttggtttatttgctgaaattaagcatgaactttgtttagttcttttaagctagatttctgaaagatgtggatttgattatttttctatattagacatgtgttttatgttgtgagtaaactgtttaaacactttaattgtcatggaaaatcgaataccagattcttatatggtttggtttgcatttggtacatgttttgatttgagaaaaggagttttctgggtttttaagcccagtcgccacgaccagatatagggtcacctgttgaaagtcacgaggctcgaacccagaacagggatagcccctgttgaaagtctggtcacggcaagccttaatctagtcgcgaccagaaggcagggacagttcagtttttgctgttttattttgagcataacttttgactccgaactccgatttggacgttctttatattgttggccaaagctcgttttgagctctactgcttggtctaatgtttgagtcttaaatatgaatatttatgaaaggttatttgggattaaccctattatgtaaaacccaggattgtgactaggaataccgacacttggtcaagatcacctatgaatcaggatttctcctcaattgttagaaattcggtaagacggtgaattatgcacatagagtatagcgtggtggtacaattatatgtgattaataagataaaaagcatgaattagggttattaccctaagtttatgtattgtaagtgggggttactaccttaagtatatatgttgtgaattagggttattacccttactatatttattgtgaactaagattattaccctaagtatgtaaacatggtgaattagggttactattatgtattgtcataaacatgcaataatgtattaagtgaataaatattaaaggttatgcagttaaagaatggcttgtgaataactcataaatattatattatatggatagttagatggtattctattgagtaagtaaacaacaatttttaccatgtaattctaataagataatagaaggttggactgaaaagccgaggcatgggccacattaaggatgtgtaggtgcttcctttgtacaacaacattttttgttggggcttcatacacaagacttgtaatgtgtttttgttggtgtaaaaattgtttagtgtgagttccttagcattttcacttctaacaaatttattattgattttgtattgaaaattgacaagagtgaaatttttatttaattatgaatggggcatctgacttagcccgaagaaagtaaatccaagtatatcatccacaatagtgagaaagtatctataacttttaatagaaggtattagataaggtccctaaatatccaagtaaataaaatcaaatatagcattagaaaaattattatgagatgtaaatatgataatttcttttgcttggccaaatgacaagttggacaatcaaaaggaaaatagatatcatgggaaaaatataatttttgatttattttattagtgatgagtacaaaagaatgaccaaggcaagtgtgaaatcggtttttatctaaatgaacattacaagaaactgaatcagaaattatagaatttgtttcttgttgcaggtaatagaggttgccaaaatgtttagctacctcaatcctcaatgtttgagaagttccctgaatgtagaaatcattagaggtaaaaaacgtgatgttggacctgtcatttaataaggcataagaagttaaacttgaattgaggtacaaagagaatatttgtaaggatcaatttagaattaattacaacagtaccaattttttgaatgttaatcaaagtgccacttggtaaagtaaaggatttagcatgagaattatgtgtgaaagtgttgaaatcttacatcacagcaaacatggagagtaacaccactatcaacaattcaaggattgaaagaatgatgattgatattaccaaaaaaaatggttgactgcaagcgcaacattggatgtggaatcatctgtgatgggctacaaccgttgagtcaacatggaaatgagttgctgacattgagctggagtaaattgagattgaggaatatcaactgtgaaatcagtgacttgcagtgtttgagatggattacgattgtttggactaggatcgtttggactaggatctggtttttgattagtggtgctaggagtgtcattgggtcttctattgccatagccaggagaaaccatgcaaaaagtagcacttatctttgtaatggccttatttttgacaatgagaacacatgagacgatgttctttattttgtgcaacaacaacacaaaagtaaggtatccgagggcacaattggttgatttcgccccacattgtaatgagtttggtgagaacccattgaatcatcaccttgaagatagtttagggtttcattaagctcaaagaactttgaaccatttccttgattaaaattattgtgcaatacaatctacatttcgacagcagtatcaaggtacatgatattactcttgatctcaggtgatagtggagtatccaagatataaccatttagttacatctagtctaagaatttaataggatcactagaagggggttgaggtaaagtatcttcaagaaacaaagtcttgtttgtggtgccatggtatgtgttcatccgatccaatccgcacttttttggcaaacaacatccaatccgcactaagtgcggattttatattttggatccaatccgatccacataagggcggattttagatttttcaatccaatccaatccgcacaagtgcggatatcc

SEQ ID NO: 297335 - DNA, 6097 bp, Cannabis indica
gtatgtttcaaataaatataaaattaaaagtaaatttaattaattgattaataaaaatggtatttttcaacttatcccgatcagggcgcctttagggtaaggtgggctggagccgttgcccaaggcccctcagcccaagaggtccaaatctgtttttcttttaggattttttttttttttaaatattagtctagagagagtcttgttggatatatgtcctttgagtaatgttaaatacactgatcttattttgcagagtgtaaatccttttatatgtgaaatatttttgagaaattgtatttttatatgctaaatttcttttaatttatggtttcaaaaaataataataaaaaagaattctttttcttttataatattatataaataagtttatttttgtttttttagggggagggtaagaaaaatggtggtgaaattgagtgaaatagtaataaagacatatatagtccctccctctctaatgaaacgtgaaatagaatccaaggctttggaagctcctcccaaccccaccttcacatgctcatcttttttgtgcgtttccttttctgttttatcgccctttgtgattttctggattaattaccattttcctatttaaataaactatttaataataatagtttaattctctattacattacattgtcataggcatgagatcaactacaataattataaattatgctttaagagatgatgagaggatatatataaggtcattacatgtgtagttagttaattaattaaatcgtattatttgctgtaattaattagttattagcatcattcatgcatgtcatattgtcactctgtagtagatagagatgacagtcaaatactcagtatatataagtaagtatatagtgttagttatgtagcacttataaagtgtggccattatagaaattgagtaggtatatatgtatatagatacaatttactctagtactttttgcatggctcaccaaaacttttgttggaccactttattaatagttattatataatagcctctcctcctctttgcttttacgtttctactctttttcttataaaaaaataaaaataaaaataaaaaattgtttgtatatatataaatatgaaggggaaaaaacaaattggaaataagaaggaaggagaaatatattgtaacatattaatatatttggctattattgctacaatgccttactttgtaacatagcaagaatagagaatatattattagtcaatcttatttgttactctttagttttgtttgtttgtcaagattggtgaatttgcatgttactttgagaacaacttctaaagaagtagcatattagtgagcctctttttacaatggctagccctaccaaatatatattaggccaaagagtagattacataactattaattagtagtggtcccatatatatatatatatatatacacactaccaacccccacaaattacattactctctcctattgatataatattaagaggcactttcagtttcaatggccccaaacccaaacccaaatctcactcccttgtttaattaattaatatgaacgtggcatgtgtacaatataaatatgtatatatatacacacatatatcacacctccagtccctacaaaaacataccaacattcttagtaacaaaaatcgtcgtttttctttttggccaaaacgatgatgatcagattgtgatttgtgaccatgtgatgagagcaaatgccaaatattaataattatatgataagtagagatattaatatacaatatatatgtatttattattttcaagtacttttcattgaacaatgatcacacccatatatattaatctctcataactatttcaattttgctcattctcagttatagaaatattatatacaaattgcaataacatctgttatatatgtatgtatcaagacttatgattaatccttttccacccaaacatatagacaacacaaatgaaatgaagctttaagtctaactttatgcttaaaaagcttaattagagataaccgttatttatgtagaccctacactaaacgtagtattattattaacatttttatttgaaagttaaactaattatttttcttttatataaattgctcgttatccatatccaataaataatctatattttaattgatactttgccttggcacacgttataacttatcatcatcagcatattcttcatgcttgcttttggttacttttacagaattgtccaatttttaagtacaaagaattttgttcctaacttaattctcgtaaggactaaacagtaaaaagaatgcccaaacgccacgttggatcatttgtctacgtcttctagttccatatccttaattaaaattcgttaaaaataaaacagaataataaacaaaacaattaattaaattacttactaatttgtatttttcaaaaaaaaataaataataaataaataagtaacctgtacacctggcaagatatggaagggaagatcatatccgttgatttaaacttggacggtgattaggtcaatattggatgtgatctaaaacttcatccaggataagaaaaaaagaaaaatagaaaaatattaaattaaatatttgaaagaaaattaaaaatagaaaataaaaaccaaaaaggtgcatttaaacggcacaatctgaggaaccagagaaaccaaagcaagaaaatagaaaacaaaggaaagacatcgctcccttctttggctcttactccccatagccgccgacatcgcaacgcatcgcggtggaagttcggcggcgctgattcattcaacggaggagatctcttatcggagacgaatgattcatcaccagcttccttttcatttttgagatttaactcacactattctgtttatactactgggagtaggtggtgtttctttctttcttaaatttcaaaatcgtcttcagcaggtagcggttgattttctctaaaataaattgtccgaagattatttcatttttcgttgtcgatgtgtttgtttgtttgtttttttttttataatggaagatttgttgattttaacttatctgaagaaatctatgtctataaagatttgttgattatggtttatgggagcacattttcaagtgtttctttgatgttttggataaacattgcttgaggctttgtataattatcttaatttgttattttcgtagttgagtgtttgattgtggtgcatttggttggtggccattgttgtttcattgcgatgattttggccctaattttgagattcaaagctttctgtgttaatctttcgttcttcgtcttctttttttttttctcgcgaatcggatttgacatttatgtgatacattatcgtttggctgctgagaaaattgaggaaggggataatgctgtttttgacttacagaaaattaaaattattactcgacccagctaagacgagcctttcatttcgtgctaattgtattatttcgaagaacattgggaaaagcgaataatgcgattcataaaactgatgaggttgtgatgattgtttatctcgctacaacttgggttactccgtgattatattttcttatctatggacatgcgtaattgttttcgtccatgagaacctgctttcctgtgattgcaagctagctattttgtatttgttctaatgttatgctttcaaattagagttggtgttgtttagaagctgctaattttgaattgggattaacttgttttaggcatacaagatgatcggatcttttataaccaggggacttgtgtaagttactaaactaaatgcgttatcttccttcttctttaatggaaattgtttgtttgtctatttatttattttcatttactttgcagaatggttcttgggtatgcttatccagcttatgagtgctacaaaactgttgaaaagaacaaaccagagattgaacaacttctcttttggtgccagtactggtatgctgtatggattttccttttctgtattttcattttatatatcattctttataacattttcttttctccgggcaggattctggtcgcatttttgacagtgtgtgagagagtcggggatgcgtttatttcgtggttgggatttctaatctatcttaaaaaagattttgatagtaattctctgttgtgccaccaccattaatttatttgctttttcatgttcatgaagggttccaatgtatagtgaagtgaaattgctgttcttcatatacctgtggcatcctagaatgaaggtaacaggatctggttcattggtttatgaaatgatattttttgtgcttgtcatactctctgctttcatatatttagttatacttttcatgattgctataaatgtttatttgtcagggaactagttatgtgtacgattccttctttagaccatatcttgcaaagcacgagaatgaaattgaccggaacttgttggaactaaggaccagggcaggagatattgtagttttgtactggcaaagagctgcaagctacggccaaacaaggattttcgatgtactgcaatatgttgccgcacaatcaacaccaaggccacgtcctccccaggtacttactcatgaatttgattatgaatctaatttattttaacattacctgaccccgctgattgttgaatggtcctttagttatatcaatttattgattttacctgttgataagtagagtgcctgaatactttcgtgatttattgattttataatgtatacattgtttgagtgtactatgtcactcttgatatttctcatcaatatcattctgcattttttgttgattgctgtcccaacccaatgcctttgctcttgctctcatatctcctgaacacaaatctcatattggttatcacagcaacaaggcggtagggcacgtcctcctcctcgccaaaactctggtggttcaaatcgtccaccagctacggcaccaacaccggaagagccaccatctcctacatctagtacatcttcaagtcaataccaaaaggatattgcagaagagttggcttcttcggaggttcctaaagctgcctcccaagcagcaagtacaagtactcaaagtcaatcggcaggtccaaataataaaagtcttaacgcagtttcaattgcaaaaaatcaagcagcagttccaagtgccagaactcaagtggcacttccaaatactcaaaagccaacaacagtgccaattactcaaaaatcaacagctgcacctgaaaaaccaagccagtctgcaccagctgatatggaagcaatgcagattgagccagaggcgtcttcttcagaaactgaaaatggaaacaaccctcccgcaaaagagacggtcatggaagatgcaattcgggtcacacgtggtaggttgaggaaaactcgatctacaacaggtcgttgatgtggttatgttcccaattttagtcacaaaaagctagcattaggtgaacgaatgataatgggcatgtaatttgctataaacgttgttgtatatttgatgtcatctagtttcaatgataattgttgctttatttttttctaaaattgtttggcgaacgtgtagggtcctggttggtaaaagcttatcttgaaataggatagatagatcatagatctggatttgattgaaagcccgatttaggcgactaattctattttaacaaatgcttaaataattgtcatctttgaagtttggaaccaattagttagtggagagtattttgaaagaaagatttccttttgggtacattaatccaattcatagttgacaactgggtcttacactatgactaaaatcgattaagattttgattttcagtttaaaaaaattatggttggtacttacactatgtttggtgagatggatcgagaggataaaggatagagaacataagagagagagaatatggtagtaattctttcaagttgtttggaaatggagaggtagaggaatacattactatattcttgtaaaattactttattatccatttatttatttttttataatatttttatgatggtgtatatctaattttaaaataaattagaaag

SEQ ID NO: 297336 - DNA, 3648 bp, Cannabis indica
tttttttttttttctttgataaaatcacactaaacatagcatttatcctattaccaaaactctatcatgggttatggcttagtaactactacgtgtaatataaacactacaaattactcgtgataataacattctcagtaagaacacaaaaataaaactgagagaccgagaaaaactttgatattagaagaaaattttttaaattctccatactcattaagtattgcttccatataatgtgattttaatttttttccctggcatataaaactgattttagttaactaaaatatctccaactttaattttttccacacattacaagaaacaaagaaaacatctgccaaattttaattttttcagtaaaaacgaaacaaaaagtaaaggactttacctggaatgccaccgacggagatatagcctgagctttcggcgccagtggaggctgaagctgttgtttggggaggttgaggttagctttggagtttcacaactccggcatagcaatcgctgtcaacgaagaagaaacaccgaaggaagggagtcttcattgcacccctaggttcgatatgagatttctttttacctttttttgtaagtaaatttacacccattctagaccatacaactgtataaaaaaacaaaaaaactctacattttcaccctcagttgttattttcgtaaatattgaatctaagaatgaacctacactttcccatgccatacttgtctaaattcaaaaataaatttgtttcgattttgagttactactgatgtagtgaacgatcctttcaattcacctgtgaagatttacatagccacctataaagatttggtgttggcattcatcactttgtcaacaactgcactattgaatatcctgcaaataaatagcccatgcatattaagaccagccaaaatggaaaaagacatgaattattcaaatgctatataacattataactcttgttggttttcccttacatgcatgcaagtaaagatgttagctttgaccaaggattacccaaacctctttatcatcatcttcgcaatacatattgaaattaatgacactattcatcatcttcccaaatattgaatctaagaatgaacctatacttcctcatacttgtctaaattcaaaaataaactcaatgtttgatggttatggtactttctcttataagcaatcgtttttgaagatgcaaccgccaagtcaaatcttctaactgcttctcgagtttatgcttttaccatccgaaaattgaaaagtgtcataaccatcaaacattgatcacaagagcttatgcttttacttgcccactttcttttaagataaatcctgagattttgatgaaatgtgttaataaagttgaaacactcttatctaattaaaccttacatacaagtcatatgttataacttataacaattgatgggaaatgaagccaattcagccactccaaagctccattcagctcaagtcaagcatagtaatataactctagattgaataggacacatgtgatgttaatttactcccgcaatcctaattaaaaataacataatgatctttattcaaactctcacttcatgttacaaagtgcccaaacttttgcactagtctttttttatgaagagaaaggaatgggaagaaggtctatcagtgtggctacctcttaaggtgtttggcataatgaaattggtggatttcaatatcaggtcccacacattttgttttaataaataatatgaaaaatcgctaactaataataggatgtcaagttagtgtagtattaagcaccttaaggtaccaaataactagtcttttttatgaaagagaaaaagaatgggaagaaggactagctacccttcctacccataaccagaaatgttaaggggcatcttaaggtgccaaaccacaatatgtggcataacgttattggtggatttcaatatcgagtcccacatattttgttttaataaataatatgaaaaaccgctaactaatagtaggatatcaagtcggtgtagtattgaacacttaaaaatgccaaataacaaaactcatttaagaatgttcaacaaaaccttataggcaggggcaacgagtagcaggacggagatgacggggggccggggccgctaggttcccactactctaagtctttctttgggcaatagattgtcatgtttttgttttgttaggtgagttttgttttcttgttgaattcactaaaaggagtgaaataagattccttaccttatcaaaactcataaacttaaataaagatctacttctccaaacaaatctctgagcaaatatcttattcagttcatgaaatctacagtcaaactctttgccaacacgctcaagccaaccatactattatagcttatagaccaatatcataatagatctctctctcactcacgtgcagaacagagtgaaacaccaataacaaaagcattactgaaatgtttatcttaataattctaacaaaatcaacttagaataaaaaccacctatctcattctatctcacaaactgattataacaattaacaagcacaaaagataggtaaattggtagttatactaactcgtaccctgaacttttcatgccgttaaaaaaatttctcgaactattgagatcattaggttcaaagactttcgtacgcttcacgtgaggattgttcatgtaccgaattgtaccgccccgacttccatccacgtcaggtgcctgttattaaaactgaacgaaaataatctcaataattctggagaaattttgaacggtataaaaagttcgggaacactatttaatacctaacctgtatactatcaatatagggagtatttcattcacacatgtattggagacaaaaaattcaattcataaacaaattaaaaccattatttcaaggctttgatattgtctaagtcaaatcaatttttacttttatacattttgaggaaaaaaacaaataattcaacaaaagaaaaaactgataagtaaacttatctcagacaagggtagggttctcctaaaggtagaagacaagtttggtttctttatataaatatatatatataaaaaaggacaatagaaaatctaccaaatttttatagttgaaagattatgaaatgactaatcaaaaaaacacaaaagcagagtttggagtacaattgtgtcaccataaaacttgttaccattttttgaggactgactcactcattacttggtacaacagagaatgtactactggtttcagattttggaaattattttgtgtaatttatgataagaaagtttgaatcttttttctagggttttcttagcaggcaaacataaagttgtaatgtcatggatgttggtttaaacaaatgaaattagggtttagggtaagagaaagagattgagaaagtaatgtacctgagctgagtatgaggttttggtgatgagtaggattagggtttagggtttagccaaggcttcttcttctgcttctgtaacagctctgtaatgcacagtgacaaaagcattttccttcctataaatttgcagaactcaaagggtaaatacttgtttggctatattttcaatttttagtttttaaaattgtgtttttaaaagtgagaataaaa

SEQ ID NO: 297337 - DNA, 4528 bp, Cannabis indica
aaaaccgcaccacctgcaccgcgaaaatccctagttcaaagaaaaagaaaagaaaaggtatattgtgaattgaccattctatcctatccaacatccactatcagtctatcaccctaatcaaagtggtctggaaagccaatttcccggtctactataaataccctaaccagaccggtggaaataaaataaaagcacgcaggcatttttgggtgggtctttccggttgggtcaccagctcaacttgaaattggaaccctagcgagggagccacttctctccgtcagggatcaacataaccgacatacctccggtgaacaaagcttccagattgcccgtcgattttcattccgtacaccgtatttggacgccatgtccggcctccgccgctcttccagtgttccacttaagaacggcttaccgccaaaggaactccttgatgatctctgcaggtcctttctgtatattatatataattttcttatttctgtgtgtttggttcccaagaaagtggaagaaaactgattgttaagaatttgggtgtttttattttcacttcgtgcaagttgaaattgagattggcagcatctttgcggtgtaaatggggtttagtagagtatgtagattttgctacatttcgttgtaattcgaagttatggctgaatcgttaacccgtggttttttgatttgtatatgtttgtcttagttttgacgctgaagttaaaataagtgattgttctttttttttttttcaatatgatctctgaagcgtcttcgtgcattaattatgtgcagtcgatttgttttgaatgtgccacaagaagatctacaatcgtttgagagaatcttatttcttgtggagaatgcacattggttttatgaggacaattcagtggagagcaatccgtctctaaagtcactgaacttgaaggagttcacttctttaagtatccttttcagacttttcttaagacaattattattattattattattattattattattattattattattattttctattcttgaaactggaaatgatagtttatatttgatctttattatgcatcgaaactggaaagaatttggcttttgtaattgttgtttgcaacccataaattgaatcatattgtgctctcttcactgtttggattttctttcgtgcatatacatactatattctggattatttttgtacacttgaagtttattttcatgatagccagattattttgtgcacgaagtgcattgtcctataacatgtgtatatcttttgtcactaaataataccgctttctatttttgacagagcaacaacaagatctgccatggccttttgcgttgttgtgattatcatacaaagtttttatgtcagagatatagttgatagatgttaatgtgcaatttaaatgttggctttggttttcttagatcatgattacttgttgcttttcactctcatatatagttcaatatatgctgtattttcttttgtatgtcctttttccttaacatatatgtagtgtttaatagttgtgatgttctgaagccgtatgtagctcacctggatgatatatttaaagacttcacttcctacaaagttcgcgttccagtgactggggcaattattttagatgaaacctatgaacgggtgaggatcattgcggagaaagttagaatattagattttacccttcttggcaaaattatccattcccccgtaattatgatttgctagaatttggcaatcctaaactacttgtgtgtcatatcctgtatttggttatcctaaaccagtgtcaagattccatgagttatctttttcatatgttttgcgtgtcactttgtatttggcagagtatagaataaattatatttgacctactgaagcattttgataataaaattgtaccattgtatttttcacttttgatacttcgtttttcatcatgctctgcttaagtgagaaataaagaaagaagcaatttaaatataagttgtatctatttggggatatgataggatgataggaagatcaagatcaaactgtgatagacgtgtattggtttatattaaattgtaatgcatataatatgtgtagaactacctaattatagaaacatctggaaatagtagaaaaattattattttggacacacattgatcatgaaactattggtcacagttcaacgatctactttgtttttcaaagaaccatgttttcttctctaaaaatcttaatatgttctgacttatttattttgttgtagtgcgtactggtgaagggatggaaaggatcgagttggagttttccacgtggtaaaaagaacaaagacgaagaggaccatgcatgcgccatcagagaagtaagattaattcttatgaaattgttgacaggatgcaagctgtcgatagtaactttatttgtgtcttaatctcttctgtattgctcttaatctgtttgttcttgcttactgcaggtcctggaagaaacagggtttgatattacagcacttattaacaaagatcaatacattgaacttatttttggacagcagagagtgcgactttatatagttgctggtgtgaaggatgatactgcttttgcaccactcacgaaaaaagagatcagcgtatgtaatatttgtttcttatctttgataaattcattggtctaattcttgtctaaagttgttactgtataaaataatagagatcattattatttgtcgaacagtctttttaaaaggatgcccagaaactttatactatgacaagggaaaaaggaaaattagcttttcactcttcataagcaactgaaacattcatattcttctttcaacataaagataacatatgtatcgtgttctcactttttagtaatcatgagaagcgctatttttattggtttcccaaaatattgtatgcatcaaccaagctatggttttcaatttgcatcacataacgagtcaaaagaatgttaatggaataccctgcattacatgcctaatcaattttcttttttctttattatctctacattagaattttcttggctgatttagccatatcatgcagcattggttccagtgttgagagcaagtttttattatggttttgcaggaaattgcatggcagcggcttgatgatctcttgccagcaagtggtgatgttatttctcgtggcaactctggcctaaaactatatatggtggccccttttcttgcgtaagtactttccctatgtaattttgattaatatttttgaatggttccttgtggatggtcaatatctgaaataattatggatcattatgcagatcgcttaaatcttggattttagtacaccagccaccaatagctccaaagtttgacatgcctcttaaaggtatgctgaatgattaccaatcataagaagaatatagaggattagtagtagctttaactagcttcatatattacaaaacaaattttttgcatctctacctaacttatgttgcatattacctatatgatttataattttaacattaatcaatgtttataagagagttaaccttttgattgttgagtaatattccaaatgtagtatttcgatctcagaatagcccaattctgacaagttttgttctgattctcattctcttagcaatctctgtgtggaaagcaaaacacaactcaatagggagtagcacaatagttacggagactcgatcaacaaaaactgaacctgataaaccccctcccgacttaggaccaggcaagagcttcagaaacttcaggtttgatacttcgtcaatcttacaagcaatggaaactggtttctctgcatgaattctaacactgctgctctgtaaagttgttttacttgtttactactcaccaattagttcttcccgcaatgtttgacggtggcccccctgtatagcggttcaagaattccagtttcgggttttaagtaaattctgtacagaaacccttgcttacttactatataggcgcatgcttctccttgttcattctttgttatcgggtgagatagatcggagaaagaactagtgtatgttttaagtttcagtgtaggagcgtttagatagctctagtgtatttgatgaactagtgctcaaacctttttatattctacaagttatttatttatgtatttttttcttctcaagcatatttgtggtcatgtttcctaggacccaactctaaacgtggaattcctttctccaattcttccttcagtgaaggttaaaaaaaatggttgtacaggaaggaaaaccgaaacccgattggctgattttgtctatggggaaaataatttaaagaattattactaattttgtccaaaaaactagagtgtgtttagtttcataattgaaaatttgtttttaatttttaaaaatggaaagcaattttaaaaattaatagggagtgtttggttaaatttttaaaaatatgttctgaaaattgagcgtaaaaaaaaataaaaaaaatatcaaaaaatatcaaaatattttttt

SEQ ID NO: 297338 - DNA, 6244 bp, Cannabis indica
gggcataaaacccaacaatgtgtcccttactttgataggttaaaacttttgcacaatacatgtccaagtggtacaaaatgatcctcattatccatctgttgcacgcacgggcatgatgctacccacgagaccaaccagttaactctacattgcatgtaatttaccccaaaataggattcaagtagaaatctaagacgggtcatgggtttatccatactcgccacttagcctacaaatgcccattcattcccatgtaaaggagtcaagccgaaatatacatagctaaaactctgttaaaattacccttgatcttcttcttcttcttcttcaaaaagaaactaagggtaaaaggttagggtttcatgcaaaatactgtaaattcatcaataacacccttagaggctaatagactcactcgtggactaatatttattaacaacttaaccgcgtaaaaaatcttccactcttaatttttgcaaattatcatttctttagcacttaaatatttagtttccaaaaatctcggtaaatattttagtgctttcattgagagtaaaaaaatatacgtaaaccactgttaccaccatggtgctcacacgaaagatggttttaaaaaataatcttcaaggtggccttaagacggtcatggaggaggtaaaccccccttgccagagcacgtcttgttgagcgatgtgggaggcgggtatacgtctaatgtgaacgatggagaaagggacctagacaactagcataaccatgttggcaacgacaaggatgttgagaatcgttaagaggatgaatatgacaaggatgattacgtcaaagatggattttacgaagatgattaccattacgagcacgacccctagctaatgagagtttccaaaaagttgttcaaaactcaacaaaagttggcccgttaggaaaattttttgcaaaaaatggaaaaaaaaatgttggaccaccttcggaggaaattcggagatctagacgaaggagattctgacgatgacccttcggtggagtgcgttggaggaagtatcaaggaaaaccccgctaatggtgaaacctctggtcctgtacaggacaaggggaaggcaaaagtgggtgaccctaagaactctcgagcctttgaacctcctcaaaaaaaatacaaatcaggcccacaggccttctcaaatgtagaagacagccaatgcctttgggcttggacatcctttagccgagattggccttatgacgccgaagggagctggtaagaaagtaccaaaacccaagagatggaacgaccacccttgcaatttggtatgcttagaacggtggggcagaggagcagtactccgatgatagttggtcaaccctggacgtcagaaggtgtttagatgcaaaacacaaaaaaagcaaagagtgcgaaggcgaggccacgtggtaacgacctcagaaataacttgaatgacaaggtctatagaagggatctctcggacaacgacaggaaaagtttagaagaacagatagccgccttgacaaaattggtccaaaagaaaattgggaccctcactgattgggaagatgaagacctagagccttgcgtcaggaggatcatggaagctccactcttagagaacttcaaaaagccttaaactaagatgtacgatgggcgctcaaatcccaagactcacttagccaaatataacaagataatacaagtggccagggtgagtgatgatgtcaagtttttatgcttttctttgaccctcaccaagtctacggaggattggtggaaaaggctagctccaagatcaattcattcctggaaggatttacaatccatattctggaagcaattcatagctgcccgcaagtacaatttggagatagggtccatcaccaatatcaaacaacaagcaagagaaaccctgaaaaagttttattcagcgaatgatggaaacagcagccaaaactaaagtaatagatgatatgaaggtcgtagccttgtaattggactcgcagctagctccctattatggggagaaatgcaaagaaggaggctaaaaccctctttgaattcatggccaagtaacagggcttcattagtttagaagatgcttaccactaagcatttggggttccttcggcactagcccctgtaagttcccagatctacctcgttggctcccgttctaggaatgcaatacacccctacaatctaaagactttctacgtatgtgcccacacctacgcaaatccatttatgtgggtacggaacaacacaaactggatgcagtgtggctcccaaacaattgaaagtgaaagtaccagagtaagacatgagtaactcctagaacaagagaagggggaaaggtttgggatgaggagaagcttcagagaaaatcaagaaagagtattaaccaaaatacatcgagtattccagtgttgtggatagtcgagagaatgtgtacagagaaacatgcaacatggttcattataggaagcctcctagaatgccccaaggggaaaaatttcaaagagacctaaagaagcgtcgtgaataccacagagacgtgggacatacaacgaatgaatgtgacttcttaaaggatgagattgaaatgttaataagagaaaaacatttgggagaatgggtcaagatacccatcatatatcccaaataggaggtcgttcacggacatatagttgtttctcggacagtagggtactgtaaatcctcattgtggagtaattcacccttaagctcccagaacatatcctccaacacttcccgctctgccagctccagctgtagtgcctttgatggctccgagaccaggaagcccatactcctcaagtcttgctccaccacctgtggacgaccacataacaacaattttaggaggaccacacatagcgggaaccaccaggaattctcaaaaaagatatgtgagagagttgggtgaaggaaaggaaacatgcatgttagtacagtcactaggcccaacatcctcgaacaatgaatctgtcgatcactttcatggaggaggatggcaggcatgtgcatttccccataatgaccactttgtcgttgaggcccagataataaccaaaagagtttctaggattctggtggataacggtagctccgtgaacatcctgttcaaattcactttccaagtgattggcctcactaaagctaacctttcaccttgtcctatctagttgcaaggctttaatggtgatgccttgatgccaatggggaaaatccaactacctatcacccttaaaggagaaaataatgtgagttccttcaagcattgtacatttgtagtagttgattgccccacaacatacaacgcaatactaggatgccctatcttagtggaatttagaggagcaacttcaatacaacatttatgtatgaagttcccctatgataatggatgagttaggacagttagaggtgaccagtagagtgcaagaagttgttacaatgtctccgttcggacagtcttcaaagtctgggaagaagcagttattgctcctgaaagggaaactcaaatccaggaagattttgaagatgagctagacccccgtgtggggacagaaagagtgactgagcaatggaggatgtggaagaagtcaacatctatgaaaaaggccctactagaaccattaaggtagtaagaaacctgcctctgacggtgaaagaaagcattataaatactgaaaagaggaatcatgatgtgttggcatggagtcattatgatatgataaggattgatcgtaacaccatctaccatgccttgaacattaatgaagatgcaacaccaatttgccaaaagtgaagatcgttagatccggtaagagtaaaggtagtgaaggtagaagtggataagttaaccacaaatgatttcctccaggaagctctatatcctatttggttggcacgtggaggatatgcagtaacttcatggacctcaataaagcttatcttaaagactgcttctgtctcccacaaatagaccagatggtagatttcatatctggttatcagttgttgagcttcatggatgcctactctgggtataattagatcaagatgcacgttgctgatgaagaacgtaatagctttcagacggataaagatgtgtattgctacaaggtaatgtcattcggtctaaaaaaagcgagggcaacttatcagagaatggacaataaaatgtttaagaaccaattagggagaaatatggaggtctacgttgatgacattttggtaaaatctaagacagtcggagaacattatacaaacctcgaagaggccttttcgattccttaaaggtatgggatgaaactcaatccaaagaagtgtacgtttggtgtatcctccaaaagtttctaggtctcattgtcagctcttgagggatcgaagaaaacctagagaaaatcaaggccttcatcgacatgccttctccctgaaagcacaaggatgtgcaaagcatcattggaaggatccctaccctcagcaggttcatctcaaagtcaacaaaaaattgcatcctacttaattggaaggatacctggaaaatataatgatattttaatgggacatattttattaaatatgtgattaagtggacattagagtaggattatgatcctacctaatctaattacgagttgattagggaaatatgagtaaatgaataaataaagtgtaatttactaattatggagattttatcggactttgggggtatcgtggttacctttttataataaatattttcgggttcggtggccgtagaaacgcgatgaagtggtcaaaaaagtcacgacaatatacgatgaattatttggattggaattaaaccggtctagtttggaattattttttttagttatcggtttggtagattaattaggaaatgactaaaatacccctagcatttaatttaaaatttaagggttatgagagggaaaaatggtcattttaatgataggcatttatttggttttatttgaattatgtggctgaagttaaaattgttattaggtaggattatttaataaaattaagaatatagtgaataagggataagctagaataatgggcatctatcttcccttccctccatttttcttgcccgagcctcatgaggagttgccttcaagaattattttgttagcaaactcatcacatttcttgttgatttggctggttgtggaagttattaaagcatcaaggtaagtttttggttttgtttctttgaatttcttaggttttaggttagatataagttagggttttggtgacttcgggattgggatattaaactacaattcgaataagtttctaggcttgaattagagtttgtttacgattggtttagttagaatcagttcagttagggttgagttaaaggaatttaggatttctaagcttaaattctacttgattatgctatattggttaaattgatgaattgttgtgtaataatgcttgggatgtgttgtgtatataatattagtttgatatggagcggttaggcaggtgtggttgagttttggttcgagattggaggagaaaactcaagattgcaaccctgtgagaaccggtcgaccggttgattctggtgcagcagaactggtcgaacagtttgcctgcaggggtaagttttcagttttcttcaaggccagttttagggctcgaaatgatttccatggctattgtagattgtttaaaagtggtaaaacctattttcgagctaatagaagttaaagtttactagttatgggaattaaggttattcccagaattattgatttaaggtatttgttgaatgttgttgtcgtgacataggcccgggttcgtcaagccttgtttccacttgggttggcctgtacgcttgacttctggattgaggtaagaaaaatattatacaccgtttatggttaacgattataattgtgatagtctcgattatgatcgagatcctaatatgtgtttgttttgactcgattatgatcgagggaaatgatatgaaacgttcaattgtcaataggtcaagtaaataatttgtaacaggtaaattttacattcttctttcatcggtgtatgacctagaaacatgataaggtccatccaaatctgtgagcctatgtggttattttattatagatgcatatatttaggtccatttagtttttggacctattcaattaataacagttattcattttaaggttaaat

SEQ ID NO: 297339 - DNA, 990 bp, Cannabis indica
agcgacagttttgaaccgtcgccaattctacctattttacaatagttgtataggcgacggttatagaatctgacgggaatactttaaacgattgtttaaaaagtcgagaaaatccatttttgtagtagtggatgctgattggacctgctgcccagatgaaagaaagtcagttgcagactattgtgtatttttaagtgatgctttgatctcttggtcgtcaaagaaataattaattgttgctagaagcatcactgagtctgaatatgaagcacttgttcaattggtagcagaaatttcatgactacaagaactgctgaatgaactcaaaatcaagtgttcctctatacctatcatctggtttactatgcttgaacaaagcacatcgaacataatgttcactttgtgagaaacaaagttctggagaagaaattggaaatcaaattatgatcagatagttgacaacttgactaaaggtctcacctcaactcggtttcaagtcctcatcaacaaactcaatgtgattcaattaccttatcgtttgaggggtggtattagagaaattgaatccaacccctagtcgacagagatgagtgagctgactaaagagtgtagcaataccgaatgagggaattccaagattgattgtgcaatgattaccttttccaacaaactttccattatgaatatttttttgggtattatatcaacacgtgtactacttttattggcccatattttcattctgtattttgcctttctcctatttaatgaaatgctactacactcactcgttggagctagcttagttttccaaacattaatttattccttaatttctcctctccaaaagaattgaaacgttactatatattttttacatttcaatactaattcttacgtttgttggtatccattaatatatataaaacaatttcatggtggtatatatatatatgagcattgctattgggcaccagtggtacctagcac

SEQ ID NO: 297340 - DNA, 2663 bp, Cannabis indica
aataaaaattaaaaaaaattattaatcaatcatagaatgtcattttataacactgttgcccataataatactctatatttatatatttcttatttttttttttttttggggtaaagggatggcattttcttttttatgcaaacaagatgattcaattactaattcctaggcctttcaatataaatggtatacatattgttcatcacttcatcttagtagattccaagagaatatttgtccccaagaccttggaactaccaatcttttagttattaaacaaaaaattttaactttaataaacattccattttttttttgttttcatatatagtacactcacaattagtcacaatctaagaaacaccttttttttttttttaaattgtaatagatacatacaaggcacgtaattaaacttgatttgggtgctttcatttcaattaaaagctagaaattatggatatatatatacacatatttaattgtatataatctttaaaagacaaatgttcaattttgaagcattattagtgcttttgggtttgttttcttaggccaagataaggcttaactatgtttgatgtggagatacataggataatgaaaggtacattgttcttgtcttgaaatatatgatcttaactatgtttgatgtatgtggtgttcaccaagatcaaattagacctttattagtggaattattggtcaaattaatcaaaaagtgctacaaaaggtttttttttacatgatgaataaaattactcgtgaatttacaatgttggcatttattattggcgcaggaaccttcttgaaccaagataactcatcgtttaaccgcaaagtatactttatcaaatcatgggcaactgaattctcaaagcgagccacgtgaaagaaaactgttcctaaaaatttagacgataaaactatattttcaaacaatacttccagctcatggtacaaagattttgagataatatatattataaaatgataaaaatatgaagtagttgctcaaacttgggtcctgagtctaggtctgggttcgagtccgggattgagttcgagatttgaattgggtcccaagtttgggttcagggtccagatcttgagtcccaagtcctagatatgagtttgggtcccatgttcgggtcgggtctcaggttcgtgtttaggctcgagtcgagtctcgggttcgagtctgagccccgggtccgaatccaggtctcaagaactgggccaaagattgagtttgactccggatcttttgtaataatacaagctaatacatactatttattatgtattaaataatacaatttacgttgtattaaattttttagtcgtaataattaagacaatacattaatttatttaaatataatgtatttattatttaatacaatacgactttatcagcctactaaatgagtcattagtgtcttaataataatctagttatgctatcataaattttacactacacctacatatagcagggtaatttagtcttttcagtcttggtaaagataaattacaatagaatcaatttaattaattataattaagtagtgtaatataatattataatttgatcatatagatttcagaacttttctgaagtagttcaaaatattttttaattaatttggaggatctaaattaagacaaaagcacaaggaacccaccaagaaaatatgtttggtataagtgtttcttacccttgatatatgtatattctactatatattaatttcattcatcaccaaaaaaattaattaatatttaattacttgtggtgaatctaattcctaaacaggaatttgacaaagggaataagacttagtgaaggtgacaaaacactacaagactaaattaaagtggctttcattcatttatgtttattaatacaaaaaccctaaaaataataataattaataatatgcttaattaattaattacttattagttactcttggtattgtcgaaaataaagacaagtccaattctcttcttactcagatttcaaggtgggttttcttataatatatgttaattggtatatatgattgttttaacttaataaaaaatatatatattattatcattaagtactatatatatactgcatattctgatcctgaatgggttttaataatttgttctcatctcttacttcaatattcttagtactattctcttaattcatatagacattaattaatatcacattgcatgtccaacgaagttatatcttttttaaaataatacgtttataaataaaattgaagttagacttcttggttattacaaaagatattaacaggtatagtagatatatctaccatgtccgtaacttattggcaaaagcccatttggccacattatgggccgcgtatttatagtttctagttatacaagaaaaattacaaacagtcataaacgtagagaggagcttgcattgacgcacatagttctcaatcccccaaatggagtcatccccttttaggtttgataacaatctctgaatcactctccaccaaaacaaaaggatgatgcaaaaagaccgccgtctccatagctaaaagacaagccgcagcttctccagtgagtgggtcagagaagtgtagtctttttgccgccacccacaaaactgattcgtt

SEQ ID NO: 297341 - DNA, 4507 bp, Cannabis indica
tgatattttcaggtccaacgtcgtcgtcttgattacgcaacgctggcgcttaataacttaaacgtacatttagtaaatttcgggggtggtgtggtggtggtagtggactcatctcttgtcactaatggcagccttggactttttccttttattaaaattaaaaaaaaaataaataaatataaaaaaaaagagtgtggccgttgcagtcactgatcagcaacagcgacatttgcgcgcgtcctacgtgtcagcttttcccacacacctgtcgttatttactttatcggcccactcgttgaccccaccacaaaaacagagcgcgtgacgtgaacgctccattaaaattaccttcgaaaagatttgtcggattttcatgcgcattggtcacaccaaattaaaaaaaaaaaaaacaacagacacacataaatgatataactccttgaccctgccttttgggcatttactctgtacccaccccaacttgctaacatgtgcactcatttttactaacctgcgcacacttacccgtaaataatattttaataagaaataaaataagaaaaatatatacacaatggaattggaaaaagaaaccaaaatatttgtattgatgaaaattttggtgttaagtatttttttttttttgatctatgaaatgaaacaatttgttgttggttttaggacatgttaacatggacactagcattcttggttgatttacagatagggcaagtgtgaagagaagaaccacacacagtacaaagacagagatgtctacatggtaaaagcaacacgcatgactcttccttcccacaattcctgcaaagcctattgtgattgattgtactcgtagtattattactggttgtcgtacacctcacgttacttgtcgtttccaaatcaacgacatctattttgttgttattatgattaacgacgtcgtttaatgtactcctccactctcctaatactgctcctgtttctattacgtcgtcgttttcgccacagcaagattgggcatcgtcagctagtgcggctgccaatgtgttgggttgaaggtcatcctcttcgtcttcgtcgttatcgttatcgatgtttacgtcttctggtaataatccggcaccggctccggcgacgcagcgagtattgcggttgttgtgattgttgttgtctttgacttgtgctaatacatgttcgagatttgttctgagagcattggcggtttcttgattggtttgtgctaagtctctccatatttgattctctacgcataatgtctttactctttcttctaatgcccaatttaacttcccaatcttctcaatctcttcttctttggcttttagtctcttcatcattcctatctctattgcctccattattctccgagcttgctttttcctcctttcatcaacttcgatcctcactttttccatctgaatttattagaacaataatgaaaaaaaaaaaaccattaataaatttgtaaacagaaaaataagaagaagaagatagtttcttaattcttattaataatacttacatgttgagaaataaggcgatcgaggtcgaattgctgttgctggatttgataagagaaatcttcaccgagaaacgaaaacggagaagtagaggagttcttgtaataatgaatcggttgagtagttgttgtggaggtacaaggaggaaaagagaggaatgaaggattgacgttgttaatggctgcagatgagtctctagaccgttttctagaaaacgacgtcgtcgtcgttgtcggaatattgtaagtaagtccgctatcggatttcttggccgtcttgggaggaggaaccgatgaatcgttgtacatgggattgtacacaggaaaggagagtcgtcagtcggtagaggaagacctccgtgatatcccatctgagtagtagtactgttatacatatttgtatttgcttcaattggattattcatcatttctctgtaacaataataatcaccattttgaatcagcttacaatttcacaaacacactcagaaaagaaaaagaagaagacgaagatattaattagtacctgttggcaatgagttgatgagaatgaaagagattaaggtgacgagcttcaacagccatagatgataaaggcctgcctttataatatttgatgatattatatatcgatcacagtgtatgcgttttgggttttggttcttgttcttggttccgtttgagtattggtttttcgagagagaatatagaaaaaaagagagagtaggagaggtataagagaaagttaatgggagagaagaaatgaacaaaatggcatgcaatagaggtggcaaggatgtatggtggggtttatttagggtttggttgggttaggagagagaaaataattaattaatttatttatttaattaataaacggaaaaaaaaatcgacctcagatgagtaaagaaaggaaagagagaaagagagagagattcggttacctaaaaggcccttgttctttattacttgatttgcttttaaaaatcagaaagcagagatccggtcaaaccgtaatactagctcattgttaggggcaaatccggaatattaacccatgtttatcggaactgggtgggttgctttttcttcttttttttttaacggacacggtaaaaaagatactttgctattaaggtgaggtgaggtggagattttaataactgacatcctgggtatctgccacgtagacctgccgactggggcctgtttagaatcgccacgtaagcaaagatacagtccaaaaccaaaacgaaaccctttttatattatctctttctcttttttctcgtccctgaacaacgtgatggggtgggggtagtagtaggagtgggacccagaaaaaatttacacgtgtgggtcaggatgagtgagtgaagagaagttaaggaagtggacaaaattacccttctggacacgtgcgagagggtccgccagcgtggagttttttaatgggccccattgtgggcccgggtaaagcccaaagtgaccgtgttgtttttgggtgggtacggtgtacctgtactctagtgcctgatcccttttggcagtttcttactttgaggacagcttatttcacggctgctcgcatgggagaaacgttgggtctcaaaacttttggactgttctaacgccacgtgtcaatcaattaactcatcttttcttatcatgtccacggttactattgtgtgaccgcattcttatccaatcaaatcacggccttacatttatttttaatctaaattacttaattacttctcccaaaacgttgaatgcattaaatgatggtgtgaaaggtgtgaagatttggacaaagtcacaaaaaaataattttttttttatttgtgagatttaagaatataataatttattatttataagtatatttaataataataataataatatattaaaattaagatagagcgattcttaacttgcacgggtaataagcattggtctttgataatatatttttaaaaaaatactgtactgaacgtgatcgtaccagaacatgataagtacaaatatacgatttaattattattttgtataaagtggacaaaaatcgaattgtttatataaagaataaattatattttatataagacacataagtttgatctaaattcatgtatttgtttgttttttttatgtatttagactaattaattcacacatcacgctaatcttaaagagagagaggttgaaaagatatgattaaattatttttatattaattttaattaattaattaattaatttcccaatagagaatcaaatctgtagagtgctcgaaaagagagcatggacccaatattaagaattgccataaataattgaccttttcagcttttgaacttccatgtatcattaattgattggtgttcattgttttggccaccacttaaattatatatgtatttaatcgaaatgcatgcactaataattaatttaatttaatgaaatgaaatgaatgagtgaatggttacatgacaaaattaaccattaacacaataacttaattgtcatatccattctttctttctctccatcaatcaataatatatattaatattattgtccacatcaatatttaattcaatgggaaaaaagttattaaattcgtaaatattattttgattgaatactttagtagtagttgatgttttgatgatgatcatattataatatatgataaaaatatatattcatattcatatttaatatttattagttaaacactcgcaattaataaggcctactttcttgcttttgaaattttcatcaattttgacacaaccttttgaccaaatcgatatttattttgacgtactcacctaaaacaaaaaacaaaaacaagaaaaatttagctatcatgatgaatcctaaccaattattttgatatatatgtatatactaggtgattgttacgtgccaagccacgtagtgttagttttatttaat

SEQ ID NO: 297342 - DNA, 1151 bp, Cannabis indica
agtaccatcacctactgtcaagaattccttacccatggactttgttttctgttgcaggttattcacatcaattgtagtgtgattgctagcccctatatgagcaaactaggcttcattctccaccatttcaagggtaccaacaaaagttgaatgtccatgaggcttgttatttgaccttggagctccaaggggagtacttcgcatataggcttcatcaaacccattataacagaaagcttaccacacacttgacaagtgggtttaggaccacttgagcgacctcctcttcctttgccagctaatctccctcgactgttgctgttggtactgtgactacctttgttattggaataactcgaaccacaacctgatccagagttgttaccctagttagcatagttcacatttggagatccagaaccacttggctacttagtgttacctgagagtgtagatggcctctccatcttactgtcacaactcaggagcatatcctagagttcttgccaggttgtagctggtatggactcaataagcaacacaagaggtaggtgttatatgtttaaaccagacaaaacattagcaataagttatgattcaggatagggttcacctgtgagatgaagaacatttgcccatttttttttgccttagctattcagccattgtagcagatccattcttgtgagtttggatcttggtcctatactcatccattttagctttggactaggcaccatagagagcttcaagtgcataccatagttcagctgaggattgacatcccataaccttagtttccatgtcctttgttatagatccataaagccaacccattaaagttggtcatgaacaatccattgttcaaattatgggtttacttcactgctaatagtagtttggccatccatagatacaataggtggaaaaaactattggggcctaactttggcacctgttaaaaactaatctagcctttgacctctagcaatagctgagaccatggtcttcctcagagagaaattgtttttgtcaagtttgagagcaaatggctgattcaaggtatgttgcctcaaaagtgagtgttttaatatttatactcgcaagtgcacgaatcgtttcagaatatagtgttcatgtaagtgcaaggt

SEQ ID NO: 297343 - DNA, 3100 bp, Cannabis indica
ccggagaacaactaggagatattttacaaaggctttgaatggggtgcgggttgattatctttgtaacaagctgggcatgattaacatctatgctccagcttgagggggagtgttagaatattagctgtatattagttgtaaaagaattagggtaattgatatttagtagttttctattttgttattggtagtttcccatttagtctcctagctttgtatatagaatttccttaataggaaaatgaaaaacttactagaattgttgcacattcttgaacacaaaccaatttttaatcttataaaggattcaagacgatggaaaccagacttgcagggaattttctcttataagtctgcttttaatgctctcacttttcatcacttggaagcgggtggagattggtccaaatgagtctggaaaagttatgcttcatgcaagatcaaagttttcaggttttcagctggattctagttttagataaagctgaatgttcatgaaattttattttacaacggaaaaaatcttttcaactttcaaatcttatccctgggctggtgtgtgttctgcaaaaagtatggggaaacatcttcccatctatttttggaatgctttcttagtcagcgattgtgggttagagtgttcgaatagtttgggatcattggtgcatgcccagttgtgtagtcagctattattgtgtaaaattaatggggatgagaggagttctagattacagatagaaaccattttggctagaaagaaatagtaggatttttgaagtcattgaaacaaagctgatgtcctttgggagaaggttaaagtttggactgcaacatatgggtttacaagacataaagccttgagggtctatcttttcaagacctgactagggaatggggttctattttgtattagtgcattggtatggggatatagacataggcctaaatgtatcatgttttgagcttattttgtattttatgcttttaatttttcatgtttagcatggtaccacggctttcctctgccataggttaggctccctaatagatattgggagtaggtcattttaagacaagcaacctctgtcttttttaaaaaatctaaaataaaataataattcgtatattttctaagtttgatgtgtacttttcttaaatcttcacaaggttattaattagagctcagttgacttgtttagcttttgtttgcaggttgcagtagcaaaatgtgacttgtgtgaattttatgtacttcctccatctgaagtcttggatcttggccatgttgtagttgcatatcgaatggtaaaatcacatagcattgatcatggtacaaatctcatttaaccaacaaagtttcttatttttgtttgtgtgactgtgaatacctttcttggggtttttttttattcttaacaaaatttatttaatcggagaaggaaaataaatacaccacacaaagcaaaatcctgaaaggaaacctctacagaaaaaatataaactcacacacatatctccattccctaaaattataaagcaaactcacaaggcgacccaaaaaggttctccacttatatcccttgtatgttcctcttataaacatcttcaaagattctagcattgctaagggtttctttctacccattcagctgaaccttgatagtaatcctaaattatctttcctctttttcttttggctcccaaaaatgaaagaaaattcagcaataatacatatactggctaacttcatgctagaaaaatgagctttatttttgtttacttctctaaaaggaccttgagactaatgtttacctgtgctgtaagtgaagattctcttacctgtattcattttgctgaggtgagctttctggcactacagaaatacatgttgggagacaagattccgtcataaagggagaaatgcatccttctgatgataagttttcaccagcatttagagaccggtcccgcttgtcaaagattgaaacttgtggcatacctgtgcctcgtgtaacaaagcagaatgagcttttggagaaaaactacgtgagagcagacccaagttatttgaaaacacttggtcaagctcattccggatggatatttggtgcgatagcagagctcgttgataatgccagagatgctaatgcaactaagtgagttcacttgcttgtatcttaatttacaccgtttttaactaccatttacttatatatcagttgtcatacttttgaccaggaatattactatctctttacttcctgctctgttattacacttttcagtctctatggagataacataattgcatcgtgatgtgtcagattaactagtctaccaatctcttattgcagactggacatctctgttgaaatgatatactgtaaaaagtctgaaaaacatattccattgctgtccataattgatgatggacatggtatgagtcatcaggatgttatgattatggcatgtttcggtcataaacaacccgaagaagatttaagagagcgaattggaagatttggtattgggttcaaggtaaaatcaggcttgagcgtacatgcttctttttcaccatttaactttgccaaggcatattggaaggtttgaaatgaataaggattcaatagtattaatgatatgtcattatgtataaacttggggttttgtttttttttttttttgagaggatactgtatcttgtttaatggtccaatttaccaagtataactgtcaccaattgtgcttttctgcatatgctatttgactcttccctaatttcatttatatagtttaaatgtctttagatgttggaactaattaggggagaaatgaaaaactgcatagaaacaaaaggaaagatatcatgagatcagattgcccaacatgtaatcttattgcattaatggaaggtaaactggacagctttgtagaagcatattggttctctataattctcaagattcacgtaaaagtgcatcttttttctttctttatttcttttcaataggtaatatgaaaagccttattgttcagatcatggggttttagaatccacatgcaccttgaaaagttctaaaataacagtgtgcgtggcccc

SEQ ID NO: 297344 - DNA, 5104 bp, Cannabis indica
taatttcgaatttcgaattttgaatcacaatgctctgataccatgtagaaaatagtgaatcgaattatctttttatttcatagaatagtacatatttatatacaaagctaggagactaggaaataggaaactaccaacaaaataggaaactactaaatacaagttaccctaattcttttacacctaatatacagctaattctctaacaattataaatcttttattcttagtaacgatcaccccaataatgactgctaagagtagggtttacaaaatataaaataacggtagaagctcataggataagaatgaccttgactctcgcctaaacgggacaatgtcgaattctcatcttgatcgaataaaagattgcaatggtgatggtgttgtagatgatggattagataaagttggagttggaattgaagacttttcctttttagcgccttggctcagtgaagtagtcgaccatttgcatttgggattcacaggggcatccttttggggaaagacaagcccgtctaggttgtcatcaaaacctcctacactcatttgattttcggaagtcactcctttcattggaggaatatccctaaaggtttggtcccacggagcaactggtacgttggacgcctcccagagggcggtaggagttttctcaaccccaacgggagccgaagaacccagagctgtagagatttcctttgtaggggagaaatctcctggacgtttgatgagaaatggttgagagaggacgtggctttcggttcatggaggcctgagatttggccttacctttccccttctctttggtatctttggctttggccaaggtcgcggtaattttgtcactcacggatttcaacatcctaaattccaaagtatctacacacatgattgcaatataagcaactagaaatgcaagccaagtcaaaatcagtaaaagcacagttgtaaaatagcaaaagcaactaagaagacttgtgtgtgggtacaaccatttagtgagttgttatagggttgcccacgagcaaaggagattatgtttccttgatcgaggaagcttccatattccctgaagttaggtagcgacatgaccatgaaggaatccaccctaacggtgtctgagaacacctttggattactaaggctcctaacaatttagtctactatgcctatatagtctttcatgggatatctatggcggtctaagttcaaaaattgtttatcaaatcccccctaatcctcccaagacatgtgataaaggctaggggtacgaaagacgcgaaagggtctattacctcttcccgaagtgctagctctcggagtctctacatctcggtacgttgcagcaaacctctcagcagtttcctcctcctcagataaaggatttggatggcagattagccaattaggctccaggagtttgtcctctgtggccacctcagttatagcaatggctagttcagttgcaatggcttcctttacctgttttggagcctggcattgtcccaggaggttaacatgatcaatattttgaaactgcgggattaaaccagatctacaaagcaatttcgtcgtaactgaatcctcaacctttaactgctccgcaaagaaagctctgtaatgagcctcttttttgcctatttcggcagttttaatgcttttggaaggaagttctggtgaaagttaaaagacatgaacaaatcaatcaaaataaagaaaatttaagaaatgaaaaatcaaggttgagtggcaacaatacctggtatctggaagttcttttgaagagaaggcaccctttttacaaggaacccggaggaaaagaaccagtaatctcagagatcatgagtacggtctgtgtggctgactgggcagtaggagtctggatgcttgtccaacctgaagaagcccaacttcttcttattttacctcatgggattagcctatacactttagaagtaaaggatcttctctgaggatggtacttccaacttatttatattctaaaagacataccacttaggtaggagtctatacgacgagagaattagctggaaaggagctatcccaattttggctgccagactcgcaaagtgggtccttaagggaagatccgctccattagaaatgtgggaccaactccaagcactcaatgcctcaatacttgtggacactgattctcttgtggcagatagtctgtgccacatcaaccctggaatgttgcgaagaccagtgccatcaacataggccatcagcatcccataaaagcgaaagcagttggctttctagtccatctcctagatggagtcattaaaagcctgtgcaactggaggcgtcttaatgctcctttttcctttggccttcatagagggtcctccctccacaataggttcatcctctgggacggtttccatagctgtcgtttgttgggtgcttcaataagaaccttagcctggattccttctgtgagtgcttcctttacaagagcaacatgcgcagagaaagtaggctttttgaagcaattgactaataaaagaaaatatttccaaatttgtaccctaatcgaccaaaccctaaggtctatatacatacagacacttatgaaacctcacatgatcagaaaaaatacccagacagtgttgttcgcttttcataacaagttaattcttagaatagatttttcctaaaacagggaaatacctttcgaatatcctactctgctatgcaacatgtaaacatcctagccctagcttgaacaagaaatttctatcctagatatgaaataataaaagctcaaccaggagttagtgtacttacgtgttgagtggaaaggagatggattgatgttgaagaatctcgtctgaagttttcaaacttagtcgataaggcggtcacaacttatatgaaattcgaatccttcgtctggcagggggtctagttggtcgatttgaaagggttcaatatttggaaaaagcttcacacggagatggagcaattgttggatcaaactttcacactcttcttgcatgcaataagaacaacgagagagaaaatttataggggaaaattcaaagtttggtgtggaaaaagtgaaaagaacgtcgttgatgtaaatttatacttcaagaagaaaattggcttttttaaaagcaacgcctcgttagatccaacagctggggagttgaaagggctagaagcatttatttttcatgatttgcttcaggtcaatcaagccataacgcaggtctttttaaatcaccctgccgtcagtttcacctttttttgacaaacatgccccaacaccctcgtaaggaatcaactggggcatttaatgtgtcgcatgattgccacgttagcaagtgttccatctgcccttaacggattatagctcaccaaaaagaagcgtctgcaattctaacagtcaacacgtgccaatggtcggttctcgggaaagattacaagttcccagaactgagagagtctcgaaagcttgggggtaaagattatctgtgtttttgagcaagagacacgtgacaatattagagaagaagatttgttgacctcctggattagcagagataactaccaaagttcctcgcggaggcatcttgataatcttggaggggtttaatgggtacttgatggggagagccatccgcagcacaagtagcatctcctagatacagcagagccataatcgtccctagctttgagaagtcttagaacacgattcgagtaagtggcttccgagtgaagacctctacgtactgatcacggatcttaaccgatacctcaaggtaaatagccatgtcagcttcatatggaaattgacctacctacggttacatctttttttaacacaggataaaatcttgtcccccaatgccaagtcatggtagtgcgcgtacatacctctagacatgcagtttgcctaacatcctgtctagagagtattctgcaaaagtaaaacctttgagcaacacgtgacctttatccaaatggtattaactactgcctttatgcacctaacgatgaagaaggttctccacagttgtattcttttacccttacaatagtcagtagtacaaaatcctaggtgggtgaaaggaatgcccttaccaacctttaagcctataaataccctcattttctatgcataaggggtgaataatttcatacttacagaacatctactaaaattcctattaactttcttcttcttcaagagaaacaaaggaaatacagagctagggtttttattataaacacttgtattacttaaacactcacctcaaaggctaataccatagacttgtggactagggattgttaacacacaaaccacgtaaaaattacatgtttattatttactattttatatctttcttaagctgtatcttattagtttccaaaaatctcggtaaacaccttgtttcagtgattctttgagaccttattcactgatatgtccaagtctgtgatgccatagttgcatattgaattctagttcttttgccatgcttgcttcaccggttgggatttctccttagagaacgtataaatcattgatcttttcacctttcatcactaccaaggaacctttagtgatcctcaagcttccatgcatggacttgtatttgtatccttcatcttcaagcacacccagacatatgaggtttcatctaagctccaggatgttccttacattcgtcagcaccttaattctaccatcatactatttgatggctaccttcttggttcaaatgactctacatgaatgatcattacccattacaactttacctccatcaactaatttataatcaaaaaacgactctcaactcgaacacatgtgataagtgcatccggagtcaagaatccactccctgctcattgaagactccgacataaagaacaagtctccaattgtggagcagtcatcactatcttctgtgattgtagcagaatccttcctgtggtgatgatgttggttgtccttcctatctccattgtgagatttgttgaagccttgttgctccttgtacttcttacaaaatctttgcaagcactacaagaaaggggacctttcatcccacttttt

SEQ ID NO: 297345 - DNA, 4285 bp, Cannabis indica
ggtattcaagttttttttttttttttttattttgactcaatcaaacttcaagtcaactcttagcaattcaaaatatattttaaaccacaacatatattatcttttccctgaatttttattactcatttctgtcttaatctcctcaaaattagatgttagtgagtagtgacagtgaattttcttttggaatctgtataagaaagaactcttatcagcagaagttgaaagtgtcccaagtaaaacagctaaaaaatcttataaactcttgagactaaagattagctaagatggcatctggggaagttaaagaagacaagtaccgtacacatatgtatggagaagcagagaaaaacaccaaatgggtgtatggagttcctcccaactatgatgttgtgaacaagctatttgaagaaggaagaacaaaggtactatatatatatccataataagtacatattatattcattttggtacttataatctgttgtgatcattaaaaattatatgtatatatgtatatggtagatatggccaacagggtcacttgaagagaaagtgcaaaaccttgtgaagacatgggaaatggagatgttccacaagaaaagcactgaggactacaaaactgttgatcaaaacaagtacactgtcagcataaatggtaagtagatttttattattgttcagataagaaattcatgtttgtgtgtcatatgctttgaaaggagaatggaactatatgttataggaaggaaagctttgagtttaaaacaagtggctatgcttgggggaggatacaacaacttattgcagacttccttaccagacagcttgcggtgctacaacccagcagaagaaacagcagattcttctcaccgtgctttcacgaccacctttcctcgaggatttgctgtggaaattcttcatgtctactctggcccacctgttattgtttacaagttccggcactggggttatatggaaggccctttcaagggtcatgcccctactggagaaatggttcaattcattggcatgtccattttcgaggtatctcctactatcccttttctcagtttatcagttatattgtttattgtatccgatcaactgatttggacatggttagcatgataatgttatgtgacaatacaaaatatacacatcatttaagtaattctaggcatgagaaacttacaaatcaaatgagttccttgctgtctgaaattgcagctagatgaacaagagaagattgtgaaggtgcagttcttctatgatcgcggagaactactgggaggtcttttaaagggttcttcaagctcggatagtggtatccttgaagatggagcttcaacttgtcccttaatgaagaaaactgggtagtgttttcagtcaactgaaacaatctgctaaaggaaatcaagctattaaactattattctctgtgtgaagtaataagccttgccacataatgcaattaggcattagcattgtatctgggtctcttgtgtacttccatcaagagctgtaatttctatataaatataaataaaaattctatgggcaacataaaggagcccagttttatagctgcattacagcttaaagagtagactttcattcacatcaatcttggaacaaaagaagtgtttgaatgcacaataatacttcgaattctttaaaggggcttaaactcaaaatttaatatgacacaacagcattattaatgtacatatgaatgacaggttacatagcacaacattctgtgtcttttattatgattttacacagaagtgaattaccatacccccagcctttcatagtgacacaatagtcaaataattcttctccttttggtatatgatacacctaaccaatatttctaatttcttctataattaaagatttgaacccaaaaaaagtaacccaagactccaaaactattgtttttgtttaggttgtagggatcaaaggtaagtaaaagttttactaagcccacggaagggaggctggataaggatcagttccacagtatctgaaaagaccttcaatctcaggacaaccaataggataaggaattgttctgtgaaaaggatcacgccctagtttcttacgaagaagtgatcctctacacccatacgggtcttctttgaactgagttcgcaccagtgcctcgcctttctcagctgctgctcttgcagaggaggtagctggagtgcccaagaagaaaaacctagattccggaaagcctaatgcagatcgatgcagctgtgaaaatctctcagccttaaaatcatagcttaccacctggtaacagaatagtcggtattaagctaagaaaaaaataatgaaaaaaacatcaaagttgcaatgtcccaggttgtaacctagttactgtacaagtgagtcccacaattgctctaagaaatgaaacactcttctataaattaccctaaaatcctatactaacaaaacatgttcacgtcgtctattatcacggtggacatttttcctgctaatgacaaacatatactgcaccatagagcagagaaacgtgtagttcaatcagtcatactctatcttgatatttataatatgagatgtgtcattaggaataacttgatgatcagaacaacttttaaagagaatcaacatttaatatcaaacacaaaacagaaaagggtaagagaagatttcgagtaaattgaacttactgttatgttctgaggataggtgcctgttagttctcggaaccggcacacactgaagagaagattttcaaagctgtcccttgcatgctcttcagtaagtgcccttgatttaatattctctcctttacctaagaattatcaagacaaagaatttccataagaaaataacaggtgtagtaatatggcaccataaaaactcaaattcatagtactaaaacaattaaacagagcagaaaatgcccagtgtgttcactcaacctgtcataaacaaataaagcacaaaacaccacaattctagtcaacaatgaactccacccaaaaatcaataacagtaactcaccaaaccatccttttgattcagcaatagcccaataactctgtgcctcactccttggaccagcatctttcctagtttctccaccactaaacagaagtaaggcattttcatctttggctgcaagttcaactcctccttctatatgagatagaaaagtagcagcttgacctggattcttctgataaggctccaaaaaccaagaattctcctcatcaacttttccacagccattgctagtataaattgaatgcccagcaaccattactaaattttgaagcttgggaaatggatacttatctggttcaacattataactttgataaccattcatcatcttgtaacggctctcataaagagaaaaaactaagaaaactgagactccaagggacaatgatccaagaaaacataaaatggggtggagcttgaaataataatgcaggtgatttcgaatcgaattgatcattttcatgggatgtaaacgtgaattcttatacttgcggactcttttgatggttccagattctagatcaaaatcacctcttgggtatgcactgaaagacttaggagttccagaagacccaaatgaataattgctcattctactgcaaaaatttagctaatgcttcgaaaattgaataaaaaaatcatacccagatcacgatttacacaaacagagaaatgggaatcatgaaatttctgattttggaagattggtaagaggggtagttaatcatatctagttaacaaaataggttaatttaaagtagaaaaaagtaagatctgagaggagagtcgaaggaaagttctgagatttaccgatttgcaggaattagaattggagaaaggaattagatttgaagagtatatcagaaagtttctttctcggaaatattctcacagctccatgagattgaaactctttctctctctctctctctctctctcagggatccatgattttgcaattattttaagattataattaagaaaaaaatcattccataattacatgaatgaatttttcttttctttcattggcagagagaaccctggagctacattcatttaatatatttttcttttaggaaaaaaaagataaatgcagattttttttaatgagaaaaaaaacacagattaaatgagaaattaaatgacgccaaatcatagtacagtagaatctttgttcaagaatactctattcaagaataacttctaatttgttataaaaaaatgaagtccc

SEQ ID NO: 297346 - DNA, 2471 bp, Cannabis indica
ttttcttttatttttcattttaaagatttttctttttctctttttttctttggtttgattttgaatagttcgagaaggaaagactcatacttggtccaaaccaaagtaatgagagattcaaaactatactccttttggttccatgggagtgacagattcccaaacgtgcagtttcgtgattcaaaacaagtacaataacttatcttactcatcccaaaaaggaagaaaaagaaaaacatacaacacaagtaaaatgatgttattctgttaatcatatcatagtatgtaaattttgttttgaatataactcttaattgttgttttagctcatgctctcttgggccttttattgtcaggtattttagtttttgagattttttttttttttgacaatgaagttaccctcaaaaacagcaacaaaattctaaccttttatgggcaattttgatattcttctaactattacaaatattcatacaataaataaaaagatcacagtatatccatatgctaaaaccccatcaactcgattagaacaaatgaccaaaaatacttagtaatgaaccgatattaacagtaagagctcagtggcttactctaattataacatgtatggcctttgacaccttttctttgttttttgtttataaaaagagaaatgagatataacattttcatggcaaaagagcatgtatcattttcttctttcttcattgagatactgttgtttttgttctcatcactaaaaaggccttctggtttttaattctaaaatcagcaatagttagtgcttgaatgaatctaaccaacaataaccaccatagacgattagatactagattaagaaaacctacaattctcaacactaagtcaccagagacgattttcaaccacggcagcaacaatacccttcactgtctcctgcataacattgataaagatcacgaacaatgagttatcaaaattatctaactagtctaattaattcccaaatagttgatcttgaataccacggaatgatctttcaggccaagagcgaggatcaacgacttggtggaaccggaaagactgcaaaagattaaatacaaataccattcaatgatgcatattatgaagaagagaatctctgattcaatcatgttaacataaaacttcagttatatttacctgatctgttctattagctgacgagcgcatactactagcattggctggcaccaaaaggcaacaggttaagaaaaacatcaagagagccatcaaaactatacatatatatataaaacacaacaagtgaaactagcttacctcatctcttttgccaacaataacagacacatcgaaagttggttcggtcaacatcccttcatccttcctgaaagagaaaaatattcaccttaaatgtaaaatccaataacataagggaacttagtgaaagagctgttgttgttattacaaaaggagagtaattttacatacctagctttaagtattgttcccatagttcctatttgagttgcaataacctgagagagcaacccaaatgataaataagatcaacattgatatctaacacatttgaggccttagtgtaaaaacaattgggatctgatacttacaaagaaatgatcatcatagctgcaaatgacaacatctgttttgttaccctgtcaagaacaatgtatccattgagaatttcacaccaagacaatagtataatttaggcaattatacataattgaggcaataagttatcaataaagcaccttaatttccaaagagatgttcttgttggtgacaggaaaacttgggtttgagctcataactaagactttcctttggtaaaataggcttcagaataaactatgaaaaacccacttcaaagaatattagaatagaacaagatgatccacaaatattacaattttcaagcaactgcatatagaaaatcacaaggttgattttgggttttgagtttcttttgacctaatgaatgttgtgacaactatgttcataagcattgagagggaacaatggattaagcataagcagaatataatgagtgagttaattgtgagcagagaattagtacagagtaagaaaccaacaaggtgaaattaagttctgatatagtactaactaaagcaaaataaaaaggaatctgagaaagcatgggactttaagaacataccagagaagaaagcttgtccttccttaatatctgaactcttgtttttggggatgaggttcttcaattcaatggctttatctgtgatcgtcaatggtggaactagggagggttttgggtgaagaagacggtgcagacctcaagagatttaacagcttgggcttgggcttgggcttgggcttggttttgcttagtcaccaaggatgaataatttctagggctatttaacaaaatataggaaaaaaagttaaagttttgatatatatggcatctaaacttaattata

SEQ ID NO: 297347 - DNA, 1049 bp, Cannabis indica
ttgatattgagaattttattaggggcaaaaagtaaaatttcccttttactttaatgaatacatgaaaagccaaattaacaaaatttattcatccccataaataaattttattaatgggaagaaattcatactctttctcttctaacatcaataagaataaagactatccctaaaaagataaaaatcagtttcattacacattttatgcaattttcaatgtattgaacaacaaataaataaaaatgttaattaattatgaataagttagaattttttattggtggcatatgagaaaaaagaaataaaaaataggagaacaaattatacctacaaagctacaagtcacctcacctaatttccccctccctctgaggttaccggcttgtccggttgatcaattctagtaggactgattttgtttgtgtacctaaaatgaaaaaaaacatagattctattttaatagatattaaattaaagtatagactatagactatataatataataatatgaatgactatatacactcattattatcaactagtgagctctttcgtttcattcggttttcgtttcgtgtcgaagtaaggacccgaagctggctcttgggaaagaaaaaaataaaactcttctctggttagtccactcttgcataaataaataataattaataaatggaattgagatttgatacaagatttgtttcagtaaaatgcatgcatgtttttctcttggtttgtttgatttggagtattattatggctgctactgactcgttcttgatcggatcttgagtttttggttttgttcttgtttggtttgtgtgttttggtgttcagatttgagttttaattttcttagtcaaaatgttattttaatttgctactaaacgattttgtttgattatgtggcttgttttgttttctgtttgggtggaaaaaagaatgataacggaactgaatcctttgaatgtttggtttatatctaaatgggtattgctagttttattctatgggggaatttccatggttgaatcttgtttgattatata

SEQ ID NO: 297348 - DNA, 7422 bp, Cannabis indica
atgatgatttatatatatatatatataaaaactttttaatgggtcctatccatttatatatatacacaatattaattaatcaaagatgtttattatgcttttccttgttgccattcctgcatatacaataacactttattattattattattattatggcttctttgcttgcctatgcaataaaataatagcaatctatctgaattattgccctttgcaaattcattcattcattcattcttagtgttatatatatatgatcaattattattattattattatcccagttgcccaaacctataaccctaccatactataaatatataaaaaaatttcatatttgttatgcatatatataccttttattttttcttagtgttttgatttgagctttgagtggcttaaatgatgaccaaaaacttcaatcccacaagggattataatgggttatttcataaatactcaaaaataataaaaagtttacatttttacaaatttacagcttttttataaaaatataaaatattaattttatgttattttcacattgctactacatagaaataagcatgtgaaaaaacagaatttataaaaaggtaaacaaaaatagtataaaaaaagtcaaattttaaatagattgtgtaaattttctaatgtaatatttaagaacaaagaagaaagatgagatcttgatcttgatggtatatatatgtagatgaaatatagaattatatatatgtgtttatatgaatatggctagtacaggaagtaatttaccaaaataaattttgaggacagagaagccattttcaatgattgatgaaagtgtaatatgctatcacctctttcattcaaagcaataaaggactttattactttggttaaagctaaagggcatttttgtcaaaaataaaaaataaagaaacaaagcatcaaactttactctttttttttcctcttctccctctaatctaaactttaaatttctgttatccaacggcctttttcattttcattataatttttaacttcaaaacattttctcattcttctttcttgctttttctttaaagaaagacttgttggctctccacaccattttctcttcttttcccagcaaaaaattttcaatcttgttcaatctcatcttcttctcacatagaaaagaaaagagaaaagagaaaaagcttcaaccttgtatttcaagactcttttttttttcctctttagtaagatgtttgattccttaacacccttatacacacttgaagtttctcatattccactactcactttctttcactttcccggaaaatccattcttgcccaaatgcttaaatcctttcctctttccttagattgcttcaaaatccaattttcttaagccaaaacacaaaaaaaatacaaacatggtctttttctttgtctatacactttactctcttctactcattactacttcttcttcttcttcaacttcttctttggttagtgattttcatgtgttgttaaatctcaaagaaggattcgaattcgccaacccgattttaaactcatggaacccttctttaaagccaagctcaatttgttcctcttgggttggaattacatgttctaaacaaggaagagtagtttcacttgacttaactgatttaagtctaagtggtactatttcacctcaaatttcaaaacttgaccaactcactcacttatctctagctggtaacaacttctcaaacagcattgatgagataacaagtttgagtaaactcaaattcttaaacatctcaaataaccagtttagtggaagcttatcacattggaactactcaacaatctcagacttggaagtttttgatgcttacaacaacaacttcactggtgttcttccaattgggattcttagtttgaagaagaaactcaagtacttggattttgcagggaattatttctttggcaaaatcccaacatgttatggtgagttagttgagttggagtacttgtcattagctggtaatgatcttaatggtaaaatcccaagtgagttaggtaacttaactaacttgaaagagatttacttgggttattacaatgtttttgaaggtggaattccaagtgagtttggtaagttagttaatctagttcacatggacctttccaatagtgaattagatggttcaataccaattgaattgggtaacttgaaagcattagacacactttacttgtatgctaatgtactttcaggctcaatcccaagacaattaggcaacttaacaagcttaatcaatcttgatctctccaacaacgctctcacaggcgaaatcccattcgagtttgttaatctcactaagctcaagctcttcaacttaatgatcaacaagttacatggttcaatacctgattttgtagctgaattgccttatttggagactctttcgctttggatgaacaacttcaccggcgaaattcctaagaaactcggcgaaaatggtaagcttcaaatgcttgatttgtctacaaacaaactcactggtacaatcccaccaaacttgtgttcttccaatcagttaaagattctaattttgttgaaaaactatctttttggaccaatcccatttggcttaggaacttgttttagtcttgttagagttagattgggacaaaactacttgaatggtagtatcccaaatggttttctttacttgcctcaattgaatcttgttgagttacaagaaaacaacttatctggttttttatcagaaaatagtagtaactcatcatccaatccaaccaaattaacccaactcaacctctcaaaaaatctcttatcaggttttataccatcttcaatctcaaatttcacttctcttcaaatccttctccttagtgaaaaccaattctcaggtccaatcccaacttcaataggacaactcactcaagttttaacacttgatttaagccaaaactcactctctggccaaatcccacttgagattggtaactgtcttcatctaactgttcttgacatgagtcaaaacaacctctctggctcaatcccaccacagatttcgaatattcgaatcttgaattaccttaacttgtcaagaaacaatctgaaccaaaacataccaagatcaatagctacaatgaagagtctaacaacagctgatttctccttcaacaatttctctggcaaattacccgaaacaggccaattcgggttcttcaacgcctcatcatttgctggaaatccacaactctgcggttcattgctcaacaacccttgcaacttcacaacaatcgaaaccaaaccccgaaaacaagaaccagatttcaagcttattttcgcgctaggcctactcatatgctccttagttttcgcagcagcagccataatcaaagccaaatctttcaaaagaaacagcgcgaattcatggaaaatgacagcatttcaaaaactggaattcactgtgtttgacatactcgaatgtgtcaaagatgggaatgttataggcagaggaggagctggaattgtctaccatggaaaaatgccaaatggggtcgaaatcgcagtcaaaaaactactggggttcggatcaaacagctgccatgatcacggattcaaagcagaaatccaaacacttgggaaaattagacacagaaacattgttagattgattgctttttgttccaacaaagaaaccaatcttcttgtttatgaatacatgagaaatggaagcttaggtgaagctattcatggaagaaaaaagggtgctcctttcttgaattggaatatgagatataagattgccattgaagctgctaaaggactgtgttatcttcaccatgattgttctcctttgattctccatagagatgtgaaatccaataacattttgcttgattccaactttgaagcacacgtggcggatttcgggcttgccaagttcttgcttgacggcggcgcctccgaatgtatgtcggcgattgctggctcctacggctacattgctcctggtaagtactaattcatattcaaaattctgttttttttgttttgtactctgttttttgttttggttagttatgttagttaattgtttggaaaagtcaaagtcaaagtatagtacggttcactcatcatcttaatcagtctctgccgttggatttgattgtcctttgatgttaaatcatagatactaatatatggccccacattgtatagtaagtttcaaactatcaaacaaaaattcttataataatttctcaaatcaaattattattactattaaactaaaaaattgaataaaactaattaatgaaatttttttgaataatttattatgtctacaattaatttttgtgagtattcaaaatttttcaaaaattaataaaatatcttggtatatgatactctcatctcaaacacataaaattatatagtagggatatcatttttggtacttgaagaaaattaatttttactagtgaaattaatatgacactaaaatgatactcaaaatagatttaaggttgtctctagagaattctaattttggttcatagaaagaaacctaaaaatcatgccctaaaggaacaaacaaaacaataatataagaagaaagtgaaattaagactactcaaaattctgtgccatagtttgagtgaagtcatttttaataagtgtcattttatggggtccacgtcataccatgcatgcatgcaagtgaagaagaaaacctctttattttcaacacagttatatatatgactgacactactgatgtttaacgtaacagtgaaagagttttttgagttttgtgaaagcaaaattaaaaactatggcttttgtttggcttttctaaaggttttttgtgtttaagccaaaactaaagataaagctaaagtgggtttgtttgtttggttttgtgttgttgtttttaagtacttggttttttggcccattcttacgtgtaaagactttgccttttctttacaacttgattttgatgaacttctcctttttgtcgttagaccaactttttttcttttttatttctcaactttagcttttttttcttcttattggacctatcattatggtccaaaattcaaaaatgggctttttcttctttgtagtcaaaacccattttctaacctgtttcttgtcaggtccatcaacacggtccaaaactataaatgggctttctgtcatcaaagcccatattatctcactaaggcctcataatcaactcatgcagggatgcaactcatgtacaaaaaaatagaaaaatagtattcataacatcaaaataataacaaaaaataatatacaaataacacaaaattaagaaaaaaattaataaaagtacaacataaaaatacaataaaaaccgtacaactgtatttttgaaacttttttattattgtttttgtttatttgtgaaataatccttagactaaacttttgttgatttccactactttaggtttttcttattgggcccatcacggtccataattcagaatgggctttttgtgtaatcaaaactaaagaatggcctcataattaacccatgtatgcatgcacttgcactcacgtatacgttggactacttttgttaattttccactactaaggctttctcttattgggcccatcacggtccaaaacacaaatgggctttttcttctataatcaaatcccattatttatttcgaaaaaagccttataattaagttaaccccatgcatgcatgcatgcataaatctacgtacgtaaaaatactaacatactctttaaattgaatgtaatttttgttttatgttcttatacagaatacgcttatacattacgagtagatgaaaagagtgacgtgtacagtttcggggttgtgttactggaactggtgacgggacgacgtccagtaggagatttcggagaaggagtagacatagttcaatggtcaaaaaaagccacaagttgtaaaaaagaagatgttgttcaaatcgttgaccgaaggttgaccgccgtccccgaagacgaagtgactcacttgttcttcattgctactctttgtatacaagagaatagtgtccaacgtccaacaatgagggaagttgttcaaatgttgtctgagttcacagatcgccatagtactactcctcatcatcaccaatcatcatcttcttctaagatcaaatgtgaaaataatgacacaaaaattacttgccctaagtttagacaagatcttttggtttaatatgatataattaattctatatataagaagaaaaaaaagaacgtataatatattaaaaatagcattttttttttattttctaccttaattttaatgattttctagagttgagttaaatgggtgtaatattgttatatagtggcttgtcttttttttttttggttgtacaagaatttgaggggatttattttggtttagatataggaagaaggaagagaagagagacaattgtggtcaattattatattagagttagatattattaattagaattaaaataatgaaatatatatagttttgcacttgttttcaaaacggtgcgttttatatataagtgggaaaaaagaagagcatgaaagctttaatttgggcaagcatggatgcccttttttgtattatatatctttatttaaaaaattagttatttaacactaattgttattttaacaatgtttaaatttttttaattttaatatttaaaataagaaattatattgctagaaattaaaagtttagggattaatttgttagaaaataaaatttaatgacctatactttctaaaacatatttatttggggattaatttgtcaaaatttaagaattaacttatcaaaaactatataattcaagcacttaattacggcttgaaaaaactttttgaatttgattttcagtttaaatacgaagatattttcacttaaatatttcataatcaaattctcatgactcctttttcattcaatctcactttatattaccattctttggagctaaatcactataaagtttctttccgttatttattttatattttgaaaatattaaagtaatttgtagtataaataagtttaattttgaattgtaaataaaattaaatacttaagtttaatttttatcggtaatatatataagttatattttgaaaactctataatgtcaagtcattataagtgtcatttttttattggtatatttaaactaatatttttataaaaaattaaaatttaatgacttggactaagagattaccacgtgactagggtgcacatgggctgggttggctgggttagaggtattttaatacgccaatccaatattgcggtttggataagctataaaccattcaattttttttattgtacaacccaacccta

SEQ ID NO: 297349 - DNA, 2305 bp, Cannabis indica
actattttttaaaacatttatttgaagtctacaacatgtgtttttattattcttatgttttttcttgttcagatattatctttcacttttcttatttttttttttaaaaaaattattattcttttaccagtcaatctaattttttgtatttttggttagtaattattattttttataacttactcatgttttgaaacttattcactaacatgttgtgcttgatttttcaaatctagatttcatatgttttttgtcgttccttttttcttcttgggcgttttttttttcttaaaactagttaccgactgttttgttttctgaatggttactaattactatgaagtttctatttcttttcttcttattcagtaaccaataactttaaagcattgaaaatattggtaattagttactgatatattaataagctattgtttagttgctgtgaagatttttgtttttgctagtctttctgatttagtttataggttactagcttacatattgtctaattactacaaaaattagcgaacaatctatatctcattactgaaaatatagttaccagctacgattaagttactagttaaacaactattatatattaatacattttgtttaattattgtgaagatttttgttttctagtctttatggtttagtttctagattactaatgtttttatagtggctaggggttactagattacctacgtgttgtccaattactaaaaataaaagattagtaagtaccaatgaaaagattagttaattataaattgtgtaatatataaacgtttaaaaaacaaaaaaattaattatgattttactttttatttttactgcaaactaataagggttggcaaaatgttttaattaaaacatgtacactatcaatattatcagcaaagttgatatgatttctttatatgacatcataattaatgagtataaacacttgttatttgcccttaataatgtgactcttaataatgtgactgttatttttattaaacgatctgtaaataaaaaattttaaagatggttgtactattaataggaattctatctctgctaatttattatctttacttttgaaggatgtttgaagttgatctctttctcaaaaaataaataaataaataaataaataaaataactagttactactctgaagaaattgaaagaacttacttagtaactgattactttgctatgatttttagttttaaaaaaaaaataattttaaaaatgaaaattcaaacccaaaaattgattaggattattatggatgaatcttgctatatttttagctagcaagagtaaaatgaagaatgatgggattaacagttagtaagttaccctcttattgagtatggattagattttacttttaggtaaagtttagatgagcatgaatatgaaattattgtaaaacttattggaaagatccatataaaatgttaatgttaaaaggaaatcccatagaaaagctaatttatcaacatcctgcatatttcgaaatggttgctgttttttatggaaaaaatcccccaaagaaagaaacaaaggtagttttgaaaaaatatctcaataaaactacgaactagtgtgatattactcgaaatgggccaatgtgcatgccaaattgtagtctagttaggtaggcctctcatagaaggcccatccaagtttactaagcaaaataaggcgaattttctatttttatggtttttaaagtataagtttgcaaacatataattttttttttctttaaaaaagttattttataagaatttttttaaaaaaaaatttaaaaaataatagaaaaaaaaacatacactagttacttgattacctccttatggtaactggttaccctttggttaccctttggttagccttatctgttttttctataatttttaactttttctttaattttccataaaataatttttttgaaaaaaaaactatatttttgcacaaatataaaaactcataaattttataatcatgttggctaatttacaacggtgttaagtaggggtgcacacagggcagagaatttatagggagtgctctcccagtctccattcccgttaaggattttaatccccatccttgccccatccccacttattccctatcggggatgggacaggaatctcttaataggacggggatggggtgaggaatcccctaatagaaaaataaagtatattttaaaaatttcaatgtataaaattattaaattacctaaaaattaaaatattacacaatatttattattcaatatactaat

SEQ ID NO: 297350 - DNA, 6243 bp, Cannabis indica
tcaattttcccccaaaagtatgctttttagtactatcgcaaatacattgttagacgttgccaaaaaattatattctcttgacaccatcgcaaatatatcctcagacataaaaaatttgtgattttcagaattcagaaaaatgatgtaaatacaggctcagctttttgacggcacgtgcccgactagacacgaaaaattataggctggggcacaacacgatacgatgctacaaattggcacaacatgacacgaaaaatattttcttaagtacaacacgatacgagaagcacgaaaggcacgacacgtaagcacgaatagactaactcaaaaaatacgacacagaacaagttcgaaaagcatgacacgacatattaaaagatattataatttattaataataagatatgaatttatcaattataaataagttaaaataataataaaactaaaatataatactgaatattataattcttaaattaaaactactaaaacatgaaaagttaaaattatatattaatttatttataggatgtgatataaaaatttgagtatttatgattaaatattcaaattctaataatgttaattttttatatgattatctacaaaatattgttcaaaagttatataaatataactaaaactttaaaatatacatataatttagtaattataaaagaaaatatgaaaaagtaaaacacgaatttaagtctgtttaaaaaatacaggccgacacgagtaaaacacgacacaaaaatactagttctacgggccgtgctgagcctactctttaaaaagtcttcttatctgacatgttatttgttagtttgttgtggtgtctttttgtttgaatcatggcgtcgagtagtcaacctacacatgttcttgaagagagttatgcacaaatacaactggatgaagaggaagaagggaactgattgcaggagatttagaggggggtgaactggcatttgatgatcgatggtgtttggtggggaagtttctcacgggtagatcaattgattttgatgcaatgagacatatgatgacttcgttatggcatccaggtaagggagtgtatatcaaagaattggatactaacttgtatatatttcaattttatcatgaatttgatatacaaggtgttatagacagtagcccatggacttttaataagtttccattggtgtttcatcggtttaaacgtggtgaaagttcaaagcagttcatttgcataaactggacatgtgggtgaaaatccacgatttgagaacatagttcatgatgggtaaggtggtaaggagtgcaaggggctatattgagacctatgtcaaaatcagattctaaaaacttcaatggcatttggagagaatacctatgggtgcttgctactgttgatgttgagaagcccttaaagcgtcgaatgaagctgtgtaaggagaatggagagtggatttgggccatgttcaagtacgagcatctctctaccttctatttcatctgcggtatcattagccattcggaacgattttgtactaaacgttttaatcaagatgtggatcaaattgtcaaaccttatggtatcggaatgagagcacagatgagaaagaaaaattatcttattggtgcacaatgactgcgaacagggaacgaagaaactctgatggtgataggtggtgaaacttgccagcgggatggttcagatggaggggtagctaacattgctagaattatggaaattgattccacaatttctagcagagatgggggctctgaaagtttaggaaagaaaatcgatgggagtaatggtggacatattgattttgatactcaatcggggtatgatggagggattaaagtcattgacaaaagtcaatgcaaaagataaagaattaactcttattttggaaacaaaaaggaggcgtatggagatggaaagtattaaagaaagaggtgaggtggtagttgttattggtttggttatggactaaacatgtgttgtaggtgatgggtcaaaaaagttgagcaaggtgggtcttggatcacaggcctaccgaacattatgagcattttatcttggaatttccatggccttgggaacccatgggcttttcctttcattaaggaccttgtggtccaaaagaaaccgaactttatttttttgtgtgagacattgtcaagaagagatgttgttgaaaagttttgggtgtctattgggtttgagggtgcgatttctgttgatgttcaaggtaagagtgggggtgttgcattgttatggcgagttaatgaagacgttcatttgcttggctattggatccaactacgttgatgtctccattaaaggaagtgaccgtgggaagtggaggcttactggtctatatggggaatcaaatagaaacttgaggagaagaacttagaaatttaatccgtaatttgagagaggagtacgatttgccgtggtgcattataggtgattccaataatgttacttcttaacaagataagtaagggggtaattggtacccaaattggttgattaatggcttatgtgaagtgttggaggagtgtgggctccatgatttagagctgaatggttacccatatacttaggagcgtagctgtggtacgaatgactgggttaaagtttggattgatagagctcttgtttctcaacaatggcttgatatatttcctactgtcaagctcttcaatttagaggtgtctacctctgaccattgccctcttcttttgatccctatgaattcagttactgttgttagacaaaatgtcttcaggtttgagaattcttggttgaaagaacccctttgcttcaaggtctttgaagacacttggaatctatttttgggaagcactattatagagaaggttaaaaactgtggtgctgtgttatttgaatggggaaaagactattcgggtaattttaaacaaagaattcaagattgtaaagctgaaattcaccactgaaagaggggatgagatcctgtgtccgtagcaagttataaagaagtagaggtaaaactgagtaatatcttacttcaacgtgagatattttggaaataaagaagtaagcagctatggcttcgtgaaggggatcaaaattcaaagtacttctatgggaaggctacctcgagaagaagaaacaattctatacagagattaaaaaattcggagggatcgtgggtgggataggaagatcaaccttcaattgtgacagattattttcaacagctttttgaggcagctgatgtcgattacagtggagtggtggagtgtaccctacgataatttttgaggagcaaaatgcaaagctgcttgaacatgttattgtcgatgaggtgaaacacgcgttgttttaaatgcatctcgacaggttgcttgaacctgacggtatgactctaggattctaccagaaattttagaatgttgtaggtgaagatgttgtgtcattattgaggacgttctttacaacgggtgtgtttcctaaatctttaaatgaaactaatattgtgttgatttttaagaaaaaattgcatgagtgtatgggtgatctctgtcctatatctctttgcaatgttctttacaaagttatctcaaaagttattgctaataggttgaaagttactttgacatatgtcatttcaaatacgcaaagtacttttttacctagtcgtttgatttctgataatattataatttcttacgagataatgcattatttgaagagaaagagaatgggaaagcaggattttatggcacttaaactcgatatgagtaaagcttatgatcgagttggttgggcatttcttgaggctatgatgatccgtatggggtttagcaggcatatagtttcattgattattttctgtgttactatggtgagctataatgtgacttatgggggggatgtcatgggccctataactctgggaagaggaattagacaaggagatccactatctccttatctttttctggtttgtgccgaaaggtttatcctctttgttgaaactttatgagcaaaatcactggttcacgggctgtgaagtggctagaggttctccaagagtttcacatatactatttgctgatgatagctatgtgtattgcaaggcaaataaaaatgaagcttcaaatattttacatctccttcatgtgtatgaaatggcatcgggacaacaagttaactatacaaagtcaatatttttgagcaaaaatattgttgttgttgagcggtctaggatgtgcgagatgttgggcatggtggaagctttggataatagcttttatttaggtttgcgttggataatgggaggaaataaaaatgcagttcttggctttcttaaagataaaaagcagaaaaagatttttagttgggagagccaatttctgtcaaaagcgggaaagaaagttttgttgaaatcagttgcccaagctttgccttgttatgctatgagtatatttctactcacaaaagaaatttgctctagtcttgaaagaatgatgtcgaaattttggtggaaatctcaattaagatcagctaataaaagggtgagttgggtgagctggaatcatctttaccgatagaaacatgttcgaggaattggattttggaatctacgtgactataaccttgcttttctaggtatacaaggttggaggttgttgactaatgaagattctttagtaagtaaaatttataaagctagatattatcctttgggtagttacctcaatgctaccttaggaaaaagtcttagctttatttggcgaagtctttttgaagcccaggatttggttcggacaggggttagaagatcaattggcagtggaaaatcagtgagtattttacatgatccttggttgcccgatttggataacccttatgttactttgagtcatcctagtttggataattggatggtgttcaatctgttctcagtgggcacaaaaagttgggatttggaggtggttaatgatttgtttaggaaaagagatagggacttgattgtactaatttagccgagtgatacagttgagagagatgagtggtattggaacaaagaagcttctggattttatactgtgaaaagtgtgtacaaatttctataggggagtaataatgctgctactattggggaggatcgagaaggatggaagacattatggcagctggctgttcctccaaaaatttatcattttatggcgtgctattttgggatgccttcctacaaaggtacaattaagtattaagcatgtaaatattgatcgtatgtgtctgttttgtaatacggctctcgagactatccatcatgttcttcttgagtgtggttatgcttaatcttgttggaatttgtcaattataaccatggatggtttagtgagtactgattatagcagctagttttttgagtttgccgaaattagaagtgctgctattgtgatggaagttgccatggccagttgaaagatttggatagctagaaatgatattttgtggaagaattgatcttgttcagcgttggaggtggttcggtcagctagagttattcttgactaatggactaatgctcaatcacaaaagacatgtgcattgttagttgacgatattaacaatgttagtgagcaatggaggaaaccaatgtggcatatggtcaagagttgacggagctatttttgaagcatagtataagttcggttttgggtgtgtggcccgtgattctaacggctgtctgatcaaggctctctctgcaagtcgtgttagtttggtccaacctaaagttgcaaaaataattgggatcaaagaagcactaagttggataaaaagaaagcaatgggctaatgtgatagtcgaaactgatgcgttggtagtggttcaagctattaaaagctttattgaaatgccttctcaatttggattattagctcgagattgtcatgtgttaatctcttcgttaagcaacgtgtctttagcttttgttaaatgatttgcaaataaggtcgctcattgtgttgctagagggtcttattttttgccaaattgtacttttagtgaacttgatgttcttcctgttttataatctattgtatcaattgaatgcctttgaataaaaattactttgattcaaaaaaaaaatagagcttttgattgtgtaataaataaatttattgaggtcagttgtaatatcccggaaaataaataatatttaaatagacatattt

SEQ ID NO: 297351 - DNA, 1704 bp, Cannabis indica
aaaaaaatcgattataaactaaactactaatacataaactaatacaaaactacttacataaactaatgcaggttccacaacaaaaggaattaaaacaaataatacagaataactcaaaccgattataattaaaataaaaccagttatataaaattaaagagaaaatcagttcctaaaacactgaaatataaattaaaaacaaaattagttccacaacaaaatacctcagaacacatagtacttcataaaacccgttataattttttaaaataaaaaagtggagatcaattctaaaaaatattgagtcataaatataaaaagaaccaggttcataacaaaataaataaatacaaataataacacataataactcaaatataatataaagaaactagttatatttatcaactagttaaaaaaaaaacaaaaagaaaaaaaaacaattattccaaaactaaactatcaatgaaagcaacccaaagatcatcattcataccttgctggaagaatcattagaatcctccatgcaacacttcagacattctgctaccagttttgcaattaaatttgacgtttttagaaatatgcaaaatattggacataagttatacaagtctctatgctaatgagaacactggcttaagaagcaattaagaatctgcaatatctccatgcttcttataatccgagctcgcaaggtatatatactttgattgatcttattacctatatatatttttataattattttaagacattacaaatgtgcaataactatatatttgattatatatgtgtagcatagtgctatgttattattattgattaactttgcattatctacgggccattttacacagtttaaaatcttacaacagcagttgaagaatcttcagagaaagagaagttttattattagtgtccatataatttttcatagatttgtaatgaaataatcttggctaaagttgatgagatcatgtgttttgaactgtatatatagaaacaaatattggagcaagataatgagcacatttttcatttgatgagagtagatatttctaattatatatatgtatatattatagacatttacaggtgattaattataacttataatataaattatataaaataaaaatagataaaagagcaccaagcaacagtagcagcaacttatgaggagcagaatcaagtatatgtgacaaagatagaagatgtagagagaatgggaatgaataatattggacacaaattacacaagtctatatgctgatgaaaatactggctcaataagcaattagaaatctacaatatcttttaaagccagacatacattcttacaattaaatgcctaacttctcaaactttagttctattgttctacaactcatgctgatcccaaaccaaaaccaacatttataaatcataaggatatgatttcttactaatttaagtttgtcttctaaaaattttctatctttgtttcacctgtctttaaattttatgataaatgttaagatttataaaacactcaaagaaatatataaatcacagatctaaacatattcctaaaggtgctttaatatagaaaaccctaaatcataaatctataaagcctttgctaaattaaagaagaagaagatgataaattatgagcggaagcactaacctgaagccattgttggagattgcagagaaggt

SEQ ID NO: 297352 - DNA, 3222 bp, Cannabis indica
cattcttttaaataactattacacttagtttttttttgttttttttttttttttttaaataacctcaaaaatttcaataatttgaaagaacaatgttgatagtatgagaattcacctctcaaaaattataaaatccaaaaacagaattagaaagtctccaattagcaatgtcatgggcagccatgtttgccttcctagatgttaagaaccaacttacagtgtgacggcttgtgctactgatgtagagaatcatttcttcaattattggattctagtatattcgttgtatgagagaaagtgtaccatcctttctgtataagccagttggcacatttctattgattataatattcttctgttttgctataaatgaaagggtcgagctcatagtaaaataagctgagatttatcaatttcattttgtttaaaaattaaaattggtatcagagccaagatcgtcatttacaatgttgacagaccaatctcaaactccaccacctgttactccgaccaacaaccagagacctagaaatcccattcatgcaactcctgcatcagctggagcaagaccctataccagccatggaaacaatccagccatcaattatacccaaccgttcaacactcttaagcaaccattttcactcaagttggatcggaataactacacattgtggaaaactatggtttctacaatcattagagggcatagacttgatggtttcatcaatggtagttgtgtgtgtccccctgagctcataacagttgagattgcaacaccaaaaggctaatctaaatttgagctacaccaaaatctagactatgagcagtggattgttagtgatcagctactcatgggttggatctatagctctacgactgaaaccatagccactgaggtagtgggatgtggctcatcaagagctctttggaatgctttggagaatctgtatggtgcacactcaagggccaagctagatgataccagaactcttatttagacaactaagaaaggtaacacctctatgtctgaatacttaaggcaaaagaaaatgtagtttgatagtttggctctagctggtgaccctaaccctgaaagtcatctaatctctaatgttacttctggtttgggtgttgagtacttacccatatttgttcaaattgaaagaactcatatgtcacgggaggaattgcaggatactttgctgagctttgacagcaaacttgagagattacaagtctcagggcacaccaaattgacagatcaaggaactaatggctctacctatggtccttctgctaatcttgctgcaaaaccaacaggacagtcacagggaagagacagaggtcagttctttccacatcaggaaaatctaggtggttatggtcataacaatggtagggaggtggttcaagaggcagaggaagaggaaggtttagcaactctaagccaacttgccaagtgtctgacaagtatggccactctgcagcctattgctacaataggtatgatgaagcttacatgggtcaagatccaaatgttcattagacttctcaaataggaggaggtcacactgtctttgttgcttcccttgaggtagtggatagtgatgtttagtatgcagattcaagtgctagcaaccacatcacttcagcagtaaacccaaaaaatagagtatggtggtaaggaaaaattaaacaataggtgatggtaatcaaatcaatatctcacttattggatctggctctttacagactgaatctgattttcctttggtgctaaatgcactgttacatgtacttaaaattgctaaaaatcttatcattgtgtctaaattaatccgtgacaataatgtcttttgttgaatttcactctaattgttgttttgtgaagaacaaagtaacaaggaaagtggtgctttaagggactcttagagatggattgtaccaactcaacactccagcagtcaagtcgaattcccatttcatttcaagtcatcaaaccagtagccctaagttgataggagttcctgttttacaaaaagaaaagttattcatattcccagtaatgaatcaatactttccaaaaatgatgtgtggcataggagattaggccatccttcagctagaatcttaaaacatgttttaatctcatctaatgtacttgttttaagtaatgaagctttacatttctcatgtcaatttagaaagtctcatgctcttccatttaagatgtaaaattctagagcaactagagtcctagagctaatccacacagatctttggggaccatccccaattgcttccaatataaatttcattcattttcttaatgacttcagtaggtacacatggttgtatccactgaaaataagagatgaagcccttgatgctttcattcaatttaaaggtttagctaaaaactaatttaataggaagattaaatctcttaggacagattcaggtggtgaatttcaagactttgctagcattgtcaaaactaatgccattgactttcagcaaccttgtcctcataccttagctcaaaatggaagagctgagagaaaacacaggcacatagtagacatgggcctaactctcttggcacaattctgggttgatgcatttcagatagcagtctatcttatcaatagactgtcaactcctattttgcaactcaaatctccctttgagaccttattccttaacaaaccagactattccttgtttaaagtttttggtttagcttgcttcccttgtattagaccctaccaaagacacaaatttcagtttcattcactcaagtgtgaaaattgtgggtacaacacaactcataaaggatataagtgtcttagttccacagggagaatatacatttcaagaaatgtaacattcaatgaaactgagtttccttttaaacatgggtttctaaaaaactatgccccagaaaaacaagtaataatacataatgcagcttggcctaacttgccttttgtgcctttcactcgattcactcagaacaacaactctaattctattggtacagttcccccatttgattttcctacagccacggaagcatcatcttccatcaaacacaaagatctcctcactggtgaacaagaggtgagtgaccatgatcaccctttaacagaacaaatgcatgacactagtgttgggttttgtgccctaaataaaaccctttacaatctgattagttat

SEQ ID NO: 297353 - DNA, 5518 bp, Cannabis indica
gcataatgttcctacagaaaaattcatcacaagatgatatgcatcacatggaaaagtcccaatatatttggccccaacatatgctcaagtgaacggtagttaatcactattaaaattggtcaatgagacaaggaaataacaaaggccaagtatatgatcctgctttattgagtatttttttcagcatgatctgtcagacaagctctaggataaatgtattaggaaaactatatggatgaaacttctttgtaggctttagacaagttattgtcttagagtagtaccttcatccttatggttgcaatcttgtgaaaagtttctactgaaattttgcacaagacctctatctaatgcgctagcctaaattaggaccaatccaggatatgagtatatgacattgcaatggaaccaaccaagtttggcaccctcctgaacaccaaattatatgttgtcatatgtgtttgcgttcgattacctaaaatcttatcaaagtgctttaaaagttttagccttcacatgacatctctgtgcagatgtctagttcccacaatttgataaatgaaaggctgacaatggaaatccatgagatggccatctagggttcatctcaaatagatactttactatttatttgttttactaaattgacttgagagagcctaatcactgcacaacatgaacaaataaaatgtacaccgccgacctactttttatccaaactatctcatatggttgcctgaatactttttctccttctgttagtatattcacatgtgttgtgattaaacaacactaactcaaacaaacacagtgatcaaacacattataatcaagttagctaaaatgaacagaaattaaactcaatcaaaaacagagaataaaagagaaaaacacaagaaatttatcctggttcggatctcaatttgagtcctactccagctctcccccaaggagtttctccactatgaatcaacttgttacaaacaccaattgatgtactgaatcactaagaacaatctaagacactttggctcttcaacactcaattcatgagctcttcaacccatcacgacaccatgaacttcagccaattcttcaagtctaaatcttcttactctctctcttactcgagctgaaaagctctcctctcattctctctctctctctctctctgagtctcattttcttgtgtagaatgataagaatatggagccttatatagagttagttgctgacaattccagcacactaacagctcaatcaactaacacctaacttaacagaatttccttttaaagattcaattataactgtaactgtaaaaatagttaacaacagtttggagaaaaccaacaaaagttgagttttcaatggattataaaccacaacatgagataacctaagccattttacagaattaagaagtaaaaaatataagccacaaacttaaaacttatctccaaaattgattaaatacaagtaatgtaaccaatatttgcatcaaaataattagagaaagaggataaacttcattccgtattaaattgcagcagaaccaaaagaggaaaatgaaacacaaaccttaaatgagcaactgttaccaaagcctacaactgatgcatgatcaaataatgttaaaacacatattttcaagtattcttcatacagtaagcgcccaaaaaattgtaagactgccaaagtggcaatgaaatggaaattgttgatagagaatgcatgtagagctatcatgtatatttataccacacctagaatctccctaataaatataattttaaccccccaaggcattttcaacagtaatgcaacttaagatttagaaaagctgtaccttaggaggaagaagacttcctgctttttcacatcccatagtgtctactggtgcatcttctgaggacctcatattgcgaatcccctcaaggacctgctgccagttattaggtgctacacctgtgtcaaattaaccgacttttagtcccacaaagagctaattttcttggaaatgcaaacaagtaaacagctaaggtttctatattttattaatatagccaagtacatagaaaaaaagagaggagagagagagagagagagagagagagagaataaaacacacacatgatcctaaccaatagagctaatctcgatgggcaaacaactaaaaaataccgatcaatacttagttatatacctaatttgggctatttacgtaaataaattaaaaaaaaaataaaggcaatgtaagtttccttattatagaattacagttagaataaaaaacaatgtaagtttcgttggtaggtatagttacagttacagttagtagatctatatagggaatgcaatccctctaacaaattgaaactaataatacacttgttttctcacccaacttgccataatattcttatgatgatatatgaggctacgaaatgtgagcaaatctacaccacagaaagatgacatcaattaaataattatgttttgaaaattcttccacatatggctatattgattttaaattaggattttaatgttttcaataccccatgctactcaatcacgagtcaataaggtggtaatttgataataaactattctttcttcattagatgtttcttcacatgatatcatagtactaacaacaaaaatgttagccaaaatattaacggcgtcaaacaacaaacaactactagataagtaacctagcaaattcatatatccaagtgcagaattcataaaaccaattcagcattaagtacaccagtactaggattcaaggagtgatatagcaaacttaatacgtgtcagttagtatagaaggaaaatagtttcaaacagattaacattattctcaatctgcatactttcagtgtacttcacaaattaactaataataacacttcctgcatgagacttacaaaagatgcttctcataaaacagtaagtttttttcttccgtcaacacaagatttgaaataataatacataactcttcataaaccaattaagtgagataaacagtaaaacgattcacatctcctcatacaagttccaaaattctatttgcagtcataaatttaagctaaggctgattcagcatttacctcttggctgaactctcgatacttcagcttccatcacaatcacatcagatgcaccttcagactttcctgaagcaatgacaattgaaagtaataaataaataaggtttctggaaaagaactgatctaaatgcacttttgagtctgcactagccgataattatggactattgtggatgagtgcatatcagcacacaaacacatgtcctagaaaaaagacagagaaagctttctacaataacatgtcatatcataccatgaagttcatcgttcaaaaaatgaaaaatataaaaaagacatgtcatatcatgaaatacgatgatcatatatcatcgtacttgaagatgataacttatcatctttcgtaatttgtcccactgtaatagaattttcgtttcttgtccaaaagaaatcatatcacacaagtttcttcggaaaaatgaaaatcatatcacacaagtaaagcaaggcaagcaacatagactgtgaacgataaagaaaactcacagaataaacaagtattacccttctatataaagacccaagtgacaaatttatcaatatacacagaaaatatatgtttatatatatgtgtgtgcgcgcgcatatacttaaacacattcttttgtatacaaaataatactcggtgttaaggttttactggtaaaagattcacttcaacgaatgatttaaatgaaaaaaaggaagtatctttaaagagtataactaacaccatggggataagaatatatcatgtaacgaatccgatccaaataattaatgctgccaatcccataaatctaaaatgaagatattcatatcaatcacttaattgggataaactagttcaatatctatcttttcaacaataagcctaaaaatatacaagttattataggccaaaaacttacagagccaaacaaatttcttgaagggattcctaggaaaataaaactcaagaagctcttaaacaatctttccaatctcgttactttaaacttaagtgtcaataagaaaaaggcaactgtgaaaaatagttaccgagtatccaaatagcagagaatcaaaattcatcaaattacacatttgaaaacttactctgagagacagatcctttcgttttcttgtatgcaaattcttcaatgtccggtaggacagaaagctgttcacatgaagctggtggtcatatcagcagtgatagcattgttgaaatttaattttatcaattacaacaaaccttggtatatatagcataaagcacacaacttaatatataagtatatatataacagtcagaattctggtaataagaaatcacacaagcaaaatgaaacccaactttcaaaaagttataagagaaatccgagcacatgaaatgcagtaactaactaacaaatgaaaagtagaacaaaatatctttatccaatcaccaaatcaatatcatggggttatggcttggtagcaggcaagccaaagctgagataaaccccgaatttcaaaattaaataaaaaaaaaaaaatcattttttttcccttacatcagttgtttcgagtagtgtctctttgaatttcttttttctcctggagaacacacgaagttctgggggcgagacgccattgaacgacttagaacctgaaatgttacgtttgggcacaaataaataaaggtacagacatatatattgaagcaagaagaagaagaagaagaaaggttatggtgagaggacctgggtttggatttgggtttgggtttgggtctgttttggaagagaagttggtttggttggacattctgattctacataaagatctcagtcccaaattcaacgccattctttcttccactttctttctctctttaaataacgatcaccatgcttccctttcccgctaaattttggtttctgtgcctttcttccttatattattattattatatattattagggtttatgtgtgcctcattaatcaagcgtttggtattttacttttttttttttcaagcaatgaataaaggaagaaattttatagtcaatataagttttgtacttgttaggaatttttaccaattatgatttatatactataatgtctctaaatttttaagtctgtcagttgtaaacaacagttgctcattttatcgatgatgaattaataccaaaaagttttgtttttgagttggtgagcttcattctctctctcaactccattggtaatatacaatttattttagggtaaataccattttggacactctgttttacaaaagttactaattggaccctgtgttttgttaaatgacaaaatggaccctgtattttctaaatagtacaataagaccctgaatttgattttttgtcaaaataaagtttaattataatctgatctaaaagtgctat

SEQ ID NO: 297354 - DNA, 5224 bp, Cannabis indica
tcgtctataagagtggttatgtgccaacatgaattatcctacatgtaaataaatatacatatgtcaagttcatattagtccaaataattatacatattcaaatatcattaaaagaaaatccaaaaataactaaaataattaaaattattaaaaatatacatatttttaaaaatctctcccataacttattttctttaggtaactttccaccaaaacaaggacaacgtttagaaaccaaaaaacgacatcgtttctatagaaatagaaaacgacatctccttcgttcaaattattcagtttcctcttgcctcctcaaaaatccccaaccccgaaacgcaaagcaaaaagaactctttccagggagacctcttctcgcgcaagtgagtgatcagtgattttccttgtttgggatcctagaaagttgcattctttatagatttttctctttcggaaggaaaacaaaaagtttttctcttttcagtcaccaatggagttctgcccgacttgtgggaacatgctgcaattcgagctgccccatatgggacgcgctgctagattctactgcccgacctgcccttacgtatgctacttagagaacagggtaataatatggcaagtctcaccgtttgaattgtttttgtataagggaatgaatgaatgatgttgttgcaattgtgaagaactatttattagtttgagaattgggtttttgtgttttttttggcaggttaagataaagagaaagcagcacttggtcaagaaagatattgaacctattttctcccaagatgacttgaagaatgcccccaaagctgaaggtttgttgaattgttggcattgcttgttttaatttaattttcatatttctattgggattactcactgttgggattttgatattcaattcgtacaccagataaacatgttgaaataagtcatttactaaatcaaaaacccaaaatcctaaaagatcgttcagagttattgtttagaaaagttttgattatcgaggatctaaatgtgtttacgtttttatctaattattcaaaacatcagcttggtgttgttttgtgtcactactttatcttttttgcttggtaaggttggtattgtaagctctgacctgtatttggacctgattcttttaggctataacttatataattagttgagaaaatgattggtatcaaaagtagaagcttagcttggtatttgacattaagagtaaatatcaatagggatggttaatggtttgatcacgtgtggcaaaatcaatccttctgtgataatttaatagatgttttagttggtgcattagtaaactaaggagtaaatgagaaagaatctatggcctgttatttgtggaaggggatagaatgggttggaaaactacaattcttgatggtttgattaggtgaaggtttagtaaacttttacaaggtaaggcttcccctgttggccttagttaccatgtcgttttatccacccctaactaatcttggcatgggattttcaatttaattgttaaaacatagtgaacaatatttgtgttattgttagatgaaaaaattatgcagttggttttgttgatgatttcatcttaccataaaaaatgacttactttgttggcagtatcttgtccgaaatgtggtcatggaatggctgcgtacaagacaatgcaaactcgatctgctgatgagccagagacaatactttacgcttgcttgggtgattactgcaggaatacttggcgtgaataaggctctcttcatgccaatatgatttcatttttaaaggagaattttgatgtgtttttttcttcttgccatggtactacttcagttgcaccaattttgacctctgtcttgtgacatttttaggatgttctttaaactgtatcaacatagtgttagtgtgtactttatcttttgtttcttacgaacagcttttttcctccttgtggtctaataccaactctgtttgttcctcgtattattttccttactgtgttgagatcaaaaagttatgatggcttaacaatgcatttctttctaacgaaagatttgactcaaaagggtcatttattctaaacttgtcatttatgtacaccatagttacatatatatatttcaataaaaaaatgatttaaagattcgatgaaagttataattggttctgctactaccacatctttatatttcatgaaagaaaaaaaccaccaacaagatttaatctaggtaatcatttcatttccacactattaaacatagattagtgaaggaggaaattaaaaaaaacaaaaaatacccaaaaccagagagaacaagaatatgcacaattatgggatgtatgtaatgggagagaggatttcaacatgcccccaactgatgacccgccagcctcttcttttcagcccatctttttctagtctcctccaatgcttcctccttcatcttagaaagctcttgaaaccactgctcatattgttcctcaatggaagctaattccatctgaagctcaacatctggacctttatctgctaagcatattgatttacagctgcttgttgagcttttagaatgagatctacatattagatctggcaactgtaactccaagttcttcatatgtttgttaactgggacaaagatgccagcgccggtggtatctccttgcaatttattgtcaccagaatatgaatccgggtgttctaattctgagccacaccaacctaagccttcacagcatccattgttattgcagttagccaactcatctattttaacatcacttgttgaagcatcttcatccagtaccttggaagcaactgatactattgaaggttgatctacaaaataaaccacattatgagattaggctttgcacaactgggaatttctgcatacaggttactgagtagattaccttcaataattccattggaacctattggcccagacgagggattattaaaggaaggcttccaaccaggtacaagcttgagtatcaagtcatcaatcaactcggcaatgaaagccacattatgatctgctaactcaagttgttcaaccatttcacccgctactgaaattgccgtatcagtgttgaggtaaaagagaaaatgtatattcctaactcgacctgtaacaatcataagacaggaaaaacagtcaaaattgcacatgcgtatgcccacttctggcaccatttactctctaaaatttgcctcttaccggaaaaatcagatatacgcaaggtcaatgatactgagttgtcatcatttaactttcctctcaacctaaattcatgccttgtatttgtcttaggaactccaagactgaactttcagggctactcaagttgctctctgtgccggtgctttcataatgctgcttataatcaggatctatgtccatcgtcgaaggaccagattttaagtttaatcctttgaaacttttataggttagcagtactggatcacgggttaattcctttggattttcaacttgaaggaatggatccttgagaagctcctttgcagaaaatctctcagcagctggaactatgcacttctcaacaaaatccttgatttggggatcactcaccttgcgaagagcagcaggcttaatgccctgtatataatattataacaatatcaaatcattagtatatggccacatgctaggagataaaagctagctgataatggttaaacttactgtggtaaccttcttatagatttgagctggatttttgcattcactatatggatagtcacaagtaaccatctctaacatgcacatcccaaaagagtatatgtcgacaagttcattatatttctcctcatagagctcaggagccataaattcaggagttcctaaagtaagggaggacaaacttagcatatcatcgataagtttaggcatccaaagacatgagaaaggttgttagagttaccaatgacactttgagcagtaggctgctgcaagacaattgccaatccaagatctccaattttaacttcaccatgattaccattaacaaatatattgtcacattttaagtccctgtgaataataggtgggttatggctatgaagatacaccaaaccacggagtatttgtctagcccagttctttatagccttcacatcgatgtttttgtgaatcttgcggtatctgaaaaccgagaagtggtactgaaatttcaatttcaaacagtaattgcagccaaaacatcaacaagaatgacaaagaatcagaagaacatactgtcttagattcccagatgtgaaaagctcagtaatcatgttaatagttttgtgttcatcatccacccaggaatgatataacttgatgatattctcatgtttcagtgatttcaagagatgaacttcagagtacagcttctccaaatcctcaggtgaccgcaaaacatcattaatcttcacttgattccaagccacttctattccatcaacttcatcaaatgccttatagctgtacagtcaaataaggaacgaagcaggaccattattattgaaattcactaacaatttctagctagaagaaatcctagtggccaagcaatagtaaagaaaaaacatggaaaaaacaaaaggaagaaagtgttggagcgtacacggtcttaaaggcgcccttccccaatatttcattgtactgtgaccaatttaagaacaaacaaacaaaaagcaaataaaaaatcaactacagaaaaaacaaacaaaacaaaacaagatttctagatgcagagaaatgaactatcaccttttcctcattctacttagatttataaaaacaaacaaccatgatagaaaaaccagcagttaagagcaattcacgtgacaaaatcatgcacattttgaatggtataacactataaaacgatgaacaaaatagagaatggacaagaaacaacaatgcacattttgctctgttaatatcgacttacatatttctacatgaaatcattagaatgccaaaaccataatctactggtataatgaacacgatagaaattataatgatgcatttacccgactatatcgattggtgggatctttctctataaaaccagcctctacatctggagtccccattattccaaacgttccattacttgcttgtaacgccaaaccaaaccctgtattcatttcctgctaagaaaccaaaaactcccacaaaaggaaaagaaaagaaaaaca

SEQ ID NO: 297355 - DNA, 1984 bp, Cannabis indica
ttttttaaaaacaattttctgtttttaaaaacaaaaaacagtttttaagttatgatgccaaacatgtactaagtttttgatttgttttgtcggtgtgtgttgccacgtcagtttttgaaggaattagcttgtctttttttcaatgaaagttatccaccaatttcattgcttgggacccacttacacccaatacttagtttagctttgctactgggacccacccatgttataattatctgaaatcgtaaactgattcgcagtcggatcatccaattaaaaaattacacgtcatctctgaacagaagatctaagtatttctttcgcttcattttattgacgaaagctcaccaagctccgtacattctgaaaccttttagccgtttatttcctttatttcttattcttttaaaaaaaatatatttaatggagtttaattaagaaatagcaaaataaaaaaaagagagaaaatttgattattagctcaatatgcatggatttgacaaaattgccgctgattatggtgacgtggcggatgtttacaggtttggaattttaaatgtcggaaaccaaaaaaaattattacatatattatataatatcctacaatacaagaacaagagtgcttcaaattataactatcattttttttttggataattgaattgaataataaggaaagtagggacacagaagaataccgaacattatataagtcaaataattacaagagtagaggctttagaaaaaactagtaccccattttttttatttaaatattcattaattaaagaattgaagaaaaaaaaaaaaagaagagcgagaggacaggtgttgtattaatttgacactacaaccataaatattaaaacagtataaaaccaagtagtgtacgtgggactatatatgtagtatatataaaattaaagaaaaaagatgataaggaaaaatgtgttaagcggtttagtgaaaactacactgaaaccacaggaaggtaagagtggtggtaatcattgtttttctagagagagagagagagtggcattatcaaattaaaaaaaaagagagatttgcataatccagtagtagactcataaatagtaaaaagtaaaagaggaaggtggagtggaacatgtgaaaaagaagtgaagtttccacctctcattctcatataaaaagggcctttgcccattgctctcttcacctcatcacctcattcatttcccttcatttctttccttcattgcgttcaacctgtttttagagatccattttcttccattctttctttctttcatttcatttttatattctcatcactaaagccagttccatattttccttcttctacctcctaaggtaaacacttctctttctctttcatctcaactagataatagaattttagtgcaaaatgctctgttttattgttttttatattttcccatttaattaatattataatgctcttaatgtatatatatatatatagagagagagagagagatattacattttattttctagacttgaaacttgggtagtttaatattttcggtctattcacggataggaatcttcctatgggtgaccgaatagcccaatattgatattttaataagagtattgttagcgttcggagtctctactgcctctaaatatgttatttttaagattaattaataatattctctaccacctctaaagttattacataatattttatatttaattaaaccaataataatattaatatataagaaagtgataagtaccacatttctctttaaataatgtatatttggttccagtcatcgtcatttttcttatatatatatttagttacttttatttttcttaggtagtttgacatttacagtggaataaaatggatgcaacatacaaagtaatgtataacaaatacaaatattttgtacataccaaagttacatcattaggtgtacattattattattattattactat

SEQ ID NO: 297356 - DNA, 5181 bp, Cannabis indica
cacattcacatacacataatgcctctggaagagaagtgggccaattatcacatttacataaactcccggctatggtcagagaagctgcaccagtaagagaaatgggtgtattgtcaaatggacgcttggcttttctgacagaggagctagcctcaacaagagaaatgactgctcagttatcgagagcacgctcggtttccttgaaagaagttggtaggcctgatgtgcgagatgctcaagattttgacttacctgttccactgcctgtaagaacatggaaaggaaaggcctctctaccggaactggaggatcttatgtttgatgctgttacgtttaaggacactggcgatcaaattgatgacattggtcctagttctttctctggggttagtcatccccctgaacctgttgatactgatctaatgagaacagtttatgttccaattggtcgaaataaatctgaggctggatgcttgatgaagagcatatctatgaagggtccttttctagaagatctttcaattcgggttcctcctaagaagcctagttcagctgctctttcccctgctgaaagtttggttgaggaacctgctgatatgggtggattgtctccacaattttcagtccctcgggcatcacagaacactgatacttcactccctccagattctgaggagaaagaatgtgtgtgggatgcttctttgcctccaagtggcaatgtgagtccactcagtagcattgacagtactggtgttgtcactgcaatgagtatcgttaatagctgtgctagtacctatcgaagtgatgctgtcactagtgatggtatgcttagtatagagaggaattgtgagagcaacaagtgcagtgttagaggggattcgcttgaaagcgctaaaactagtgttagtcgagcaagtgatagtagtggcctcagtgatgatagtaactggagtaacattactggaagtgcaaataagccacacaaaggaaatgatccaagatggaaggctattcttgccataagagctcgtgatggaattttgggcatgagtcattttagattactgaaacgacttggttgtggtgacattggcagtgtgtatctctcagaacttagcggcacacgctgttattttgcaatgaaagtaatggacaaggcatcccttgctgctaggaagaagttgactagagctcagacagaaagagaaatattacaactgcttgaccatccattccttcctactttgtatactcatttcgagactgatcgattctcctgtttggtaatggaatattgtcctggtggtgatcttcatactttgaggcaacgacaacccgggaaacatttctctgagtatgctgcacggtatgatttatattcttcaaagatgttttcatagatgtctaaatcttttgtgtttgcctttagcatggcttagattagtttgttataatattttgctttctgggtcttgttttcgcaagaagtttctactataatggtaaaaatcagaacgtactaaattgcttgtaatgttatgagtaataattttgttattaagaaaagtgaatgcattatgtcatggtcaactctcaattaagtaacggtctagatttttcagaagagtattttgcattctggcttataagaaaacgatgtaacattgtatcttaagcaagtatttggtttaagactaatatggttactttgtatttcctttctgcagattctatgctgcagaggttctcttggcccttgagtatcttcacatgctcggagttgtctacagagacttgaaacctgaaaatgtgcttgtccgtgacgatggccacataatgctttccgactttgatctttcccttcgatgtgctgtttcgccaacattaataaaaacctcatttgattctgacccttcaaagagaggagcgggtggagcattctgtgttcagcctgcctgtatcgagccctcatcagcatgtatccagcctgcttgttttattcccaagatcttccctcagaagaacaaaaagaaaacccgaaaaactcgaactgattttggctttccttcaagtgcacttccagagcttgttgcagaacctacaacggctcgttccatgtccttcgttggcacccacgaataccttgccccagaaattatcaagggggaaggccatggcagtgcagttgattggtggacatttggcatattcttgcacgaattgctttatggtaaaacacctttcaaaggttcaggaaaccgcgccacgttgttcaatgtggttggacaacaactcagatttcctgattcaccagcaactagttatgccagtcgggatctgatccgaggtttgctggtaaaggaaccccaacaccggcttggggtgaaaaggggcgccactgagatcaagcagcacccattctttgaaggggtaaattgggctctaatacgatgtagtactccgccagaagtgccaagacccatggaggccgagcttcccgggaaatatggtgcggttgaaccaattggtgtaggtagcacaagtaagaggatggctggcggtggaggggtaggaggaggtccgggaggggacatgaaatccgggggtaaatttctcgacttcgaattcttctagttttttggattggagaatttttgtgccatgttctattagtactatcaaagtttaccttgcaaaagaatatgcctcattactactgtgttctgctaatgaagtttatctcaccttaccttctaaaacaaaattccattcaattggaacagtagcaacactcttaaaatcattttggacaataccaacaattatattgcactaagtagaaaaattcatcatcttaaaaaaaaaacccaaattgcaatttaatgaacagttttttcttccctccataaggaaaaaagtgaatcaagtatagaggttatccatgaatattgagagtttgttgaggttatgattgaccacttttggatcatccaaaatcattacttgtgttttaaattaaagtaaaattttaggtccaaaacactaacgctttatcttcttcatgtaaatccaaagtgagaccaaagtagaattttttaagtacacaaaataacatttcttttgtaattaaagttaacaataattttcaatacaatgtccaaactccaaacaatcacatagattgatactagctcttttctatcaacctatgcagcacagcaaggtgcttaatccaatcccaaaataaaattaaaaaaacccacaaagaaagaagatcaaattcttcagaactttaagagaacagtactggtccttgcaactagctggttaatttcttctgagagcacaagcagagagtataaccaagatcactaagagggcaactgaaacaaaggaagacacaacggcgccactaactccttggcagaaatcggtgaactgatcgcataccgccaaccaattcgcgctagcattgccgttgtgagccaagtaaactatggctgtagccgaagccccagaggaagcactcaaagtaagcgccaacttatcgaaacgaagacacaaaatttccatgttaattcacattattatagaaaagaaaaacttagctgatagagaaaaaaaaaattgaacttactgtgtctgtaataattagcaaaagccttggtccaacagcatggggtctaacaatggttacaattgagaaaggaagcgacaagactaggtagcctcctactaatgccattgcaatcacaaaaaacctgcatcgaattttgttaaagattttcagtctagtgaaaggaaaaacaaacgagttatgctcaatgctcatccacttacataaaggcgggcatgtcatcatagcttgcttcgaactggaagaattgagtgaagaagggaagagtttcatcgctcatccccatggtggcggctgcacctagagcagctgctaaggcaccgagccttagaacaaaatcggttatggcaatgcctttcttccatcctttgttctcattctttggatgagctaacattggtactttctctagcttagcagctgcttttgcatcttgaacttcaattgagattgaatcaccatttgccattttagaaaattcacaaaattttcgacacttgaaaaggaagaagaggctaatagattgaattggtagctagtaaagaaggcaaaagacttggatgagaaaagctttgtgttgtgttgtgttgtgttgtgttgaaactaagtgaatgaatgagccttatatagagatcagcttaagttgatttggtttaatgattccaaattcataccagctatatgggaagtatatggaagttgttgctgacttttcaattactacaaatttaatatgagacccttttgaacagaaattgaaattgaaattgtaacaggtatatttgctatagaagtggtttgattcaattttaataatcaagtcaaacacttagtttacatagtcaaaaccaaatattttatatgcttgatattgaataagaaacaaatatgaatataatgcgaaacctttggctaatcactaatacataaatagaacctaataaaaatgaagaccctgaaaattatatgatatatgtaaagcttgattatgattatgtattttgaagtaaaatatatctttagagtagttctaattattttcttaagtattttaagtagtcaactagaccacttatttgcctaatccagtagtgtttgctggggtcctttaatgccacccagatatgagtattttatcacataccaactttatatttgtggtagtttatagttgaaaaagcaataaatgaggtagcttaatatcattaatgacacaaagaaacactattcatgaattttacttgtttaattagtatcgatcctatcgagcaccactaccatttctttacatgttacttttttaaaagttttatcactaataccaccaccataccattcatgattttttttaagttacattattagtttttctttacagtttctcaacaagtgttctaattattacttgtttgcaagtcgtctcaagttctcaaccaatttttttggggggtaaaaattacaaattgataattatattttttaatatataattgtaaaaattaaaaatataatatttaaaaaataaatcaaaatttttttttttt

SEQ ID NO: 297357 - DNA, 3294 bp, Cannabis indica
ttttcattctgtttaatataaaagtttaaattctgcgctattttgattagtaatcccgattaggagattagagtttcataattattttgggtagcgtgcctaattatttaaggcgttacatatatcaatggtagaacaacacacttaagtcacatacatacaagagtacgagagaatatgattcctttattgattgtatattaatgaatacaagagtcactgttatcttatgactatgagcaatatatatagccaagggactttcaactaactaacagtcatgaaatgacattacacaatcgattacattctttgacaagccatggcccacaattacctatattaacagtctaacaccttcatagtctaacttagttaacaatataattctaaaccaacatatatgatcacatcaaagtagtttccacattgtcaatgttgttttgttttcttcttctaattcttttgatgattaggtttcgtaaccatttcaataacttatagcaacatgaatcgtatggagtagtgcaatcaataacatgactccagcccagcttactactaaacacagactcactttagctggagtattgagaatatcatggcttggagcagcaacaataatagcaataaggtatgtaatggtcatagctgtgatagtcacccacaaaatcactgtcaaggtccacatcaagaatttgcgacaaaagggcaagcccgtgacaagtagtaagattatgctcaatgatccaacgaaccccacggtgttactaatcaagtaagcatgataatctgacatatttgggtaataacttattattgactcccctgcaacatgggtaacatttttagaaattgactcgtcatatgaggtgccatgatcttcccaaagaccgcctggaggacttattccggcctgaaaagccatagtggcaataagggaagcaacaatcattaacgattctctctttcttactaaccagccttctggattttttgtttccttattgttgtccttttgaattttttgtatttgatgaacatgatcattacgaatctcagggctagctatgacatctcgaatgataggccttttcataggtacaggttgatctatggttcgtgaagctccataagatcgaagagattctacaatgtcaaagtctttctcgcttctttgactctgcgctaagatgtccaatgaagtgaacatgtttgcattgacagcgttgacttcatgtttagtatttgtaagcaaaaactttaccgtcttattaaagggaagtaaaaaaaaaaactagttaatgattcaaattataataggaatgagtacaagaaataaaaatgagaataacaatacaatacaatgaaataaaatttaaaatacataaaaatttgataatattattatttatctttcatcgaaatggtctttcgtcatatttctaaataaaatagttatataataaactaaaatagtagaaaaatcaattttaataatattatttcaatatcttaaaatgaaactaaagcaaatagaatgatattaaaatcaatttctaattttcataccattcaattttttaaattctaacaaaacacagactaaacatttatgtccattaattaaaatattcgtagtaagttacatatctcaatttgtttatttgttattgccaaatgcaaaatagtcatatcataatcatttttgacattcacaaactggtaatcatctataacatccaccaaaagctttatagcttccaactgattatttctcacacaaacatgcaaaagagtcccactttgacccttcaaaccgacttgaccggcctctggagctactttaattagctccctcaacacatcaattcaccctctcatggcagcaaggtggagagggtttctcccttcttcatcccaagtcgtgcacaagaattcacaatcaacaaccgaaagtaatagtttgactgtttcaaggtggtcgttcgccactgccaagtgaagcggcatgcaacgccacatgtcaagttccttggcgagttcgggcttgtgattgaggagctcctatacaaaatctacatgaccgagcatagctgacacatgacgaggtgtctcggaaaaactattattgatgaagagcttgtcgagaattaaattatcttgttgaagaagttctcttagagctgtgacgttcccttctcgggcagcttggtaaagcaagctactcttcatgtgttttttttttataccaaagaactttgagagagaaatatttatttatacttatagtttgataaaaatgttaaagttattctctaattaaatacatgaatgaaatagcacgtcattacatataatttgtctaccaattaacttagttatttcttttttataataattaaaatgatctagctatgtgattattgttccatggtttacattttcaagatgtaactctcaataattatgttctttttcaagagaaagagtcaataaattaattatatgtggcctatatatataacacaatgatattttgatatggctaattattaggattttttgtccccccaaactttgtattgtaccaaatcatgccctctaaacttttaaggtcgttaaaaatgtcccctgaactattgagattgttgaatttaagaacttttgtccaatttcaatagaaaaattctaacatagatgaaagttcagaaggcatgttatagtacatatcaaagttcgagggacatgatttggtggatatcaaagtctagggagcatggtttagtacataaacaatcagtgaaacagtaaaattgaatgaaattagacaaaagtccttaaatctaacaatctcaatagttcaggaggaatttttaacggccaaaaaagttcaagaggcatgatttagtacatgtcgaaattcgtggaatcctaattagtcttttcatatttcacatttattttacgtggaaaaggcaatgtgatagattcctacatccattatatacgtataatattatttgacgatatttgggagaaaatcaaatcaattaaaaatttaatcaataaataattaggaatgacaaattttgtgcttgtagaatatttgaatttttcaaaaattgcaaattttataaatttaagtgaaaattacactaaatatgggattctataaaaaagtttgataaatatggctttttcaactttaccactcttatatggcatttgtccaaatttgaagttttttatggtattccctttaccattttttgtaaatttaatttttaaatc

SEQ ID NO: 297358 - DNA, 2032 bp, Cannabis indica
aatatcccccctcaagatggtggctatttttgctcaccaatcttgaatcaccttatcacaggccctgccatttgttcgcttatttttgtttcgatcttaggcgtctttgcaccatctggatctcgtgcggctggctaaccatttggataggtgtggatcgaaagtctgctaacgaatcatgggattccatctcaaaaccaattcgcaatgagtggattagcccatgttcttatatatggctcaatacttttacatttaatccatgtgggacaatgttctctaatatagtgtaaacttcccttataaatattggagtaattccattattaaaggatctaaaattatttatttgagaaaactattgtgctgctcattttctctataaagtgataattagtgcatcatcttggggtggctttactttgaaactttgctttgactgaacataattcgttcttatggaatgaacattcattgtttactttatgtatggaggcaaggattggcttcgagtttctccttgtcattgttggacatctaaagttgaatcggctaccaagaaatcttggaagaaaccctccttcaccaatctactgacttcaaccttcatttgtctacactcgtaggttgcatggtcgtgttattcatgaaaagcacaatatcggtcctgatcccttttctttgggtcagtaattattttaggcgaccaccttgtctccttcattcccctcgggcatctcattagtttcgttaaggttataatcgtctaaggaagcttttcttcattgaattatcgtgtttcatttctttgtgtgtgtgtgggtgggggggggggggcaccgttggcaacctttctattgtttcatagatcaatgagtcttccattatggctgaattttctcttaatattttttttgtgtgtttcttttcctcaactttgagtgctacgtatccccataccattgctagagctcttgtcagtgacaattcctgttctactatcatgtctttctttaattatgatctgtgaaccgatccctgtatcagagcttttgttgcgacaaaattagtatactttgggatgctcacgtactctccactgaattggtaggacttatctcggctataacatttgccttatctcggctatatccaatttgtagtctccctttgtttggtttgagatacgatatctcggatcctcgatgtatctcatctttccctgatccaggatatgcactacaaaaaactgctacttttagtgacaactttttagtcacaacataatttttttgtgactaaatgtgacttttagtcacaacaaaatgttacttgtgactaaaacatagtatttagttacaagtggtcacttatttagttttagtcacaacaagtattgtgactaaaaatatatttattcacaacaaactgtaatttttgtgactaatacttttatctacggacattttttagtcacaacgtaggaatcatgatttataattagtcacaattttttcactaagtaagattttttgtaatgatggtatgtaacatgttccgttttggctcgattctaggtatcatttatctcagtttggtctgagattatttaactggcttcggtcaagtttgttgttgtggtgtcctagtcggtgttatgtcaaattttatctcggtctaagttgtatcatgacatcttatgtcggtctaattcgagtttaatctatctaatcggccggtccaagttaagacttatcttggcttaattagtctgaatcaaggcctaccttggtttagtctgagttaaatcttatggcccagcttaagatatttgatctactttatacatgcttgtcgtcttcttctaagttttaaaaatgacgtgtgatcatatttctttttataaatgagcttgtatttcatctattcatagggcttttccctccggttttgtaaaaaatcatttttttgtcttctcaaactaatatataatattgtagagcctggtattgttatttattgtcactacctc

SEQ ID NO: 297359 - DNA, 3018 bp, Cannabis indica
cctcaacactcaagaataaagtgagctattagattcaattaaatgagtataattttgtaatcacagtatattctcaactcatgagatgttgtgatgagatagaaaagaaccactacaagaaatgtaactttttccagcgtatttttacgctgacaaaagtacactatatgcactaacatacttttaccgacacataattatgttggtaaaagctgtcagtgattctcggtcagtaaaagaccttttgttagcgcagttcacctttcaccaaaaaaatgtcttttgccagcgataataagcacaaaaaaagtatacacatgaataaataaaacctttaatttgctaaaagtcagctaaaaaaatttttatcggtacattaatgcgccaacaaaagtttcacacctttttaactaattggcacaaaaggttttgccggtgcaaacttgcgtcgagaaaatcttttgtgccaattagaaattcagcgcatatcacgtttattggcacattaatgcgcaggtaaaagttcacaggtttagggttttagggttttaggggtgagttttgctagcgtaaaaatgttgcggcaaagctttgttttatttttttttattttattatattttaatagtttataattataatataatagaattaattataaatataaaattactttttaaaaatgcataattttaaaaaaaatagcattcacattgataattaaaaagttttctaattgaactaatatacaaatatgtttgatttagtaagtaataaaattttctaaaattaatagtaaataaacaaaatattaaaagatgttcaaaaaaaattaagttctaaagttaattataaaatatatattattttaaagacaggtaatatcatcgtcgttgttattccgagtctcggaaggatgcgataacgatccaggaccaagaggagtggagaatggtggaagacccataggaagcaagttgaaaccaggcacagtctgagagagataatcaagctgatcttggaatcgcttgaggtagagttggatttcctgctgtgcgtcctccacttttttggtaaggcctcgtactgttccatagcaacatcctgtgggatagaaaaagtcatggcgggtgatcttttggccccaactgccttcaatctcaggagatggtcaaagcctctcagatgtcaagattgctcacccaatacttgtatcataataggtaaatctcgagagtactgggtgggacctactatagtcttagcaagttggtctttagtgggtgttggttgatttgcagccaattcaaccatttgctcctaaaaaaaatcaaataaattaaatagttaattcgaatacaaaataaattaaaagaaatattcagatattattataaatataaacttacataagcttgttgtgtgtatttgttgcaccaagtgttgtctttatggtggaacttctaaaaagtatctacagtaattagaagttctcctgttttgagattagcctatatttaataaaaaataattgtcaaataagccatggagctgagttagtttgacattcattatgtccctcgcatctcaatcaagttcttaagttttattgtcagccagcaagggatagaggcaaatcataaaagatacaagctttgctagacatgacatccctgaagaagcataaggatgtgcaaagtctgactgggaaggtaacagccttgagctgcttcatctctaaatcaacagacaaatgcgtctcgttctgcaacatcctaagaaaaagccaaaaatttgagtgaactgacaaatgtggagtaacttttcaaaacatgaaagaacacgtgtccaaggcccaaatcttttccaaactagtaaaaaggaaagacttatatttatatatagtagtttcagaacatgccatcaatgctacattggtccgggaggaagataagacacattgtccagtttattatgctagctagaggataataggtactgaggttcggtattttctaattgaaaaattatcgtattattcgctgatcttgtcctgaaagctacgtccgtatttctaggcccacataataatagtcttcaccaatcatctgctccgtcagatattataaaagcccaagtcctctaggaggttactcaaatgggacatgaaattaagacaattcgacatccaatatatctcgcacacctcaatcaaagggcaaaccttggcagatttcattgtggagtgcaatggaactgaggcaagttaatattaacaccttaagtctgaagaacaaccaagagacgtgtgggcatctgaaagtgaacaacgatcttaaaagggttgttgaaatcgaatctatactttgtcctgcaggagagtggtaaccccccaaatcatttatcatctaagaattacccgtgctcccgacgcatctctcaagacggagcactgtagatgactgcttcattgcagctgacaaagtgaacatgtcctcaaaaggagatgtctttaggatttagcccatacttttctaacattacgttttcctataaatactagaattgtacataaatttttgtaaaccgcttaacctaaataatctgcccaaattaaatcgagataacccgaacaaaaattcaaaccaaaaaacttgacgaaaatataaatcgtccaatctttatattgcgtgggttgaaaataataccaacttgcccaattaacctgaactaacccgaccaacccgattaagagagttttttttatatatatatttatatatttttttattatatatatttatatatcatataatttatatgaatatttaaaatatataaagttcaaactaatatatttttttatggtggttgatttgaactttagattcaatatatatgtatatttgtctcattattataattttgtaacgccccgatattttaccttactttacaaaatactattttaatgcataatttgaaaagattttaaaaaaatacttgaaatacaacagt

SEQ ID NO: 297360 - DNA, 3109 bp, Cannabis indica
ttattttacatttaaatccaatttgttatttttatgtggaaattccccttgttttatacacaccaaaattttcaaaattctcttccatttattgtttgcacattttttgggggctaatttttaacattagaacatggtctctaaaatatttataatcaccctgcttgattactgatgagaattatgagttccatctcagaactaactggtgatgagtggagtaacccatgttcttatatatggctcaatacttttacatttaattcatgtgggataatgttctccaatacttaccaccactttgaggtggtaccttgcgattggtttataatattctataaaagttatatgacaacttttagtatttttctttacgaatgattattatgagcagtatgacatctcgtagcggtgttatgagcaccactagctactgaatattttcaagtggttttgatcatatatttgtctatatatataaatatatatatttaaaggtggtggaaggattctaaacttggagagaaattgcctttcgttagagatagattggtggagtgtttcttatggcaagttggagtaagatttgagccacaattcagttactttagaataatggatacaaaactctatgttctattaacaataattgatgatatgcatgacatttatggaacattggaggaactacaacttttcactaatgctcttcaaaggtaattacctaatacctaattaattagtatattataatgatatcacattttttattacctgttataacagattactaattagtaaaaatttaatttttagatttcaattaattatatgcttaaaataaatttctttttttaattttaataaaactttttattttatttataagaaaatagataaactaaggaaaaagtatcagattgaaagtaattcattaaatattttttatttattttataaattaatcgcaagtgtataacaataatatcaaaagctaaaagtaaatgtaaccatcatggttaaatatttgtatgtaatcatggaaacctcctctctttctatatatatatatatgtatgtatattaaacaaaattaaacttaatatttgtgtaaaaattcaattggttttctagatgggatttgaaagaattagataagttaccagattatatgaagacagctttctactttacatacaatttcacaaatgaattggcatttgatgtattacaagaacatggttttgttcacattgaatacttcaagaaactggtaagtttgtattgggctttttagttgtaatatattggatggtttctttagttgtaatatgttggaaacgccaagtattaatctgtatttatacacacacacaggaactccaatagaacatgcacgaaagtatctcacagaaccaagcacaaccataagaaaattgagttgaatgaattactattttattgattaatctgtaagtattacaagttgagaaaagtattcttttctatgtattaaaaagaacaaaagctaaggctatttatagaagacttaagtgctaaagggtaccaactgtcataactgtcaagaaggcagttatgacagttggatatacaaccgaaaaccaggaacaagaatacctaactaactgatccacttatcaggacacaacttctaacataatgtattgcatgtttaatactattatctttttttatctttaatatatatgcatgtagatggtagagttgtgtaaacatcatttgcaagaggcaaaatggttttatagtggatacaaaccaacattgcaagaatatgttgagaatggatggttgtctgtgggaggacaagttattcttatgcatgcatatttcgcttttacaaatcctgttaccaaagaggcattggaatgtctaaaagacggtcatcctaacatagttcgccatgcatcgataatattacgacttgcagatgatctaggaacattgtcggtaagctagaatatatatttacaatgtggaaattattattattattattattattattattattattattattatttaactttattaattgattaggatgaactgaaaagaggcgatgttcctaaatcaattcaatgttatatgcacgatactggtgcttctgaagatgaagctcgtgagcacataaaatatttaataagtgaatcatggaaggagatgaataatgaagatggaaatattaactcttttttctcaaatgaatttgttcaagtttgcaaaaatcttggtagagcgtcacaattcatgtatcagtatggcgatggacatgcttctcagaataatctatcgaaagagcgcgttttagggttgattattactcctatccccatgtaaactatgattaaatgtttgtttttctaatcatagctagccctattttgtttttaataaaaggctagctatatgattacaaatggtacccaatgcaaattaattacaaagcattttcttctctaagctgatttagttgtttgcttctagttctacattgtacacatgcctacaaattaagtgagttaagtcatagaatgaacataattgtgggggtatacatataagattttttgtcccaaaaaaatcatagttagagggaccattttgcataagaaaaaagttagaggaccaatatacacaaacattttagggggctgattgataagtaaataagcctaatatatataaaaagtaaaagaataaagcgcatttagaagacaataagtgtaatattattttggaaaatgctaaggagcactttaagttaaagtgtcaaaacagagttattagtgtgcatttcaatatatatctaggtggatttgtaaaaggtagatttatttacaatattatgatatgtcaagacttggttagacatggagggagtctaccaaggctaattgcatgatcaagttagatttacaaaaggaaatttgaaattgtatgcattataggaattaaaattgatccactaatttaaaactatacaaaatttgtaaaatgggataaattttactaaaacccaattttaccccctcattctaaattgattctctctctctctctctct

SEQ ID NO: 297361 - DNA, 3721 bp, Cannabis indica
ttcacttttcactttcagtatacgttgctctgttaaagttttttatcttcagaactttatcttcattaacataaggcaaatgtccaaacaaaacttatagaaatcaatacatacattttccaatagagaaatgctaaaaggaaactagtagttgttagttggcattttatttaatgtgtaatattattatggtgtaattaagtatcgagttcatataatttaatatatatacgtttattgaataatgaacacaactgacattttaaaacacaatctatcataatttaaaaaaaaaaaaaaaaaagatataaccaaataatattaatgaactaaaatttccacaacaaaagatataatattgtctctattgttgcaaatctaaaaaatgagtcgaaatgacaaaccctaaaactatcacaaatgaacaaaaaaacaaaaaaactcacttacgttattgaaaaggtggtacggaggagctgcggtggcgatcgtcgggggagtggcggccggagtgaaaagagagataagagattgaaggagatgagtgtctggtgagagaaagataggaaatttcgctgaaaaatgaaggagatgcgtgttctttatatatcgtgaaacctttaacggcggccggcggaatgcgccggcaaaaagttattaaaaaccctaatcaaaacgacgtcatttcaatgaattaaattacttatttcaaaatttgaatttggtatcgttggtatacttttttttttaaaaacaaaaattaattttgatatggctatttgttacacctagctatttatttgattaatttgtcttatcccaataagctaaactctgtgttttgtgtttaaaagttcattgtttggaacagattttagaaaagtgattcttttgttgtttaattaaaatatgaacagatttgattaatttgtcttatatcaataagctaaactttgtgttttgagatttttgacaatttatgccattgttttatgagtttttcttcaagtgattttttttttttctagagcaaggtcacagtaattgtaatgtcccaaatctaaagcctatcttttttcttagttgggtattaataaaaatcttgaaaaatgtgttgttttgctttagtaaagactaattactctttcctcaaaaaaaaaaaaaagactaattactctgttagatcatttcttttactccttttaatttaactttcaattttgtacatatttgtaattgtaaattagaagacctcaataagtagattgttatcacaatttgattttttgaattagtgggtgtttcatcctatgtgttatcacaaggcttcattcaatttacctaagtataaaatacacatatcaaatgtgtatttactcctaaatcttttattttcttagtctcaaaacagaagaaagatgcattatactttacttccattatgcatctaacttacctttcaactttttagtggataatttcttgcttgtcatatttataaaagtatacaattccaagttcaaaaattgctcatgaatcaagccaaacatatcatataagtatttatataagttctccaaaaatttcctaaacaaaaattttcattgctgccatgaaactaccaattccaaacaaagtattgaaactatgggatgcatggcatctaaggggttgtatcatcttaagccttttaacacaagctttcttagtgtcattcgcatcgcgccgacgacattccaaatccacatttttgctcttcttaatttggtcagcatacttacttgcagactggattgcagccgtagccattggtgcaatcatcaaaagccaaggtgatctatgtgatccactcaaagaagataacaaagatgatatcttgtccttctgggcttcctttcttttgcttcatctcggcggtcctgacaccattacctcgtttgccctcgaggacaacgagttctggctcagacacattttcggccttgctttacaaggccttgcagctgcttacagcatctttttaactctcccaacaaccaagctttggctcccagcaactttagtcttggttgttgggattgtcaagtattgcgagagagtttacgctctttatctcgcaagcttggaccgtgtagcgagcattaaagacaaaattagtacacaaaacacaaggacaacactaactaccacctcttcaagccacattgaaatgttagagctagcttacaaaacctaccaaatcttcaaaggaccactccttggtagattctacattcgaaatcctccccgtctttgggatcagtaaaccacattaaggcttttaagtttatagagtacgagctgagcatcatgtatgaggttcttcacacaaagttagttgttgttagtcgaaaaatcgggtacatctttcgattcattggcttctgcttcattctcactgctttcattttgttcattcttgttgagaacaagggattggagttgcccaagttcgatatagttcttacttatgctttgcttactggagccattgttcttgattcgatctcagccttacagctggtgtgttcggattggagtctcggcggtttggaagggaagtggaagagttacatccctttggtaattgtaaaaagacagaggtggtccaattctgtttcacaatataatttgataagttactgccttgatgggaatacaatgtgtccactcaataagtttgatcataatattttggacaagatcaaaatcatgaggttttcctcatcgcataaggtccatcaagatacattggcttatatttttaatcatgcaaaatccaaatctgacagtgcatacaattcagacactgcaatttttggtgcacttttgtttagaggtcaccaaacaacttgggattatcccaagctcgaatggagcattgagaattttgaatttgctgaaagtcttcttttgtggcatttagccactgagctaatatgttgctcttcaagagaaagtgtcaaaatttgcaagattatttcagattacatgttttatcttatgataatgcaacctttgatgctgtcttcagttttggggagcaattggaaagtggggtttcaggatactgtggcagccaccaagagatttttggccaagaacaagatgatttcagtggaaactaaattgataaggagaagtgatgttgatgatgagagtaaatctgtgttgtttgatgcatataagttggctacagagctgagagaaatggatgaccatatgtgggaagctatggatcaaatgtgggtggaaattatgtgttacacagctgctaagtgtaaaccaattgtacatgcacaacttggcaagggtggtgagcttttgactctcacttggttacttctcaatcattttggcttgggatttcagtttttcttgtaagaggagggcatgttattgttgtttcaatgtcactgtaactttgaaattatttctagttttattaaagaagtattcaaaataataaagaaagaatttcattgtgtttaggcttatcaaataaataaaagaaaacttacaaaaatactgtaacctgggttaatttttataaaaatactgttatacagaaaagttttaaaaaatattgtgtttttataaaacaccaattgaacacaaaacataacaactcaaaaaaacagtagaacaactaaaaaaataccattaaaaatttaacacagta

SEQ ID NO: 297362 - DNA, 4446 bp, Cannabis indica
agtgtaaaatgtattggttttaatttttttttttaagtttaataagtatagaaaatcaaatttcccttattctattactattaccattctattacaccaaaccaaacaccacctaacaattattttttattttcttaagttgtaggcactagtgcacagtctcggagcctcgggactgtgttttcaaattctgtgtttctttcaagacacttttttcttttgaggtgaggcatgaaaaagaagaaaaatggtgggtaggtaggtatgccatttgaaaaattggggaattcccatcccattcttgctgtatttctgtgctcatagacataagacacagtcatagtagtaactgacatgaggtgataatgaaggagactcgtggttggaagaagaaggttgtcgaagctcggggggattcagctgcccacgcggtcggtcatggagtttcaacttctctgaagagacggagagaaagaataaagaagagacgggagcgcttcgaattgaatgaaagtttggaagagaagatatatgatggtccggagttgaagggtagttcaagatggaagaatgcgcagctggtggcatctgttagtgagagtgtggaaattaaggtcggcgatggagcttcagcttctgggaataagcgaggaagaaagcgcgcgagagtgaagctcttgaatcaaagtttggaaaagaagaaatgtcagggaaatgatagttccgtggaggcggttgatctaagaaagaggaagaaaacgaagctggcggaagtccttgggtcgagtgtgaaatgtcacgaatccttaatgtgccatcagtgtcaaaggaacgacaaaggcagggttgttagttgtaagcagtgtaagagaaaacggttttgtataccttgcctaaagaactggtatgcattgatttcctacttgttgatttcttatgtttctaatgtttttgttctttcgtctttattggtcttgaaattgaaaaagtaaacaaaagaagtttgtgctgtaccggatgattcagctcgtttttttctttaatgagtttgagcatcatagctttacataaattacagaagcaaaaatgaaggcaatgtggttgtatcatacctaaagatcaaagtattgatttttgtaataacaacttgtgttgtgattgccaatttgtcatggaaaaaatgtcaattattaatactgaaaatgtatgagagcgatcttgcaggacagaggtaattctaataactatgtacattttgctcatgaagagaatttttgatgatcttgtctctgaaaatgtcaattatttttttttgtggctgttttcattgggcatggccttgtgcaggtatcctactatacctgaagaggacattgctgagtcatgtcctgtatgccgcagaaactgtaactgcacaacttgcttgcgcaatttaccggtaatagtcagtttctcattttcagcacttctcataaatgctaaaatgacttgattttacaaatgaagttgcataacatttagtgttgttactgcaggtttggccgaggtactctttttatcctagttatgatgatgaatttatgtattctgggtatttacttgaacagcttcttccgtttatgaaaagactaaatgctgaacaagtgattgaaagagagctggaagctaaaagacatggtatatcaacttaagtttatttttccttcctgaggaatttcttttttactattggacattgtatcaaatcttctcaggtcatatgtgtagctctctgaaaaatacaagagagaaacaaatgcacaatgattgtttcacttaagatggaagtgaatatgtcggtcctttgtttctcctttttgaagcttacaggaaaaatgttaatggagattattgacatgaaaatttggtggggtgttcctattggcaggaatagccgaatcagtactgaagatacaggaggcagattgctctgtaaaagatcatgtgtgttggtagggcctcggcataaactaacacgtaactttaaaggtttatttgtcatttgcttatctcaaattcagtcgttctttgcagcaacaactgcagaacttcaattgttgattttcatagaagctgtcctaaatgctcgtataacctttgcctcatttgttgccgggagattcgagatggacacctgcagggaggtggggaggatcttgttcggtttattaacagaggcttggagtacttgcatggtggtactggtttgcggccttcagaaagtgtaaagccaacatctgagtggaaagcaaatggtgatggaggaattccatgcccgcctaaggacatgcaaggctgcagtgatagtctcctggagctgaggtgcatttttccggaaaattttttcgctgagttggtggaggatggagaagaaatagcagaaactgacagtctaattgacattcctgaaactcttgggcaacagtgtttgtgcttcagtgctaggcctagaaatgcgagtgatgtgaacaacggcacagtaaggaaggctgcttctcgagaggattctgatgacaattatttgtattgtccaacagccgtaaaaaaccaacaagaggatttaaaacatttcaggtaccattggagtagaggtgaacctgtaattgttagtaatgtgcttgaaactactccaggtttaagctgggaaccattggtcatgtggcgagcatgtcgtcagatgaatcgtaaccagcctggtaaacatttgcgaggcaaggcatgtcgtcagatgaagtgtagccagcctggtagagatttgcaagtcaaggcaattgattgcttggattggaatgaggttagctttgttaccgaacttcttttattaaataccaataatgttaccactgaatttgttttgtttctaattgcttattgatatatttttttttccctaattgcttactattacttttgcttgtagtgatttcttaaatgatctaatttttcttttcctttaaaaatatataagatctatttttcttacaaaagaggcaataaagattgggatatatgtttttaggataattttcttcttcttttgtatcactgaataattcatcatttctcatcaagaaaaagaatagaaaaaggttaggtgatgttgcctcattaagttgcactcccaatagcttctctgctacatcctttaaaatacaccactaaaactctactttctctaactcaattttatagcagacttttacattacacatacatcaacttctgtatcttttctctatttcctctctatatcatttaaataacatatttttaatactattaaaacatttttagaggaggaatagtgcttctccacatgtagagaagagtttgaagaaaatagagatcctttaaaatagagaacccatttaatttacatcatttgttggaagatgatttttccatggttctttaatttttttttgaagaatctattttaaaggagctattgggagtgctcaattattgtggattatacatgatttgatggaaatactaatttctttaggctttcattatctggtaatattcttaaatttgagaactatactaggagtaaatggtagttggtcgacatattttcaacattctacattttatcataagtatcttgactgttgtatatctgtattgctttcattttaaatgtgacatggtttttgacaattctgatttgaattcctgatataaatcttctaatgacatgcaggcagacattaatatgcaccaattctttactgggtatttagaaggccggtttgattataaaaagtggcctcaaatactgaagctgaaagattggcctccaaatagcttatttgaagagcgtctaccccgtcataacgaggagtttatatgttgcttgccatttaaggcatacacgcatcctcattatggttgtctaaacctggcagtgaaactgcccaagaagggtataaagcctgacatggggccgaagacttccattgcttacggtgttcagcaagagcttggacgaggagattctgtaaccaaacttcattgtgacatgtctgatgtggtatgttgccatccttaaaatgcatatttgatcttagtcatagaacttttgttgagtatatgtagctttgtcctatttcctgacttacttgcaaaattagtggtgatttaatgattcagaatggtaggacaaaaaaatggatgggtgacttcttgactttaaagaattccatttgtcctttaggccctgtttttctttctctcactctctcttaggggtgagcaacggttggtttggtcggttttttacacaaaaaaaatccgaaattcggttttcatggttataatccgaaaaccgaccgaccattatacaaatgtaaaaaaaaccgaccgtttaatccacggtaaccgaacttcatttttttttaa

SEQ ID NO: 297363 - DNA, 2846 bp, Cannabis indica
actagaaacaaagagtgaaaactaactgaaatactgacccgaaactttagactatttaagcctaacacttatacacggctacgtcactttggatgcttcctgaaatgatgactagccctacaaaccaacatgagtatttctagcgtactttgtcctcacttgcacactccttgggaaaacttcccaggaggtcatccatcttaagattactccagttcaagcacgattaacttttgaaccataagaaaatagatcatcacacttgtccaagcggagatagggtttggtaccaaagtcatacgaggatggaggccaacacccctttgatgaaggaggacttagattgggctgacccttagggggtgaattcggaccttgagaaaataaaacaccatgcatgtccaagtggagacaaggcatggtacgaccgttatatgaggatgagacaagagccaacacccttgttgagagtggactcagcctgggccaattggctagtccctaggggatctcgcctgggccgatccctaagggactcggcttgagccgacccctagggggtacttggcttgggctaacccctaaatggttgagtgtggcctagtccattttttagggtgcttcataccaaaggttcacctttggtctataggggttataatcttttccctttagtagttatccctcatataagttttttatatttttctcacaggtttatctcttctaaccatgtgccacatgtgatgcccttgccacgtcactcttgcaaaaatatgggtaaacaatttttctcaagtttctagtagtatgactatacgttggaaacttatgatgtgagccccgactccgtcttgatgacttagtggcactatactgagaataccatgatgttactacaactacaatacatatcaaattcaagaaaaaaaaaaatttcctttacatttttacaacatcacccaaataataattctcatcttacaagaaaaatacattgtaaggaaaaataattgattaaaaggaaaataattagctcccttataaaaataataattagagaagaaagttccaagctgtgggggtgcgtgtgagcctcttggtagtattttgtgaattatcggcatgtaatcttcgtagtgggtaagccatgttgactttcaatgaaatcttattgtttgatgcttgagatgtttagtataggctttgggtaactcgattttgactttaattttaagaaatttggactagtaataccccaattttggtattgtgactttgggtattcttgggtgttatgaagaacactaagaacattatgatcgtgagaaacatttttttttttattttcgattcttataaaattctccaaaaagtgtttttggatggtgttttgtagataaagggtgtagtatgtaccttggtaaaaatttgaaccactacccattggggctagaaccacgtaggctgaccttccccttaggagtgtggcccaataccactcgaccatggaaacgtacctcactaggccgagagtggctggccctacttggtaaggttgagttctttactagcacactatctcgttgtcatgcggccttggacaaccctcaaagcaccgactcaatactacccggctagggttgagtacataattatggtgtggttagaaattctactcgacttgagatgaataactcattagtgggttcctacttcccacacagcttaggtcgaagccaaaaagatcgagtcatattaggtcggctattaaggggtgagtgcagccttgcccatttttgactaggaccaagcaagatggattttaaggttttctcttcgcttgtatgcttctcccttgtttggatccttgaggatatacacttggttgtcaacacgaccacatgcccatgtccacccgtactatgtgctgggatttatgccctaaaagtaagtatttaatggataatatactatacaatatatgaaatgtaattataagataaattgatacgttaattataaaagtataattaataaatatatgaaaattccttattcatatagagatggtataatcttgtaaggtcgcacaagagaattaagattatacaatatgaataaaataagttggtagtgtattaaagtaagcgatctttaatatagaattaccaagtacggtttactatacactatactctagggtgtgtgattttgattcggatcacatatgtggatatacgtgtagaaaaactattagtgctctattttaataatagtgatgcagtggcaccctcgaaggaacaaagaagccacaagagaggcaagcacattgagtggaagtaccatctactaagaaatatagtatagagagatgatgtgacggtcttgaagattgcatcgaaacataacctgaaaaatccatttacaaaaatgctaccagtgaattcttttctgggtcatattactaatatgggactaaaggagatgcccaatttgcttttagggaaagtgaaagattgttagggtttatgcccttaaaagcatttaaagacatttctaattattaataaagagttgaacattttgatatatgcttgaatgttaaattactcatatttattattgaataatttatatataaatatcaaaaaatttcttattcatatatgagattatggcttgtagctatacaaagaactaagatcacttagctatgaataaaactgtcaacaacatataaagtttgagaatctttaatcaataatttctagtacggttcattgatgcttattctttggtgcaagtaatctcggttcagattacggatgtagtatgacatcaaa

SEQ ID NO: 297364 - DNA, 3916 bp, Cannabis indica
catacatgatagtaaatagatcctgtaaaataattccaactgtggtatccatcgtgtatctcggtttacccctggattcacaagacccaagcccaagtccaagcctcgtgaatcatacttcttaaactctggtagatagttattggctaggtctggaataatatccaatcttgacttcttgttgccaaataatactgagttcctatcataccacagccaccaaagggttgtcatcaacacttcaaaagcctcacaagatagcctgacaaagagtaataggagaatttcatgcattggcccatatgcacatcgacaaagcacctaccacaccccgaaccgatgccacactagaatcaaactagattagaaaaatagagtgttctcaggagtttcagcttcttctccacaccaagaacaataaagaggtacctgaacttctcaggagataagttgtattgccactggtaaagccaaatggaacataagccaaccaaaaattttgacctttggtggcagcttgagattcaatagtccattccaccaatgagttaacttggatgaatctacaactccctcatcaacctggagcgaccaggccaatgagtagccactttgacagtataaacccctcctctatcgtagtgtcagcaccaactatctgttgcctctcgcctcgctaatggaatagtcataattatgtccacatccattggcaagaaaatatgttgaagcttccccacatcccaagtataagatggaagaataaattcactcacatgacaatcatcattaatcctcctcgtgagtggctgaaaagtcctcgaacgcgggagccatgggtccttgaaagccctaacttgagttccatctctaatagatctccaaagcccgcacttaagaaattccattccccaaatcaaactcgactaaaggggagacaaaccaactttttttgtagcctcaagaataaagcaatttgaaaattttatgtttcaaaattcgagcagtcaatgaatctggatataggactaacctccaaacttgcttggccaaaagagcttgattaaaaagttaaaaatcccaaaaactaagcccacccattgccttaagctgacatactatttcccatttcattcaaggaatcttcatttgatctctaggtgaatcccagaagaattgtcttacaatagactttaattttccacaagttttcgtcgaaagcttaatgacactcatcatataaattggaatagcttgaagaatagatttgataagtacctccctccccctggctaaaaagaaattatacttcaatccccgcacacgcttcctaacactttcacagatcccctcaaacgcctgttgtttgtttctactaatcaccatagggagcctagggagcctcacgcacttgtcatgcgtggccacccgatatcaaatcctaaaaactcttagaaccccatttcgatccacatgttgcacattcggactaaaagtgatagcaaacttttcaaaattaatcttttaccccgagacagcctcataagttagaaggatacgcttaatagtttcagtatcaccttcattagccctaccaaatacaaggctatcatctgcaaagagcaagtgagtaacacgtggtcccaatctagagcacctaaaccccactagttcagatctggctttagcaagggagaataacaaagacaaagattctgcacagaagagaaataaataaggagatagaggacattcttgtcggaatcacgcggcctttagggtgcccattgattaagaaactgtactctggggttgtcacacagtccatgataaccttcacccaacccttaacaaagctaaactgacgcatcaaactggctaaaaatccccattcgacctggtcatatgctttactcatgtcaagcttgagggccataaatccccttctcccattatttcttttaaacagtgagtgaagtagctcaaaaatgaccacagtattgtcatgtataccgtcctaggaccaatgccatttggaaagatgagatgagggggccaagaacacttttcacccttagcgataaagctttggcaacaattttgtacattacattacacaaaacaataggtcgattctctttaaccaatcttggtttttgtacttttggtaccaacaccatatttgacttattaaattgtcgcaccgaagccccgtcatttaagattgcaagacatacttggctgaccctttctcccacaatatctcaaaatctttagaaaaataaagcatgatttccgtatgatcgcagagctctgaggcaattatttgacttgattatgtaatgcaaatatggtacaatggagtggaaaattataacgagttccacgtttaaagaaaatgcatgctcttgcttttatatagatacatacccacccttagatactaaaaatctactatatccatggatccaaaggctcacatgcatttgaggtgttaaatccctctacgtatgagtgaggttttacatgatttccctttatgtgatcactcactttgatttgaggtgtcatatcccacacataggacaaagttttttcactatagctctaggttaattttttattacttgacctctcacagcgagtttgctaactggtttctagttgataaaaaaatatcattcttaaattattttatttttttgttatttttaaataattaattttgagggatgaaagagtaaatttctttctttttttgtttggaggcttgcatcaataataaagagaagtatattctgaaagaagaaaattgtatttgaattttgtaagttgttctaaaataatcaacaaaactagaatgattatttcaaaattaatattatttgtgcttaaaaagaacagtattaatattatttgtcctatgcatccagataaattgcttgggccagatggtttcaacccgagttttttccaaaattctcggtcgtggtgggacaagatgtagtgcggttggtgcaacatttcttcactttcggtacgtttcttaatttccttaaagatactcacataatgcttattcccaagaagtcaaaacttgaaaacatgttcgatttgaggcctatcgccttatgcaatgttatatacaagattatttccaaggttgtggctaataaactgaagattgtgttgccaaatgttatctttgagtctcaaagtgtgtttttacctgggcacctcattactggtaatattcttatttcctttgaaaacatgcactatttgaagaggaagaggaagagttcatgaaaggaagggttcgtggccttgaaaatggacatgagcaaggcctatgatagagttgaatggagtttcttgcaagctattttgaaaaagatgggtttagtgagcattggattatgctaatcatgaaatgtgttacttcggtctcatacactttttgtaatgactgcaaaaatttggatatggaatattaagtgctttggaaattaattaataataataagaagaatattattatcattggtagttatatgtgaatgttaatattaaatataaaaagtattatttttgtgattctagctcggtggcgatggaaaatacaacgaggtgttattctagtcacatcggtaaacatagaacctttagttttaatggattattgtatgttggacttgagtgttgtgtttaggtggggtaatggttttggaccatttgacccctaagccgctcattgatttacgttttgatgcaagggtaatgttgtcgagtgaatttcgcaacaccaaaatgtattatttaattaatataaaaagagaatttttagggaagtgacaagtgcgagtattcgacctagaatggcgagtactcgactgggaatgcaagaacaatcaac

SEQ ID NO: 297365 - DNA, 4841 bp, Cannabis indica
actgaaaaattaagattcgaataaaacaaactggttatcaaagttatttgtctttgatatcgatcataggaagaattataaaatttaatctcaaaatgaatattgataataaggtgtttaaatagtttcttataaataatatatagtttgcaatctaataatgtatttcccttttctaaatatgttgcatcaaattttgaaagatcaacattattgatgattttttcatgattaccaaatgtgcaaagcttcttattactcgggatgatcataaaggaatgttactatcctagaattagtcaagcatgaaattaaaatatatggtgaaagaataatttgaaaaacaaaacatgcatgcatatattattaattatttggtcaaattcaaataataataatattaattagtgatgttgaccatatcacacccatataaatctcaaagctaactacaatcatggtccatcacccaatacaacttaaaattggtagtctctatatatgcaacacttatatgattaattatttcaaatgaactactagctagctagtagtacgtacgtaattaactaattaattacatgaattacttattagatcactaccttcttttgttctatatatacatatatattataatatatttcatttggagttgattacttattttttattatatatattaattaatggagcttattaagaagcatgcatcttcttttctgcaacacaaatataacattgctaggcttgcttttactgatgttactgaagctgaactgtaagcaaattttgatttttttcctttgaattaatttcgataattctttacaaaaaaaaataaataaaataaatagttgaatcggataaaaaaacaattttgcaaaagaattataatgactcaagatgaacgaaatatcttataagtcattataatcagtatatatttaggctaatagttattagatttagcttttttttttctttcttatgaacttattatttttttctaaataagtacggactgggattctcatttttatcatgtgatgtatattttttaaaatattattttgtattctgtgttttataaaagttattgattgaactttttcttttcaattgatttttggtcaaaaataaatttaataataacctaatctagaggtattatgataaaattagttacgttaatttttgcataatttatgttaggaattgtcttcaagttgtttatattaaaattagttacgttaatttttgcataattaaggtgttcaacaccatatatagaaatgcacgagagttataattggtatattgtttatttaatcacaatatgtgatatgtgagattccacattaaaatctatataccaatagcattatgacacgtgttaagatgctttagtaaagtatttcgataatataatgataaaataataataataatatataattaaaattaattgttgtatgtataaatatatgtatataggttggctgaggaagcaacaaatggggattcatgcagccctgacccaagaataatgagtagaattgcagaagcatgttataatgaagtagatgattattggagaattgttgatgttcttcacagaagattatgttgtgttaattggaatgaatggaggcaagcttacaaagctcttgttgttcttgagttcttgctcactcatggccctttagatttctcccaagagtttgtttgtgactcccaagtcattcaccagctagcaacttttcaattcgtagaccacaacgggtaacaattaaatcttatatatcatcactttaattaatttgttccaacttaattacaacaaatacaattttccaatccttcttaattcaaaacaatacatgatatttttaattatgtatttttaaaataattaatctttttcttttattttgggccctaaggttttgtgagcttttgtcctgacaacaaaaataataatactataaattttggtgttaattttttttttagaatcaactggggtgagaatatgcaaaggaagtcagatgagatattaaagcttctaggaggatcaacattacttaaagaagctcgtttgaaagctctcaaagtaaaaaaagaaatctatggtttggttttggacccatttcatcaaatatgccaataatggagccctcttcagcaaatgacaacaattattcagttggtggaataagctgttcatcacatgaacaagatcatgacaacactaatattgttgaaagattgcacctttgggattctcctaatcataattcaactcatgaaagtggctattttcttgatgatgatgaagaagaatttgatcatcacaaagaaagattaaataatggttttgtgggtggaattttctcaaaacttacaaacacttttaatccattatcttcatcttcatcttcatcgtcaaaagattatggtaggttgagaagtgtttctgatgttgggagaagagagtccaacaagaaatataatcgacaatcttcactatggtattagcaggacgggtttagatttgagttaaggcagactaaacttgcgtttaaggaaccaaaaaatattttacttaaaaaaatatacataattttcagtaatttattctatataattatacatttaatttgtatacattattactctacctgcatcactctggtcattatttggcttttacattcttttgtatatctatcatccctattattattattccctctaccacttgttgaagtgtgtgcatattcaaatatatatagttttttttttcttttatataattatatattatagttacaatagtaaggattttattagtttaaaatttttatatgaataatagtgtcaaaaatatggtttaatttaatattctgttgcaaatgtttgaactttcaatttagttttttaaatagaaatacacattttttttccatggagatagcgccccacagggaattacctctaatggagcgggatttctcgtctaaaaaggttagatatgtttgttgattcaggactctccaaggttggctgtgggattggggtggcaattcgggtttggtagaggtggagatcttggctgtgtttttttattttgttatttaagttagtgtattgtcaatctttgacagacacaatatggtattttggttgcttttatcacaattgattcatagtagtgtgtttctagtactgctccattcatgtgccaaaaatttgattgtatgcaggctcaatgaaattgttctctctcttgagagattaatatgtaacctaatgatcatgaatatatatattttgaaatatggaatttttttaatggaaaatcaattttatttataagcattaatttctatcgtaagtaacaactcagttagaaccaattccaaactaaaataacaaccaaggtataagataacaactttagcaaaactacaagctactacattagttgattacttaataaaaaaaaatatttctcaagtttgcaaataaatttttacattcttaaacgaaggacattaccaagcaaaaataaccttcaataagcatgccataagtattcccagtcactaaccccaaaccataacttcaaccctcctcaaacaaagttgcatctatattaatcaaaccatgatgaattcatatcatatatactttttgcttaattaacacataaaaaattttatttttgccagaacaattcattaatgtgctagcaaaagttatttttaccaacacatatttttactgacaaaaatgtcattattttattagcacatatttttgctgcaaaacgtatttttactagcgcaatttatatttgtgctggcataagaagctgtgtaaaaccctctctcataatactttctactagcgcgtagatgtgctagaaaaaattatttttgtcaacacttttcattttacactgataaaagttttaataccaactcagatttgttaatcctctttgctagcaaaagtaaatgttgttttaccaatataatacctaatttttattctaatacaaaaatacgctcagcaaaaatctcattttttgtagtgtaatattatagaaatatatatatatatatatatattaatttcttttttaatttttattatataaagcttgcataataatgaggttgggtaggaggcccaacaattaatgactttactaattatttttattaacatctctctctcataaaatcattagcgtgtggacctcacatttttctcttaattaattttttaaaaattaacaagtaattacatttatatataaatcaatagtaatagtactagctagctaccctagccccaacaatattattaattaattgcaattaaatcataatcgttgctgtattattatatatagctactacgaaatatagtctatgagtaagaaagattaaataattaattattaattagttagctaataaataaaagactaattagtgatttttctgtctgaactttaacatgtattaaatcgtgccttttgaaattttttgaccgttaaaaattcccccgaacaattgagattattaaatttaaggacttttgtctaatttcattcaattctactgtttcagtgattgtttatgtactaaaccatgtgtaacgtccccgcttcaagcttccattgggtccttacacccacggactaatggctcttatacacgagttcgtcactctggctgcttcatggattgatgactcacctacagaccaacacgagtgtttccagcgtgctttgtcctcactcacacgcatcctgggaaaacttc

SEQ ID NO: 297366 - DNA, 1741 bp, Cannabis indica
tcttcgtttattttctctttaattttctgagttatttactttcaaattgcaaacttattattttaccaaatagaatcataagtatagtttagtagtacttaatccaattccctgtggttcgacctcacttgcgtgagatactacttgattgcgtatacttgcgtaataaacataaaattcgtaacactggtgcctgagtcttctttggtggggcatgtttttaaagctagatattatgctcatgggtcttttctttttgttgagttaggggataacccaagatttgtgtggagaagcattttggaagctaaacatcttattttggttggggtttttcgaacaattggaacaagtactacagtgtctatcttgagcaatccatggcttcccaataatgacaaccctttcgtttcttcagatcaccctgcattagctaataaaactgccagttagattcaaaagcatgggatgaggagattatctatgagctgtttgaggatagagaccaacaacttattttttcaattcagttgagtgactcagttgatagtgattgttggtctagtagtgcttatcaacatctgcaagttctcaaaggagctttgtctttggataactcgactagtttttagcgagatttatggaaacttaactcgactagtttgtaacttcctctggtgagttgcttcaagttccttgccaacttgtgttcaattaaaaaaatgcatgttctagttagcgtgatcagtcccctgtgtctttcccatgacgaaaccatttttcatgctttggttgttgccctattgttcgtgctagctggaataggtctatggtggatattggtagtaatttggagttggatttatgaaatttgttgctggttttgatgaatagaggcagagttggggagatggaagaaacgataatggtgggttgggcaatttggcaggctcgtaatgagttcatttggcaacaaaagttcggactgctgctaacattgttgcttcaacaagaatgtgtcttgatcattatagttatgctcaagtaagaaaaggtctttctttgtcacatcttcttgatggaaatagggaaattgagtacttgactgcaccttctttcaatcagatcaaggttaatgttgatggagcgttgtttgagcaggagggtcattttggggttggttgtgtggcacaatattgctgtgggaggatgaaattgaagtctacaccattggtaggttggattgagttcaacctgaagttacagagatcattggtataaaggaagctttgagttggatttcttgacactcatcgaaactgatagtttggtttgtgtccaagctattcaaagtaatgtgtccatgccgtctcattttgacttattagttcaagatgttcgtactttacttttatcttaaaattatgttttgtttttgtattttgttaaaggatctgcaaacaaagtagctcattatcttgcaaggagttcttgtttctctacaggtcgtgtacttcggctggaggattgttcctctcaagtgtgttctattgttttggatgattttactttttaataaaagttactggtttattcaaaaaaagagataatttttttacatggaagtagatataagaggactcttgcttgctggacaacgaggaaaagcgatagatagagaaatatggaaaaaaggaaaagaaatggagttccttataagaaaataaagagagagagagag

SEQ ID NO: 297367 - DNA, 6487 bp, Cannabis indica
aattttaaaaaaactaaaaaaataaaaataattactaaaactacgattttttattttttataattaattttttttttttaaagaaaaacacaaatattagccagaccaaaatttatgcaaacaaaaaagtgaaaatttaatgagatatttagaagttgagtgacttgtcagtggcaccgaacaagagacaacaaataattgatcacaatcaatcaatcaagcaatcagtctgattttcgatgtgagtgattttgtggctaactattaaagtcctacaatccaagttttaaagaaaaaaaaaaaaaaaaaaaaagagaaaatcactaacatgaaattccgttgtttgggtttggcaccttcatatcccattccgattccggctcctccaattactcccattcctatccggaagaatgctccaatcgcttttcaccattcctgtcctcttgctcaatttccactacaaccatcctccctccattccgatcataataacacccacatcctcattcgtcgtaaagcagcctcatccaacggtcgacatttcacagctcgctcttctagcccggactcaatccctccttctccttctcctcctccttcttcctccattactcaacaggtcattatcagctcagcgttgaccatcgcattcgccgttgccaaccgcgttctttataagctagctctcgttcccatgaaagaatatcctttctttttagctcagttggccacttttgggtgagtaagtagtgttcattaatttataaagaaaataaaaaataaaaatttcggactcaatgatgatgattaataaataaaatctcccttttgtcttttgatttaggtatgtaattgtatacttcgttatattatacatgagatacaatggcggccttgttacagatgaaatgatggctcagccaaaatcactttttgtggctattggcgttttggaagctctaggagttgttttgggaatggcttctgcaggtacccttacaaagtttatttgggtccttgcattgcattgcattgggtgtttttgtgtatgataatatgaatttttaagatttgaattcagttgataggctttaaagaaaagctgtcatgttttaataggaattttaagatttgaattcaggatttgtgtacaatgctttggtttgttgtttgttcgtgactaagatgatgtaaaaaaaaaaagtagccactacagaactgtttgcataaggaagattgattgagttttatgtttaactttgtgcatcttcaacagccatgttgcctggaccagccattcccacttttgagtcaggtatttcctgtttgtctaatctatatgtttctgtgtgtgtgtgtaagcaagagtggaaatagtatactgtacaactcctcatgaaaatctcatatcctctttacattgcagacgtttttggtatggcagctgattttgtctgtactttatttttgcgtaagaacatacacaatcagtcagatagctggctgcttactcgtagccattggggtagccgttgctgtcacaaggtatctcaacctattcttctaatagacttaactaatcaattccatcctgaaacttaatatgaacaaaaaaaaagttagtttaaggaagctagaaactgtctaaaaatgtatgaaggccaggattggacataacaatctctgccactttccccttattcaactagttctcataattcaaccactttagtgatgtcattattatgtgttaaattcaagaagtcgagaattaaattaactgctttccataactgttattgttatgtgagatgaaaataatgatattcaacttaattgttataagttgaatatcattattttcatctcatatatagatacaaaactagaaatctttggaaactatacaagtgggggactagaataagggtaactagatagctaaatacaaccattatacagctgacagttatggatggataaggaaagcaattaaaattgatatgctcttgagtattcataggttgaatgactaatgactatatggaattttcaatgaaacctacggtgcataccttggaaaagggtcctcgatgctcaagtgagcgagaattttctcaacaaactaacaaaatgtatgttaattctaaacactccaataaagccctcaaaataccttgctattaatattcctgagtaagaaatgacttaccatgattggtctacataatcaagaaaatgagttgttattttcattatgaaagaaggttctgagtgttcccggaattggggtttccttctgcttcaacgaggagcagaacctccttatgtatggttcttccacagtggattgtcccgtttattgtaacgatgcttcctgggagtgtttcagttatcacacatgagatgtttaaatagtgagtttaatattgctatatgtgaaatttggcctccacaatttgcgggccttaattgcagcggttctaatgctaatcaaatgttatatggagttgagcttgtgtggccagttttaatgattgcttcaagtgcttttcaagctggtgcatccattatcaaggtcaagataacattttaaatccagtctaatgctaccctgttataagcagaataaaataccttattgccttttttttttctgtttgaacaggaatttgtatttattgactcagcagctcgccttaaggtaccacaagtccaaaacctctcatggacttttagtttaattggtgaacatgataatttaattcgttcttaacacaatacacttttgttgtaaaattggactttgaggatcttctaaactgtttcacatgcagggcaagacgcttgacatatttgttgtcaattcatttgggtctggatttcaggtgatcttcatggcttcttttgattatttataatatagtgataatatgttctaaatggtttctacaatataagcagttaagatatgtgccaatctcaatctaatgagcgcacataaacaaactacttgattctaattactttgatagactttcttttagaacatctagaagaagaaagtttaatgtgtagaattatgtgacggcaacttgtagatttcaccactgtgtgtgttgattctcatttttttccaattggattttaatctctatgtttttaattttctgtaggctctttttgtactactctttctacctttcttgtcaagcatgaaaggcataccatttgcacaacttccatcgtattttaaaagtggcgtcggttgctttctgaacattggagcgagtacatcaggcaaactcttatgccctttatataagtacataaatatatttagcttctaatgttcataattcatggatatcaaatcttgacattcatatggtatgcatactttacaactgaaccagtacttcatatgataactcgtaaaatatatatcctaatagactaaagtacaaatattcagcttactgtgattctctactatctttttttttattacaatctatatgtagatgtacttgttggttggaagtgcataataatttcaaggcctctgtaacaaagtattgataagataaaagttacaataggatatactataagaacatactgatttttactcactatagtttttctcattgctcttatatcaggctgtgaaggttctccattgcttccattgctttacatagctaccaatcttatgtttaacatatcagtgctcaatctagtaaagacttcatctgcagttgtttcatctcttgccgtgatgttatcaggttctctctccctctgcgtaaaaaatatgattagcaaacatgcttgacatcttctaattaagctcttatcttatgaatctgacacctactttgtatcggttttgcagtgccagtttcaatttatatactttccgttccattgccatatctaccggtgacttcaactttgggccctttctttctctttggcagttttattcttgtcttgggtctcatcctctacaccttacctcaaccttcaaagcaacactgaaattagcttataaaagagttttcgattttcaaaatttgatgtgatgaaacttcacggccaaattgtgtatcttaacattatgtaattttattttagttttttctaaagaaatagtaagtaaaacgaataaataattgtaagtcttatatgacataataatttttgtacgtgagccattttcaatggaaagtggttccatttgtgtcatttcatactatttgcgccttcttaatctctaccgaatgcattcgaagagtattgtcacaataaagtttgttttggactttgttttttgagtgtagcgtaatggtattttacaatcatatattagcttaatagcttaaaggttctgggttcgaacccatgacctctccctttttcccatccctccctcaccactaagctagctttagtccaaagtttgttttggactttgatttcccaatgcagatatctttccattcatttaaaaaatcacagctaatttcattccatatttaggttagaggttgcatactcattaagtgaaatcgaaacatatatcatgaatacaacaggataaaacaaattgacccgcttaaacatgttatttttaagttggtcacttaactgaaaaatgacacgacattgacctactcgaagtatacacatattttgtgtaaatatttcaatgacaaattcttaatcaacagtggcgtcaaaccaaaaaaaaaaaacgataggtatttgttcaaataagaacgaatagatatgtagattaaaatataaacttaggacaaattatagtattataaaaatataggaagtctacgttgttacgcaaaattaatgtatcgatacaacacgttcctaaaatgatacgtgtgggcattttgaatttattttatgattgtgtttattgtggtagctataatgaatctcctgtaaatatttaaaattttttgaataatttatcatactgaaaataaaattcaaaattaaaattgttgctttcacacatgcataaatatgtgtttgtgtgtgtaatttatgtgtttgaataatatgtattttgcacacaacaagctgattgaagttatgtattttgggagagttctatattgatacatcacttttgcatgaagtatatactaagatggaaaatatcataaattttcggtcctataaattttttgagtctattatctttttacaatgtaattattgccaatttttccaagaaatttcgattaaaaaaatcaatggatggatattaagtagaaaagtgacttaaaaaccataaatctggaaatttcgtggataatcgactcgaaactaatacttttacaaatttgttcataaaaaaaatatacaacatgtgaactctataaggagtcattcactactcataagcttttcttatatattaacgtagttttgaaactcttatgacgttatttattttatttattttattaaaacgtctatatatatacattagattacataatttaagatttgatctcaggacccacatgcacccgagcataccttctatagccacttgagcctcaagtagtcctgaaaggttattttagtgttaattttttcttattgagtatcatatttatataataatgtaattaagtgtcaaggttgacaatttattgacacaaatgacacgatgtagataactcaaactcaaatacaaaaacagtacaattaattagcatgtcatacgatatagtacgataatacaaatgtgacacgattatctagacacacactaatttaaaaatatatatcaatatatacatatgaaacttatagcaattaatttatgttattgtgtcgacatgacacgattaaagtaaacataaatgcaacgcgtatattaaatgtgtcgaacgcaaacatgataagattattaaatgtgccactaaatccatttatttcgagtcacatcatttgtcgcgactacttcaaggctactccttattcaaaccgaaacaagtacctcacttacaaacaaatagtcctttgcgcaagcaagcgcgagagaagcaaagtagatgttttgctagaagcaagacaagggctatcgtaaaagtttcacttcccccaattgactaaaatacaacgccacctacttggattcaaaagaaaggccgatattgccataacaagacaatttatagtatgtaaataagatttttatttattacatattgtatgttttgttataattattcaaaagtattttattaataattgtcataatactatatatataaatgtccataatttataacctaaataaaagtgacaataatcttttcattgaattacacacatactcttttacaggcccggccctgggcataggcgggctaggcctgtgcttagggcccacccagccaaggggcccacatttttttttctcttttaaaattatacaatt

SEQ ID NO: 297368 - DNA, 1208 bp, Cannabis indica
ttttagagagagaaagagagtaagacagataaaccgatagtgtttcgatttcgaactatttttttccagaaaattaataagtttaaagtccaaaaaaataaaaataataaccactaaaggctaataaaaaaataaacacttttttcttgctttaaaaataaataaaaaaccttttaatgggttttttacttaattttctccgaacactttggttaactctttttggtaatctgtaacttgtattttgtggggtgtatcaaaaagagaagcgaatccagtaaagatgagctcggatttcgcgggttcaatgaattaaatttcaatttaagctttcgagtccgccactgattttcactcctgggtcccacgtggagttggttgggaccgttagatttaatgctgcccactgctttttttattttatttttttccttttcatgttgggatattttggtaaaaatggaaattcactcataacttggctatattcttttttttattttttcaaagtttgtgctacctttctttcgaactgaatttacaaaaggaaaaagattcatttgagacccatttcttccaggagttgaaatagctggttcaggccaagaacagaaatcaccaccaacaaaggcagctccaccatgatgatcaccattctcaaactgccacgtgttaccaatttctttaacactactaccaccattgtcaccaccagccccaccatctcctagaccaggaaaaggccgaattcctctcccagcccaaatcatcaagcccaccaccaagcccaagcccaagcccaagcccaagcccgaaaccacgaagagcaagaaagcccggactttgactgtttaaaagagaagtaaaacgggactcccaccacaaaacccaccaatgttgggcttaacatcaccaaaatgtaatcaatgagaaattatatggcttttttgtaattggtttagaaatatatggagaaataaagaaattttataaaaactggaaaaatgaataaaaaatttaaaatatggaaataactaattagtatatataatctctctcaactaatgatttggaaagttgagaaccccattttttagaacccaattttttagaacctccattttttccagtgttttgcttaagtcaagtatttttttttttttttttagtcaacaatccgaattcttttttattgagtaatagtctaa

SEQ ID NO: 297369 - DNA, 1101 bp, Cannabis indica
aattttattgtgactaaaagtataatttttttgtagtgtctattaattacacaatattttagaatatatatatataaagtactgttttcatatgagatagtaattaaatataaattcataatgtcttgtttagtaaaatagttaataagtagtaattatacatatgaaaattggtccaattgtggcttaattggcaggtggaaaccaattcttcgaaccaaattacaaacctgtgtacttttgttaagtaattacatattcttagttgtctactcaaacggttccctatcccaataagactcattccaatgaccactattaataatatctattttcaaacctgtgtatttctttctcaatggtgttacttaatggaaaacaatgaataaaataacaaccaatcatctttaaaaccgacaaatcatcattgccccacctcttgcctaagaatgcattctcaatagttttatggtcaatttttcagtgtcacaaaaaaagacatatatcaataatctggtttgattcttggccaaagctcattttattgcaatccaaactagtaatcaaataaaacttctcaatgctaaacctaatgcaacagctagaatcttttgcccaaaatttcttgggattgtcctgatgtacctcccttaacaaaaaactgtgaataacttgaggataaaatttgtacttaggaacatccaaggaatgaccgaattgagtatcacgaaacattcttataagatccttcgaaagagttttcttaatgttggcaataacactgtacgtgccagtagagtatcagtttgacttgtaataatcagaatgatagaacttgtaatctcaattcttcatagatgaacaacaaaattaaaaaataaacatgaatattataacatcaacgattttaaaactacattgaaactataagtgaactaataaaaatcattaccacaatacacctaattcatataaaaaaataaccagtaaataaactacattgcaactgttagagattttattacaatggaagaaaatcaagatattacaactctattgtaatacaatacaaggaccaacaaagagattaaataaatgtta

SEQ ID NO: 297370 - DNA, 2209 bp, Cannabis indica
gtttttttgactctacttaaacgagaagtcctttttgttcacagccattatttccctgagtaagttctcttcgtgggcacgtggtatttcctcttttattttgttctggtttttttttttttttttaaaataattgctaggtttttggggcatctgttttttgcttgcaatgcatacaagtgcttgtaagctgttgtattctccggatgtcctggggcgcctagttttaaagtcagtcctcctatcgttggttttaccgagtcttccacgtttttgaactttggggttctttgcgtgatggttgggtctttttaatatttccataaaagggtaggtccgtccctagttttgtgagttcattcgcatatattagagttgcgtttggcagttgtacaagtttttggtgcctagtgttttttgggggtcttggccatggtagcaggttatatatatgtctgccatgacaaccttgtctctttgttggagaggttgttttttcaaacatcttttttccaagccccttacttacaggcttcttcacttgtttcattaactgttgtgttcccttgcaactttttattatatgtaaaatgaatgaactagtaggtgatatctaccctctttagttctttttcttgttgttgttgtatcttttgaatggagatgatgataaataaaataaagatcagcgttttattattgttattattatttgttgccatctttgtattctttaatcagcgattactgtattgaaccaaaccaaaaattcaaccatatgatgatatcattgacgttgatcttgtttagtggaagtggggaccatatttaaaaagaagcttcctcattcatgtatcttaccttttatagagggaaatatatgtatctaatctttaataatgagatggcttttcttgtttggcattttatggccaaatgccatcgaagagccaacagcatatgatggctctcatttaactccatatagtcaaaaaagtcatctgacattatacaacgaatctaattttcgaaataataaaattattggttattataattatataaagcattattggaaactggaaagtaacgtattggagactggagagagtaaccgcttatataaagtatatatgatatggatagaatttgagcacttgcaacaaacgcttgagttatattgtgccatacattaacttgtttataatattaaaatatattttttcatatgcttttttgccgattatacaaatatatttctttatataaaaagataaatgagttttgatacgtattgtaaatgaatgtaaatcctttttaacgatataataacttatggatatctttctaccattttcggtataaatttaactacatagccattttacatcaacgggtgagactactctaaaataagttaagaaatattagaatataaggatatttgtagcaaaattctttaacatttataattgttacatattgatcttaataaaaaaaaaaggaacggtaaaagtaacttattttaccattttattgtactcgtattcttttttggttgttaaatatcaattcaaaaacacgtgatgatatgtttttttagcttatttaatacatagtctaataatatgtagccacgcgtttttaaattgatacttaaaaagagtacgaatgtaacaaaatcgtaaaataaggtatttttactgtcattattttgattggaattatatgtgtaacaattgtaaatgctaaggaggtttcgccacaaatattctacaattatatacatattttaaagaaagaagaagaatgagtaattatttggattttcttctatataactatcaatatacatgaataagatttaataagttaaaattatctcaatcattttaatgtgattactagggagaatataatggtaacatctaattttatatatgtattattgggaagtaatattgaatgaaatagaatttcataaatagataagcaattaacaaggtttgatggtttaatttttggaaagtaacattgaattggatagaattttattaggtaaaatatattagatatcattggtcaataataaatcatgagaaaattattgggccaagatgcaaaatagccctaaatctaacaattaagttaataaatgtcatttttttaaaaaaaattaacaaaatgtccattcaattaaaaatttgat

SEQ ID NO: 297371 - DNA, 1890 bp, Cannabis indica
agtgaaacataaacactatagacaatgttttagttagctcttcgatatcatcacaaaaaaaaaaaaaaaaaaaaaaaaaaacaaattgtgggaattgtgggacgctcataactaaagttatcttgattaatatacgaaggaacgctcaaaactctcaaatagagtcttcatggtttgatttacatatgagtaatggagaagagcattgaattttacaacaagcaaataatattaaagttaatgtagatgcgattttgttttaagaagatatgagatatggtttgggaattattgcccgagattcacatgacttattagtagaagggtgtaccaaacttttacgcatagtggaagtgggcttagctaaagccatgtgagttgaagaagtgttgagttcgctgaaaagtcaacagacaagaccttggtatagatcgattatttaacagtggtgcaatggtatctttgtttggtattgtaattcaagaatgtaagtcgatgcttgttgatttgagatatatgtcattttgttttgtaaacagtcgtggttggttgctcatgaattcgttaaagttccattttatatcatgatcataagtttaatttgggggatgccccaattaatttacttcattagttggtggctgaatttggaagttaaatcaagattgattttcctttaaaataataataataataaagaaattgtagggaaatttctagtactttccttttaaattatcaaacaaatttaaatatattatatatttatttatttatatcaaaagttgttgtttaattacctttggcatgttttttcatgaaaacatcaggcataaatatattcataagttggaggtttgcttttcaactagaataataactacgattttgacacattaattcattttttctttgcaagtgttaaatatagaacttctaggaagtgtttttaattaaattaaaatacaatggattaatgtcaaaaatagcctcggcaaacacaaattagagattttgcataatgctttgaaaaaacataaaaggtatatattgtcataagtaaatatattaccaataaattatagtttatttttaaaatgattaattaaaatattatcttaattatagcattaatggattagaaaatttagcttaattagacgacaacatgtttaagtgttttgatacaagattggtcaccatgattctactagctatagctgcctaataagaaagaagtaaaaaagtcattttccattgtgagttgttaattgttattttattatagatggctttgactaattaagatactttccttaaaaaatgttctttgaacaaatgaccaatcattactctcaacattcaactcataagattatatcatcttatttttcacctatttaatccacattaataaaaataaataatttaattcaaataaattttttaaacatgtatataatatacattcattttttccaatgtgtgaactctaaattaaaacactttgtaacacgtgtattttcaatacctaaaattagctaagacgagtccattctcaggtccaatcaagttaataaacaaaccaacagcaaaattgaactacttttctgaatccaaatgcaagcccaacttatagacactataaagtcggaccactttagtctggaaaaaacagttttttcccaaaagatgaaagatccatcagggcgtatatacggataccctcatgaggtaatttagaaaggatagatgaagaggtgccaagagacatccagaaagcatcctacgtggcatctctctgacgcatgagcccaccaaatcatggactttgtcccttacgttaggggtgttcataaaaaccgaaaaccgaaaccgaccatcaaaccg

SEQ ID NO: 297372 - DNA, 1841 bp, Cannabis indica
tttttttttttttgtaatttactaatataatatagtataacttataagtataccaattctaatttggcacagcatgtttaagagttaagacaaaaaatatatgcattatataaatagcagtttaataaattttaagagttaattaatttatagtaccaataaaattagatttggactagtttaagttagttatatatatagactttcgtgctatgtacaactgtacttgtatacaagcaaattattattattttttttttgaaaaaaaaaaaacaaatgaacagatagaataatccatggctgaaggagaatattttgtttttctgtttacgagtacaattgatattattcaatagaaaaacaaaaatttggaaaaatataatgttcattaaaaaataagacattatattataatgaaaaacctcatcttataatagattagaaatcccacgtactaagcatgcatgcatgcatgcagaaattagggtttttttaattataaaacaaagtaataaagactatcattaactacaattatatatacatcccaaacatatatattatataacaaaattacaaaaaatgacatgagcaaattattaagtgcccaccaataaaatcggcaagtacaatatttttcatcttcttttatttcgtacgtacgatagaatgagcaaaaacttaatgtttttttaagtattgtttggtaatattatttttttttaaaaaaaattattcacaaaaatgaaaccacattttttttttgaattttgttttagaaaaataaaaatatgttttgtaattaattttttttaattttaaaaatgaaaaattaaaatgtgttttgtaaattttatttttcatctattttgtttttatttaagtagggtttggaatacgaggtctagggatcgaggtttggggtcgggttcggtcggtgtcggagtcaaggtccgaggtccaagtctgggtgattaggattcgagtttggggccaggtactgatgcaagtcggggtgtggggagggggcttgagtcctggtccgagtctggggtagggttcggggttaattagagtcgaggtttgaggtcggggctgaggtccgagtcttggtctggattcagggtgaggctgggtacaattctgagttgggtttcaggttgagtcctagtctaggtgtagggtctgggtctgggttcaaagcgtggctgaggacagggtccgggtttgggtccgaagttggggatggggttcgggtgcaagtccaatttaaggttcaggtctgggtccagggccggggccggggctatgtttgagttcgggttcaggatcggagtccgggtttgggtctagagccgcggataggatcatcaagtttgggtctggggttagggcccatggttcgggttcggggttggagttcaggtctggggtttggagtcgggggtcggggcacggtccacgtttagggatcgaggtcgaggtcgtggtctaatatattgacgaaaaatatacaaatagattataattagaataaatctgtttaaaatttttttgaatgcaactttatttatattcaaaattttgatcttcattaaagtgaaaataattttatagaatgtgttttagtatttgagaacactcttaatttttatacatttaacctagtgaccttttttttttgttgacgctagcctcttaattccttggtattgcattggtaaaatagaatttactaattgtgatatgttgggaaaaagggtgttggcaaattaatgttggtattattagaactttttaccagcataaaaatgaaaaagcgctggcaaaaaataactttt

SEQ ID NO: 297373 - DNA, 3797 bp, Cannabis indica
gggccggagggccagtgttgagtacttcatgaaggttttaggtgaaagagtgcacatggtgctacattgggtgcagctggcttgcaagccttgtccaagagggacactttaaattttgaccttcaacaagagtgttggggccggtttccatcaagaggatggtgcgccatggatttgacatatgaagtttcaggaggaacttgtctagagggacataagcatgttgtgtaggtgtcgttgggtacaatgggttcgcgaacctcaccccgaggggtgcaccatacttaatccttatcaatcagagtaagcattggacaattatcgagtgaactactattggaggatgtgtttagctttggggtcaatgttgcatgggttgtttggttgactttgtgatggacttggaggagttcaagttgaaggaagtatttgagtgcacatgcactactatatgggtgattttaaataacgacagtatcataagttctttgatctagtccaagagtaggtgtggaagatcatcactgagaatgtggttctacggaaggatagggacaagtacaaacttaagattaagaagaatcttggagtaagcttaggagtcgagattaggagaattcacctgttgtccgtcgatgaaggcatccaattgaagtgggggagaatgtaacgtgccagccaagatggcacgatacaagctaggcggatgtccatgaggtggagtgatggccaagtggtggtgcatgttggtgtgcatgttggtggcatgttgatgccttttgtgtatggcagtaatttttgtaaatatctttaatattttctagatcgggacgggacttggtattcgctatttatttgggtctaaaaatacaatggtacaattgtatttgatgagctgtgagaattggtatatgttgatgaccatatgtctatggagccaaattcatatatattcctagtagaaggctaaaagcttacaatgctccttaagcgggcaaacttggtgttagctctctaccacccctagcaccttggtgctaagtgagctactaatagtcactgagactagtagggcagtcataggacatttttaaagaccttaaaaatttatgggacataatttaatagatgtcaaaagacaaaactcctaattagccttaaaaaattccatattcaattctaaaaatttcacctattataaaaacaaaataatttccttaaatatccttcataattccattaaaaattagatattattaatgaactttattagatattattcccattacaattataaaccattagcaataaatttatttaagcaatattcatatttaaatctatttaggaatccggaaaagatatggtaatggaagtacttgatctaaaatataaattatataatctaattttacgaagaaaaaataaaccgactgaccaatccacatgattaaaggttggtactcaggtataatttgtttaaaaatgtctggtgtgattatggtatggatcactcacctaaaatatgtatattatatacaaggaacattgaattcagacctccttgactatctaataattttctatatattatttttgttaattgtgtcatagaaagatttgtcattaagccgtggtcaaagccttgtccttcaagatacttgattaatttatcaccacacagtcacacaccttgtattgtaatattattctcttggacccaaaataaagacatttctggctctaccataaatataattttacattgggtaaatgacaaaataaaaaatttatatgatagggaaagaaaacacaccaagcttttggtccaaaaaaagtgactgcctcaacgatcgacataatttatccgagattatgatatgatataatctaaagtgactgcctttggcttcaatcaatattagattaggtggtggcggctgctacctttgttttgctcgttgggtaccttccgagaaggttcttcactataaaattctctccttaaaagggttcgacttgatttatcttctttctcattagaagggttgatttttattttgtctacttttctcaaactttggtttatccttttttttctcgaaactttactcactggtctctcttactcttaacagttggtcttgatttttctctctttctatttctaggttctactagttttctcgaggttgtttttcatggatacccttttcgaagatttacatggttccatgaacaataatttcagatttgaacatgaccaccataatcttgatcatggtttttataaaggtaatcgtgaatttatcgaccctgtttcaccgcccaccaattcagatcttcagggtgagccttctccatcttcaggctcaggctcaagttcggagggtgattctgtagaaagcagtgagtttagcaatgctattattctcagatttatcaacgaggtacttatggatgaacaagaagacctggaaaagaagccctgcatgttgcacgattgtttggctctccaaactgctgagaaatctttctatgatgtcatcggtgaagagtacccctctccactcccttgtttggatagaaattttgatgttccaaacgatcaatatgttcagagcttcagtaccgacagcagcattgaatctatcacagctactagtctaagcaacctggatgtcgccgaatccaattgggcctggaatcaagatgaagttggaccctttactgtccaaaactccattattgagtcacctgaagatacccttttaaccccagattcatcttggcatctgggaggaaaagctgttgcacaagggaaatctggtttctttcttccaacgaaattgaacgggacagcttttgccatccaagaaaagaaccaaagccattcaaccacagtaaatggatcagaaggaaagaaaggtcatcatcgtcatagagagtttggcagtgatagtccagaagaagaagaagaagaaggaagaagaaccaaacatacagctgtataccccgacttctctgagccaacagagatctttgatgaggtactcctctgtcctaagccaacactacatgacaaagagtcttgtggtttggatgaaaaggaagacaacaagccaaggcaacagaggaaaaagcagcagcagacaaagagaacgaagcagaagaaacgaaacagcaaccatggattggtggacttcacctcacttctaacgcaatgtgcacaagctgtggctagctatgaccaaagaacagcaacccaactccttaaacagataaaagatcactcttctcctcacggcgacgaaagccagagattagcttattactttgctaatgctctcgaggtacgcttatctggagggactccgtcgtataatcatcttggcagcaatggagcttcagcttatgatctcttgaaagcatatcaagtctacatcaccgcatgcccattcaaaagaatgtcacaaatttacgccaacagaactattctaaagctctcggagaaagcaaatagacttcacataatcgattttggtgttctttatggcttccaatggccttgccttatccaacgcctctctgaaagaccaggcggccctcctatgctgcgcttcacaggaatcgagtttcctcagacgggttttcggccttctgaaagggtcatccagacgggtcggagattggccaactactgcgagagattcaaagtcccttttgagtgtaacatgatagcacagaaatgggaaactgttaaaatcgaagacttgaagctggacaggaatgagttg

SEQ ID NO: 297374 - DNA, 4868 bp, Cannabis indica
atagatagatagatattgatagtttgttagaggttgtgaatgtagtaaatcaaatgtgcttattattttgctttaaatggctcttaatgtgcttattagtagctttgtataggtaatacaaattcaggatctattcttaaataccattagtttattaaatattttcctgtacgattatcattcccatttaccttgatttttcatttcagaattacaagaaggaacctatggactagcttaagttgctcaattgttgtgaacagatatcttcttgtattccaaatttcttgtaccttaatattagttaactttcttttaattatgtccagctaaaagcaatagggctcccaacaatatgtttcccgtctgaccattcgagacgagcaaagctggttgtacctgacggcaatgaaggggcagtgaatgtcacagtgtatgttttcttctcatattcctcactaaagctcagtaattctggctgaaccaagattttaattgatgaaatatatgaagatactttgaccttatatgttgctggcgcaccaacatttgtcagagttcttgtgtatcttgcactgcttgaaacactagaactactaccaagtgctgtttgaaaaggaactgcaaaagatgggtagttaaaatctccaaggttgtactttttggttacatcacaagtgtagtctttgttggtgacaatcttaatctcagttgcactgtaatttaaagcacagaggaagcttatgtagtcgtcaatagtagcatcataaacaagaccggggtcaagagctgccactgggtctacatggcctgatccatagtcaaatggtgttgatggatttccggtagcaacatctattatagttttaccattattatacattgaataggcagtagtcataagagctgatttcacagctgcaggactccattctgggtactcagccttgaggagggcaaccagtccactcacatgagggcaagacatggatgtacctgaaatgatgttgaagcttacacgcctcttgtcattgtctaatccagttggtgcagctgcgccagtccacccagcaagtatgtttacccccggtgctatcaagtctggtttaagtatttctggagtgattggatttggtcctctagaactgaaagctgcaactactggtgagggttgaactcccaattgtgtcgctcctttggagattgtggctgttggattagcctcagaactaagataagcctttatcaaatcaccatttttttggccaacagctgctgtgggaaggagatgtgcatcagccacaagttcctcaccataagattctgtattagacaagatcatcccaacgccacctgcatctttgactacttgacccttttgagcccttgagtttccccctcgatcacacaacacaatttttcctgagaccttttcagtaaccaaactgctaggcaagcatagattaccatttgtggaattacttgccttttgagcataaacaattggaagtacctcatcagacaaaggttggcccccatatagtgaaacacctttgtatttctgtccattaccaaggctaacataaactgggaaatcacgatctaatgttcctgcacccacagtgatcatccaaggtgcaacattggataagctccccgaacttggtccagaatttccagctgagagggacaccacaattccattagccattgcagcaaaagcaccaattgctactgtatctttggtgtaatcatttaaacttccgccgatagacaatgacaaaacattgacaccatctttaatagcctgctctatacctgctaatatatccgtaccaaaacatccaccaacccagcacaccttatacgtggctacccgggctgtcgcagccatacctcgtgctgtgccagaagcaaaaccaaataggctagcctctgaaacagatgagccagctgcggtggttgtggtatgagttccatggccttcgtcatctcttggtgatcttgattctgttttgttgtcaaccggtccaaatgctctttcgtacccttccgcgaaaaatctcgcaccaataagttttcggttacaacttgaagaattgaatttgttgcccacttggcactcccctttccatctagttgggggcttcccaagcccggtgtcatcgaagcttttgctttcaggccacacacctgtgtccaaaactcctatcaccacctcgctaactttgtctgaggttggaaagatagattcgctgtttccaagcccaagaaactcaggtgttcgagtcgtatgaagctcatactggatttcaggtaggatagagagaacccctggtttcttttcaagctgctgggcttcttcttccgtcagccttgtggaaaagccgttaattactttgtcataggtgtaaaacatttgagccgaatgagaaaccgattttaaagatgactcgtaccatttgagatggtcatcagaacttgcaggcttatgagacttatccatatgaacaatgtaagtcttcttcacttgtttgtgttgtgtatcggctgctgctacacataaacggaaggcagtgctcagaagcacggctatttgcaaaaggtgaattagtaactccatactattatgaggttttctcatttttcagtttctgttcttctctcggcaaaattttactttttctttatggttttttctcaggagtcaggaatacagtttctttggttctcaattggcttggcatggaaaaataactttgaatcttcctagctatataggtctcgactccactcaaatgctgataagatgtgttatggtggggcaattaaatcaataatacgacgctatttatattatcattattattacgattcctaatttattagacccaattatatgattacatataatttactttccatattctctttctggtatagggtgtgaaagggatgtggatcactttcagaggtagcaagttagaagaagcataactaagtggggtcaagtagagttcttacttcgctacaaaaattatgactcacggtctgtcaagtttaattattctaccttaactataatgttgatccacgtcagaactcaaacactcatctacaaattaaaaggtcagaacccttaaagttcttattttatgttccctttagatgtaattctcgatttcccatttcataaaaaattcacctctgcatttgcattgccatgattggataagtcattggagttttgtatagcaacccacttttattattatgttcttatctttagatcttctgttacatacttatataatgacaacatccacaatgttattggttaatgattcacccccgcacattttggtggtccattatcgaagaatcgattttagatatgtcactattggacctaaatgggtgggcacaattttgccgactgcattagttgttgattttagtatctttatcatctataataataatttgtctgccacttccaaatccagtgccaaattatttaagtacaatgtcatataagctaaattatctttgttaatgtgcgattgttcgactaagattcgtatcagttattggcgtgattcacttttatcaatttaatcaaaatgtgtaaagaaagattctgcaaaaagaacagatgtgtaaagaaagagggcaataccatgcgtttgacaatgtacaattgaagtatactaagtgaagtaacaataaatgtgcaagcaaaacacaaacgaatcaatttatgaccgctaaataatagagtagaaggaaaaatatgttttggagtctccgtatgcttttattttttgtcgttcatgacgtaaatgctgaagattaataaatattttttttgtttagcctatgttttgacatttagtacctgtcttttatttaaatacaaattaggtatcttatgtttttaataatgcttaagtggtaatttgtattttaaaatcatacctatttagtattttaaattcaattttttttgataaatttttatcaatacagttaaagtgtcaaaaaattttataatttctaaattcaaatttaattattttattacatataactgagatctggttaaattaataaaattttattgattaaattttattttagagtgccaaatatgtataattttaaaatatgaggtaccaattaagtattattgaaaacacaaggtactaaatatgtttttcatgaaaacacaaagtactaaatgagtatattcccgtttgattttggtgagaaaagaaaaagtaagaaaaaatgtataaaaaaatgaaaaataataaataataaatttttttaatgttgttgctcacactttagttaaatgctagaaaacaacttgcgcttcgcgtagaggtgtttaaaatatttattttcaatagtttggatttttatctcaatcgtttattaattttattttatatttattgttattattaataaataaaatattgtaaaaataaaaatgataaaataaaaatctgaatttgaaattttaaaatatctaatttagtgacaatatttaaaattaggtacaaatctatccttagaatatgtattacaaaatataatagatcaataatttaaatttaagcctagattaggtatttataaactatttagaaatttttaattaatattttattatgaaatttaaattatatatcatacatatttttaaggaatatttattcaatttaattactatatttaaagtcgttgttattactatttctcatttatattttatatatagtctctactacatttaagttaatttaattaggatttttttccccccaaactttgacatgtaccaaatcatgccctctgaa

SEQ ID NO: 297375 - DNA, 995 bp, Cannabis indica
aaaaaaaaatgaaaatatatattctctttctttttgacaaagtttattatttattatttatttggtttcttttgcatgtcatcagtctaaccatgaataatgctagggtagacagtactatataattcgattactgcaacaattaaatattaaacttttttcacatgtttcattttaaattaaaatgtgtgaaccaataatagatatacgtacaccgatagttagcaaaattatattaataaatattacaccaataaatcatgtaaaatattgttttgtgcccctttgaatattttatattgctatagggcattgtaatttaggctaggactaatttataatatttattagtctactaagtattgaatttcataaataataagaaaaatttgtaccatatctaggggtatttcagtaaacttgttatttgttttgacatttaagaaaatttatttagtccaaatctttttcgtaattttattcgatgtaagtatttaagattaattgtatatttgtaatttatatttaataatttgtcgtgccgtaaatatagtttaaatattttgttgaactcacgatggctatttttttttataggcatggtaattatttagaacattatttttagcactacactattctagatttttaaaaaatttacagagatgatcttaaataactacaatatatacgatcatgaaaataattaactaaaagactactaaatagcaaaacaaataggaggtgttggaatttgttaaatacttaggttaaattattaaaattagtagagtaatcaatgagatatgttccacctaatagttcaagttaatattgaacttgctggacgtgttagaatttgttcttagggtctcaaaacttgaatttgagtaaactaagagcatgtttggtattgttttcaaatttttttttttaaaaatgagaataaaaaatagtttttaatgtttttaaaacacaactcatgtttggttagt

SEQ ID NO: 297376 - DNA, 1834 bp, Cannabis indica
ttatttactaatgtagtggggatcgctgaatgtatgcaataaagcatatcaagcattctagacctaccatttgataatgtaaatggtgacagcgtgtcgctgtttaggtaaggatggggtgtagatttattctaccaaaacttatcatgaactatgtattttttagggggggaaacaatgttgtcttttattctactcatgaaaaaacgtatttatcatgaactgtgtatttattagtatcggtttatcgtacctcaatcgtctaatttcaaacatcataaaataagcatttaaagaggacaataccactatcaggaacctatcagacattaatcgttccatttcaaacataataaaatatgcatttaatgaggaactatcgtaccattatcaggcacatatcagactaccctcgtcttattccaacataataaaagaagcatttgttggggtactatcgtaccactatcggacacctatctgaaattaatcatcccgttttaaacataaaaaaacaagaatttaatgagagaacatcgtgccactatcgggcacatatcagactaccctagccccatttcaacataataaaattaacatttattgagatacaatcgtaccactatcgggcattaatcatctcatttcaaacataataaaaaataatcatttaatgagggaccattgtaccactatttgacacctatcggactacccttgttgtaccacaatctcttcattaggttggttgcccattttgttcctatgaatatatattacactgttggaatatctattttactttctcataaaatacgatactttgaaatcatcgatgttgttagctaaagtttaaagttagaatcttcaattgatgttctattggctcttatgggggagatcaattaggtcgttaagatcttatgtggattgtctggttactagttgccataacatgtctaagatgtcttgtgggaaaggtcgaatgggaccacactaggtaatagatcataaaaggctttactaaattagaagagcagaaaatgtaccaacacaatgagttggcattgtgaagtgattaattagattaactgtaactcactaagttactccaagtccctaggtaactgttataggtgagccatatatatggaaggcacatatatagggctcacctgtgataataggacttgtggatagggttgattgtccattttatttctatgaatatatattacactattagaataattgtttcacttacctataaaatttgatattttgaaatcgatgttgttagctaaactttaaagttatgatcttcgatcgatgttcgattgggtcttatgggagagatcaattaggtcgttaaggtcttatgtggattgtcgggttactagtagccagaacatgtctaagatgtcttgtgaaaaaggtcgtatgaggtcacactaggtattagactatagaaaactttacaacgaattgacattgtgaattgatgaattgagtaaactgtaactcaccagcttactctaagtccaggtaactatataacaggtgaccctatgtatggaaggctaactatatttatgcacatagtcgttccacattcccataaaatatgatatttttaaatcatcgatgatgttagctaaagtttaaagttaggatctgccccataagacccaatcgaacatcgtaacttttatgcatacaatggttataagtagctaactaagtgtgtgtgtctaagtgtgtgtgtttgtgtattgtgtaaggtaggggtgggcatctgatctaatccaatctttttcttctcatctgatccaat

SEQ ID NO: 297377 - DNA, 6007 bp, Cannabis indica
tttgtttgttttttttttgttgtttttgtgtatttgtgaaattaaccccataaacaaagcaaccaaagttttaagagtcaacaaaaaaacaacaagaagcaggattggaacaaaacaaacactttcctctgtaagtcatattcattcattactaaaatacccatcaatagttttggctcattcttcacacccattactgtattttctttttggggagttttgatacctttaatttttatttttttcgatcgagaagaaagaaagtaataattgattgattgatcttcttctttattattattattattattattattattattattattattatctttttctagtggaggaactgattggaaaagggtcttcctttctctgattcttcataagatttctgctttttttggttaagattgatcctttttagttggagtttttcaattcaactcaaatgttcaaaattttaatctgggtatagggtgaaagaagctgagagtttgagaagtgaataaaaaaaggttcttggagtatgagattgaacaaagcacacggtttggtctgagtttcagctgtaaaaaaaggttgggcttgattttagtttccagatgagaagtggggtttttatgcaccctttaattggcttattcaaatattaggtttagggaaaaaaaataataataaaaattcttgtttttctttagctcttcagtatttattcattcaaatattggggtttaagcatttgagctttttatgcctttgatttggtcttgatggagtttttagtggctttatatgcggtctattgttgatagtttagtgaaattttagaaggtggaaacttttgttttgtttatatttttagtatgttaaaacagattctgagtaagcttccccggaagtcttctaagagcaatgaaagacatgaaaatggtggaaactatgctacttattttaataatgcttcttctactaattcaagaagtagtgagttagaagagagtaacaagtctagaacttcagttatttctttacctactggtaccaattatgcttcagaagtggagcaaaatcatcatggtagcaaaaatggtggatttgcgaattcgaagcagaatggtattgcagtgtcttcttcttatgaagcattgcctgcatttagggatgtaccaagttctgagaagcaaagcttaatgataaagaagttgaatttgtgttgtgttgtgtttgatttcactgatccaacaaagcaccttaaagagaaagagatcaaacagttgacattgttggagttagtggattacttgacttctgcaaatgataagttttctgaaactgttatgcaagagggtattaaaatggtgtccataaacttatttagaaccttcaatccacaaccgcgggagaacaaagttggagaagggtttgatttggatgaggaggaaccttccatggatccagcatggtctcacttacaaattgtgtatgagttttttgtaagatttgttgcatcatcttatatcgatgcgaaattagctaaacgatatgttgatcactcttttattcttcagttgcttgagctttttgactctgaagattttagagaaagggagtatctgaaaaccattttgcaccgaatttatgggaagtttatggttcatcgtccattcattaggaaggcgattaacaacattttttatcgttttatctttgagacagagaagcataatggtatcactgaacttctagaaattttgggcagcattgtaaatggatttgctataccattgaaagaagagcacaagttgtttcttgtccgggcacttattcctctgcacaaaccgaaatccttggtaatgtaccatcaacaattatcatactgcatcacacaatttgtggaaaaggattgtaagcttgctgatacagtcataagaggcttattgaagtactggccaataaccaatacttccaaggaagtgatgttcttagctgaattggaggaagttttagaagcaactcatctgccagagttccagcgatgtatggtgcctttgtttcgccagattgctcgttgtttaaacagttctcactttcaggtagtgacacactcttcatttgtgcaacacattattgcattttatgcttctcttttgtgtataaagctttttaagacagggaaattatgtatgtggaatgttaaactagtgcttctgtgaatctttaacacactcaattgtttataatgtttatagctctgcattcacaatgtttctaatggccgagttaagtgaattttattaaaccgattcttcgtagttatgttggttggaagttagttaaagtttctattaaatactattattttagttagtttatgagcttagcttgctggaaatcagtgcacatttcaaacaattttctaataaatttgaccaaatttaaaaacccgaaagccaattcaacaaaccttcttgccagtctgcttgaacatgatgcattttcttaacattgtagcttggtgacatgccaacatcccaaactgcatatattgattcgaacagatctggttaagatatgttctcaaatagtgctcgttgttattgttttttcaggtcgcggagagagcattgtttttgtggaacaacgatcacattgagaacttgatcaaacaaaatatcaatgtcattctaccaataatcttccctgccttggaaaataatgctagaaatcattggaaccaagctgttcatagcttgaccttaaatgtacgtaagattttccacgatcttgatcccgagctgtttgaagagtgcttacacaagtttaatgaagacgagtcaaaaaaagaagagattaaagcaaggcgagaagtcacatggaaacgcttagaagagctcgctgtgaagaacttcacaagtaacgaactagtgctcgtttcgcgggaagctcctcatcatgctacaacctagtttagcagaaaatggacaatttgaatggcctgcaattcttttttcagttgagatgagattggtaaagaaaaactggtgagtagtgaatggtttgaatagttgaatgttttgttcatttatctattctcacatgcttcaaagaaaagttatctattctattgggaagcactttgttttgtttatcctttttttcttccttcagaaataagttaaatcattattttttcgaccgaagaagtttgttataacggggtgcaaaatagcacctgaagaaagaaaaccatatattcattattatctgcatgttagccagtttgttataatcaaattagactatagttaagaattttgcaatctccattaccaatgcagactcatttgttaaaacagaagtagcatatttatacaatcatatctcaaagtattatgatgcagtagcttttgtcttatgttgcatttatcaaagacaactactatgatgatttttccttctagaataaaggttgagattttctcaaatctgcagttttcaactttccatttacttttggagttttatgctggtcatatgaaatattgttggatatgattagaacatgaagatgtatatcatgtagtcagatgttttgtgtcaaaggggcaatggattattgctgaagcaaatctctgactctataccctttgcatggttaactattatgcttttttcttctggttaaatgattaggggcctattattagttacttgttttttcttttcttaaaagaatgttacttgtgcatattcttacctatatgagcagggatggcaagtggaattcctatgagcccggtgcctgagaagcgaactgcagaaactcgggatcctgttcaaatcaagccatgtctttttcctctaagttgacccatgtctttttcctctaacttgcttccttaagagaatcataatcttgtcttcagttctgattttggccacataatcttttgtttattttccttattactttcttcaactgaaccaccaaatcatgcaactcaagcttattgctttcttctcctccaaattccatgatgatcgcgaccgctcagtagtctcttgcaatggtggatccattcttcccctcagattcaccacatgggatatcaccatggaaggcctagagatcttctcattggatgatattttgtcacaacttctatcctagtagggtaaaatcatcactatgggtatccattactttggaattgagttttgctaaacttggaacagaaatttctttgtcgcaaccctccctgactcaaaggatgttacgccattgtatgttctatgttgaccgtcaacaaactcgctgaaaatcaaaatggactaagacaaagcaagtacaactatgttagtcagacaacgacggtattaggatcgggagctactagggggatgaacctgcatctctgcaagccgagtcgaaagagggtgtgattctcttgtcactcccattgccatgggagggagatgaagcactaacacttgcaacccacacaacaaggaatgtggaaaatgtggttccatggacaactttgtgtgagatgcaaatgcaaatgcaaatgccaatcccaatgtcgccacagtaaaaaacgctaactgaaccaccaagaccggaacaccaccctcgtcttcataatccttttttacattgtaaggattaattggaatgagttgttgtattgaacccatctttggattttcaagtatctcagacagtttaacattagctagctttagctttcatgtaactgatactctgtcgcctttgagtagttccaccgataccacatttcgaatccttccaggaaaaggagagaattcacataaacaatgtttcagcctattaacactgtggctagtttcattgttgtataaagaaaagaagaacagggacataaaaatgaggactaggtgatggagaaaggtaaaaaaaaaaaaattgaatgaaaataatttttttgttctatagatttggcaaaccacaatagagtcagtgaacacccattaagaactaaaagatagtaagaataaagaactaaacataaatttgggatatttgcggcgaaactctcttaatatttataattgttacacatatgatctcaataaaaacaaaaacagtggcaaaatttccatttgttacgattttgttgcacctaatcttttttcacggttaaatgtcacctacatccgttaagtgccaactaagagacacatgttgatattttattgggtcacatgtcaaataataattgattttaaaaaaaagtaattttaaaaattttaattaattaaatttttatactattccttttcgcttttgaagaaaattcctaaactctatcctaaagagcaaaagctctcaaaaaagaggaagagggggatgtcattaaagattcatggcatcagccatgagaaattgttgaatacaatttggataatctgacaactaaactttattagtagcgacagacaaagcatacttagcaaggttatgggtaacaacgttaactgtcctagaacaatgagaaagattcacattatgaaagagagccaaaatacaatgaatgtctcggagaactaagcctagagacgagtctagagaaatattgttgttaatcttaataactacattcagacaatcaaattcaaattggatattatccagaccaaaaagatgacttagattcctgcatggcgaaaagcaagagctttagctacttcaacttgaaaaaaaccaatcacgtgccaaacaaccgaggcataaacaactccatgaacgtcacagataaccatgtccatgccacagaaactaccttccaagtctaaagacgcatcaatattgatctttaaacaactcgtaaaaggaggtgcccaacaatgctcaataggaggagaggaaataggcatgacatcccaagagatctctgacaactaatctcattggaacccaaaaaaggcttttggtaatcactcaggaaatcacgagccc

SEQ ID NO: 297378 - DNA, 7781 bp, Cannabis indica
ggagggtttttccaccaaaatatgaggttgaatggttttttacaagtaaattaatagttaagagagttttgctgcaaattactcgtataacaattgaaacgttaggagggtttcgccgcaaataccctaaaagaaatagagagccaagtgaggaaggcacgtgagaaggcacgtgcactgagctgggactgcaagagaagagaaacacaagcagtcttcgtccccaaaaacccaactgccaaatgctcttcggatccgttaattttacactctcacatctgattttcccccaaattcttcaatttccactctagggtttcctccatcttttcaattttcacaacacactttctcaccaatctcttcctgatcaagattcaagctcaaggtacatcaaatacgaatttaatttacttgatcattgtatttacgtgaagctttttcgttgtgacattttttctgtacgttttgatctcgattagtatctgaattttgtaattcatgcgtactgccggattggaacgcgtgttcttcttaattagctgttgaatttgagtcatttgattgtgtgtgtacggggatgcgggagattttgtttaagttctagggtttttgaaaattttaagcttgagttcttgggtgatttggtgtgtgattttagatgcatgcatttgccttttgtgaatttgtttgaatttttttgcaggttttgttgagtaagggagcttttgggagttggtttttatcagtagaaaaatggtaagattatattagcagtatgcgattgctatgttttcttgtcatagtaaaaaaatgtaaattgaattgaactttgttttttgattgattctcagaattacttgatcggagctttcaaaccatcttgtaacatatcaatcacatttaacgatgcgaaaaaccgcaagcaggtactaacataattattgcaagattgtaatttgaaatttgatgctgttgtaggaagtggaaatttagaaaattagaagaggtgggtatagaacttgattttggagtttgcttttgtttctgatttaaggttccattcaagaaggaaaatggtcaaacagtgatggtcccgctatttcaaagtcaagaaaacattgctggcaaggtgtgtttactgataggatttatctgattctttgtaaacattaactttagttatattctaaagatatttttattttgtggcacaatttcaggtctctgttgagccagttccaggaaagaaggttgaacacaatggtataaaagttgagcttctcggtcagataggtaagtgtttgatgcgacctttctctgtgatatgtcgttaaaaaaagaggagatatactgtgaagactctaaaagtgaaaaaaaataaaaaattgtttccatgatattcatgaagtcctgacaataatgaatgtttgaacatttaagatgaattactgattgtttaattgatatttaacctttcctataatattagtaccaatggaatctgcctagtttaaactcggaataatttttttacatgtagtgagggtattttgcatgctcttttctaatgttctacccattttctgcattgaattattaattccatacttgttagatagattggtcttagtttttgttttccttatataactatgaagataactttattaattgtgttttactttgcagagatgtactttgacagaggcaacttctatgactttacttcccttggtcagtatactttttgctttttgctattgtcttgagacaatttttacttctgcaatgctgaaatttatttatttttattatattttctcatgaaaacttattcagaaaatggagattcagattattttgagcttgctgtattatttttcattgtagcaatagttgataatatctttttcatttcaataactagatatgatgaatatataaatacatctgctgattggatttctagtaatacttttactttgtatgatctttaagtttgttgaattcattgtagttcgtgaactggacattcctggagaaatatatgaaaagaagacatttccatttgagttttctacagttgaaatgccttatgagacatacaatggggtgaatgtgaggctaaggtgaactggttgcacctttgtactgttaatttattattttcatttgctgcctccatggagcacttaaatgaataccatttttattgactcctatgtgatttgtgatgttgaggagatgtacttattcgggattgtaatggcttgctctttctaggtatgtcttgaaagttacaattagccgtggttacactggaagcatagtggaataccaggactttatggtaatgattgatttctttttactatatagtgtgggtctgtttacatgtttctatctcattatattttctaaaatgtaaattcgacagttatattgctcaagtgttttctttattaattccgaggaagttagaacagggttcagtctccattattatttatttgcttatgcttgaaattaactcctaatcgaggaagcagtacaatagttagttagagaatgctgggtactattctttgctccagtttcagacactctttaagtataatttttacctcttttgtgattgattgagggataagaaaccattgctttgatatccaaaagtggcagtgcatgattgcagttattatcaatcttactttcataagtctctaccttttggtgcccccttcaaaggttggggaaattcaacattggaccgatattattggaggtcaatgtaataccaagctatctagtatctaaatttcttcctatttcctttcccgatacctcaacctattaaaactatcaaatatccaagtatatgattgtctctagcctgtctaactaacatgtactacaaattaccatatgcctgaatgaaagttctttacgtcttgtgtactttgattggttgtaacaccatgagatacttattctgtttacgttttactttattgtgattttatgttttgtatgaacaaggattgcatttcgagtttctaatgtttcaactttactatttaggttcgtaactacaccccacctccatcaattaacaacagcatcaaggtaaggcccccactatttttttttattaattgtaaattctgcatctcttttattagaactttgttagatattttcaataggagatagtcttccatgcacgttccatttgttagttgtattttactgtttttatcggtgtgctgtccaattacatatcccattgttagtcccctggatgattgttgaaatccacatctttgcagatggaagttggaattgaagattgcctgcacattgagtttgagtacaacaaaagcaagtaagtattacactttttaccatctatgttatacttttctgaagctaaaactggattttcatgtttctgacccattcacatcttgttttgcaaccaaggccgtcgctctttttcagtaataaaaaattgggtatatatatcgacaacataattctgtaagtgcttctgttacagatttaacattgtggtataattattgcagatatcatctgaaagacgttattattgggaagatctattttcttctagtaagaatcaagattaaaaatatggatttagaaatccgacgcagagagtctactggttcagggaccaatacccatgttgagactgaaacactagctaagtttgaattgatggacggtgctccagtcagaggtaaagttatttattagtggagatttgtgaaaaagagtagcagagattgatcatttgctattttaacacttgatgaaacttggatgatgattcaatgatttttcttactcgcttaatgcttaaatttgttttcttaggtgaatcaattccaatcagactgtttctcagtccctacgaactgacaccaactcatcgaaatatcaacaacaaatttagcgtcaagtattatctgaatctcgttctagtcgatgaagaggatagacggtacttcaagcaacaggagatcacaatatacaggctggaagaaaattcgagtagtccgtcttaaatggcacgaccagcattcaactagtgacaaccttgtaaagcctcgtcttgaactttagaacctattttggttgtgtaatcgtctcatgtgttgaggaggcgttgttgtaatggcttctcgttcttgttgatgatgatgacttgcagttttttttcttaatttttcgcttatggttgcaaaattatgtacatgggggggcgagcgacacagagaagccgggaaagtcttgccaatttgattttgtgtttagaaaagtgtttcaaacattgataatatgctcaacttttgagttttgatttaccatggcaggatcataataggaacaaattctatttctttttatcttttcttgaataattgctgcttttttatgttttcatggtaaacttgacactctgtaatcaatgaagacatcctcttgggaatttatgatgactacttatatatatatatactagtgattgcacgtgacaacttaatttttttaacattataaagaaataaaaataattataattaattacaatgctttgtttttatttgaaaaaagttaatacatttgtttttctttcttttatattgaaatgaattttcaaaaaataaaatatttaaatatctagtttgtatatactccataaataaaaacatgtaaaatgtaatagattcgctctggacaaataattttattaaacatgtaaagtgtttctttaataataataggtaatagatgaagtgtttcttttattttggtaaatgataataaattattttttttctttgatagataatattttttttttgaaacaggatagataatagattaacagattgatattgtttttccctgctcataacacactatagtcactgcatgaaacgtaatcaccaatttttgtttgtttttaaattcttttcaaatatttctttttccaattttcaaagttgcaaatgagaacataataataaactaaacgacaaaaaaatgaagaagcaaaaagatgttatacaaaaattgtcacatagctaaataataatattttaattttctgagaaggaggatatattgatttttatatatcaagaattgtctctcacctttgtcggttaagttagttggtctatcttgttaattagacagttggttcctattttcctgtacttacagttagagtttaggcttaactctagtgtgttagctaactctggttagcttaatttatgttggtatatatactggtgtactctgtattttccattcattcattcaatctgaattaatacaatccttttctcttctcttttcattttgcaacatggtatcagagcaggaaagacaagctttcccttagatttagttcttctcccactttttcttgccgtgctttcttctccggcgaaggtggcgttccactctgttttctttctactcttcatcgtttcctggtgttcctagtgttcttggttctgtcatctttcttctagaataacaatgtcgaacaacgattaatcgtcccactttgaggttcgatccacagtctccactgttcaagaaaattaaagtccacatattaaaagtcatgttgaagatccttccaatccatattacctgcatcataatgataatccaggtaacaaccttgtgtctcatcttatgacgagacaggacaactatatttcatggagcagggcgatgcaattggctatatccgtgaagaacaaactcgggtttcttgacggttcaattcctaaaccctctctttcagaatctatattgtacaatgcttggattaggaataataacattgtcatctcttggattcttaactctgtatttaaagagatttcctctagcattctacagtgtagaagaaatttggaatgacttaaaagtcaggttccatcagaggaatggtcctcacatttacagcttaagaaaaggcctgatgaacttgaagcaaaaaagccaaacagtgagtatgtacttcacaagactcaaaactgtttgggaagaattatccaactacaggccatcatgtacctgcaatggttgttcttgtggaggagtcaagaagctccaagaacaccatcgcatggagtacataatgtcttttctcatggggctctctcatcatttcacacaagtttgaagcatcatccttttgatggacccattacttgaaatcaatcgagtctttcacctaatatcgcaagtagagcatcagaaaggaagtcttgccaaagatagtaacactaatcaaaactttgcttttgcattctaaggtgacaaaaatgctacaagaaaacttgattctcaaggggctaagacacatcaacccaaacgcaacagaccattctgcactcactgtaatattcttggtcatactgtggagagatactacaaaattcatggatatcctcctagatacaaatcaaatcaccctaaagaagctgttgcaaaccaggttcaaaccagcaacaatccaaagggagcctgtgatgaagggactactctccttccccaacttaatgttgtgtaataccaacaactttaaaatctccttgctggtcaacatattggtatgacaaattcagaacctagcacatcaacagacaccacaggtatcatcttatctttcaattcggttgttccccaaaatgaatcttggattatagattcagaagcaacaaggcatatttgcaacaatgtcaggttatttcaaatcatttatctcatatccaaaacaaatttaattcttcctaacaatgaacaactttctgtagatcaaagtggatctattgtcataaataatgatttaattctcactgatattttatatgtccctagctataaattcaacatcatatctgtcaacaacctaaccaaaaatgataactttaaagtcaaattatatactgacaatttttacatacaggacaactttcacaggaaggtgattggcaaaggtaagaacaaggatggactttacatattgggttccagtgttgcaccagaaactgttctcaccgtttcagctgatgtgtggcactcaagattgggacacccttctaagaaacgactttctttactcagtaatcaattacaatgtaacactagttctttacatacttctactccttgctatatttgtcctaaaactaagcaaaagaaatttcctttttcccataataatcattttgctgcaaactagtcgaataagctcgcatagtgcgagttgtctgttcatattcttgcataagctcgcatgcttaaggtacatacaagactagtcgaatctgggatgtctgcgttctgttcgagttgcttatacgaacatcttataataagtcgacaatctaaggcatacaaatccttattgggttattggggttgttgggtcatttggaccagctcgcacagtaaagaatcgatctttacaattcgcaggaggatctcgatagtcctcgcatacatctcggtatatgttggtcttaagccgctccttggtcctattttatgcgagctatacaaatgcgactagactctgtcatggtcacatcatcccgctgagtctggttcaggcgaggtttatactcaagaggtctctcactgaaatctctgctttcctcgagaagagtgagtccacgtgtcatttttataggagtctggtctcgagtttccaggtgaga

SEQ ID NO: 297379 - DNA, 4726 bp, Cannabis indica
aaacaaaaaactgattaaaaaatattaccaccttaatttataatttatcgtgtatataagaaagaaaaaaaacaagagcaaaattgatgcttaccaagtttttttctataaatatatattttttgtttatttttaggaaaaatatataatttatgaagagctgtttattttacctccaagtctcgtgggacaatcatcattttcttttgggaatttaggaaaagataacgtgtaaatacaaccgccactgagaaacctttttaagttgatttatttatttattggggttggcaaaactgagaaaccagcagagtgtagagccatcgcatttaaatatataattttatcttcaattccaatccagtccaccacttaacaatcaccaaacaaaaatggcttctaccccttccactgccaatttttctactcctttccatgcctctttccaaaccaagcctatccaaaagtcttgcaattctactttatggccttccatggaactttcggtaccgtcagccaaattgttaattggttcctctaaatcaggctttttccgttctgggtttttttcgcaatcatccaacctttctgggattttcggaaagtctcgatcttcgggtgtttttgcaagagcagctacggataagactctctatgacttctctgttaaggttcaatcttgctcccatcacctcttctatgttcacttttttgtttgatttatgattgcatcgttctcttttaggaggttttatttatatccatgagtggtttatatttcttagtatatgtaaatgttattggttggataaccaaaaaatgacttgaatgcaggacattgaagggaaggaggttcctcttagcaaattcaagggaaaagttcttttgattgtcaatgtggcttctagatggtattcacttctttaaatttcttttcattatgttttgtcgctttgtgatttaacatggtaaattccttgaatgccagtggtttaacaactgcaaattattcggagctatcacacttgtatgaaaagtataagactcaaggtacgctactctatttagtagctagtaatgtttttctattcccttaatttgagggtctaccatggcacatggaagccttaaaaaaacttatgaatcgtgatgattataattcattactcatcatacgatcttttgtttgttaatgtagcatatcctaagtttgagctacctaatttaatatgtactagcatttgatattagagcaaaagatgtgaacacaaggcatttgtaattgaaattgaagatcattaagttcatgatacctatatgcagctttgaaattcatgctcaatagattattcatgttatgcttcttcatattctaggtgttcctggggttcattttcttagggccacttggtaaataaggaaacaagtttctcttttctcaaactttatgtggttcagcagggctcctatttgttaaacacgcttcttttttcccccagaataaactcttaactatctttatacaacctcattgtaggacactagatatagcttctcttgcaatcagtttactttatgtggttcagcagggttcctatttgttaaacaggcttcttttatttttttttccctgaataaactcttgattttctttgcacaacctcattgtaggactcgagatactagctttcccttgcaatcagtttggtggtcaagaacctggatcaaatccagaaatcaagcagttcgcttgtacaaggttcaaagccgaattcccaatttttgataaggtgtgtatatgaagtgtttatcgataaagtattgtttggttcaggtggttgcatgaaagactaataattttcgcaataggttgatgtaaatggaccacagacagctccagtttataagtttctgaaatctagtgccggaggctttctaggggatgtaataaagtggaatttcgagaagtttttggtggataaaaatggcgtagttgttgagagatatgcaccaacgacatctccttttcagatcgaggtattagttgccttttagtctcatttacattttgtcaacttagaaaaatatctttgagattcagacaatgcttgaagtaattagctaaagttttaagtgaatgctcctctcgcattttagtttcgaatttgctagaagggttgggaaaccctttttacaatgacttacatcttcaattcagatgtataagatcaattagagtgcctcagtacgttgtttatcacagattagaaacgaagttgggaatctaatatggttgttttgaacattttaggcctgtcttaactttccttttcctcttctcaaaaattataacaagaataaataattatttttttcctaaaaaaataaatgcagaaggacatacagaagctacttgcagcatgaactcagttgtacaagtaatcgtcacaacaggagaactgttctagggttaaatgatctctaagatcatacacgagcgagcggccgagcctttctcgttcttaaggttcagctatgtaaaaatatatgatgtgtttgcaactaaatatttgaacataattgtagttagagtagtagtatttatagttacaatgttcttactacgagaattataattactattgaacttttccaaatatgaggaagaagtctctttcgtctgaagtttgttgtttgtttcacacccagaatttttgttctatgcgagctaaattgttattaaacaaaaagtaataaattgtgtctactttgaacaaaatttatataatattggggggggttcaattattataaatattatttatggggtttttttttctttctatttagtgtatactgattaaattttaaaaaatatataaatttttaatgtaatttccttacaaaaaattattttttgatgcatttttttttcgtcttgggctctagccctcatacttgtattacatatggggtctatccctagtttcacccatagttgtaaataggtgttgtgctgaccattaaaagataagtatcgtgttgtcttaatattttaaaagataagtttgtcacgactcgtaagttaatatttttgtactgtacttggatttgtgtcgcattttacttaggtcggtttatttttcataaatgagttagaccgttttcttataagggtcaaatttgggtttaattttttcactatttttttttacaattaatgagttaatcactaaattatatgtattttttataatttcaattgtttttatataattttttaataatactttacatataatcatattaaaaaaattaattagaataattaaaattggaatatttattagtaaatatatgtattattattattattataagaattttttatgttatgttttcaagttaatttattcgtgtttacatgttgtatttttgggtttgtcgagtcgtgtcatgtttaaacttatttttttgtgtcatgtcgtgtcgtgcaaatttacagtatcgtgttgtgtcatgttcaagtccatattttttcgtactggtttcgtgtcatgtcaaaaagctcaacccgtatttacaactctagtttcacccattcggtttcattttccatgcttggaaatgatgtaagactcaacctactactcgttctcatcaacttaatatttgttcatctttttttttttctaaaaataggccaaattgtcatttatactgaaaaacaacaacaaatgtttcgtaatcagagcatattgttctttaactaaagaaagatagtcgtttgaatcgaatacaaatatgatacttacatatgtggtaagtgacttttgataggtgggactcatcttaaataaaactgattgattgatattactgttggaacttattttaccaggtcttaattcactgacatgtatgttcgattataaatttataatctaacatcttaaaatataaaaatcttaaaatgataaataaacatgtaaaaatatataaaaaaaaaaaaaaaaacccttaacattggttgtagtagaattaaatatctcattccgttcagtactctaacccttgttcctttttggttgtggagtagtaacaagtactgaacccaaatcttctttgaattgacaaaacaccttttacacagtcttccacaatggtctgagtaccatcttgaatagtgtgggttgatactcaactcactttcgctaaaatcaatgagaaggaaaggttagtagacttaacctggagtgcggtattaggcgaggggatcccctctcctcgtatcttttaatctggggtgtagaaattctttcgtgtatcctcgagaatgccccaaatgctggcattattagaagaatcaagttgagcaggagtggccctcgactttcccatcttttgtttacaaatgatctaattttggtaggtagagccataatggaggaggctacgggcttttagcaatgtctggagaaattctgtgagtggtcgggtcaacgcattaataaattgaaaacatgcattttcttcagcaagaataccagtgatggaatgaaacgtggtattcaacaggctcttgggctcaatatgggaatgggtaacattaactacctaggtcgccctttgttccgcaatcgcaataacatactgattttaacttcattctggataaccttgtatcaaagctgcatgggtggaagttgaaatctttatctaaagc

SEQ ID NO: 297380 - DNA, 7062 bp, Cannabis indica
agtaaaccatggactatgacacattttcatttttgtttttgttttcttttttatctttttgaggttagtctgtgaataaaagaagttgacccgtgtctatgacggtatcactggaaatggggtctcataatgtgaaactgcttactttatctgttgatgaaagatctttgattggtggaatttggcgttatattgagttctgcaagaaaattagtggggatgttatttctggggattgatgaaatttatttattactaaagtaaggccataacttctgtgtcgctttgcaataaaagatgctatacattttgatttctttctttattacacgagagattctgctattggagacataaaccgttctgatcatgaccagagctgttagagatcgaattcttaaggatgctaatggtgacattggtgatcatctacgaaaccacatccatttgacaaactgcattcacttgaagaatcatatgcacaagcacagccccatattgacagacaggtcgctcattagggacctcattgtccttcagaggtctcggtctctcagagacccgtcagccagtcctccctcgtggcattcaccttcaattgtcgaccagcatcctaagaaagcagaaaatgatggattggctagggagggccgaaggtcaataggtattgagcgtcaaagggatagtaagaggctttcaggtaactctccaccatttgtaagcttgctaacatcaaaagttgctccgggtgagattgccggggttaatgatttgatggcagcaatcagcgaacgaagtagtaagagtggagttagggatgttcgaagaacaaggagggaagagtctagtcggaagagtaataggataggtattgtgggtggtgaagaggaacctccagtagatcaagatagcaaggtcatttctaatgatgtttcaggaaattctgcatctaaaacaaggaaagttagacaaaaggggaagcatatccaagtgtctcatgcaaaaaccctttcggagcagttaaatgatatgaagatggatagtgatggtgtagcttcttctaacatccatttgcgtggaggacaaactcatgagaaagctgttctggaagcagaagaaagcatccgaggttactgcagcggattgaatagggtaaagcggcgaaaatttcgaggggcaagaagacgtagagctgccgcagtatctaaagatatcaatgctcaaaatgagttgtctgtagcttctaatactgtagcccaaggttcagtacactccaagtataatgtagaaggagaggaagagtttgatgaacaaaacgtgacaaaggctcctagaaatgggtgtggaatcccttggaattggtcaagaattcatcatagaggcaaaacaatccttgacatggctggaaaaagtttatcttgcggtttgtctgattcaagattaaggaaaggaggtccaagtggccaggggagagatatttcgaacatccctgtagcatctgagtactctagctcttcttctaaatctgatggggaggcactgcctttgttggttgatgcctctggatcacagctgagcactgaaaatgctgattgggtgcgtcgctattctggggaacttggtatttatgctgaaaatttgtttaagcatgatgttgattctgaccttgcttctgaagctagatcaggtgatcaacgaaagttaggagggcgctgccgcagtagacatcaaaacctgacagaaaaatacatgccaaaaaccttccgagaacttgtgggacagaatttggtggctcaagctctttcaaatgctgtcatgagaaggaaggtaggattgttgtatgttttttatggtcctcatgggacggggaaaacctcctgtgctcgcgtttttgctagagctttaaattgcctgtctttagaacatcataaaccttgtgggttttgcaattcttgcatagcacatgatatgggaaagaataaaaatataagagaagttggccctgtaagtaattttgactttgagcgtattatggatctacttgacaatatggttatctctcagctgccatcacattacagagttttcatatttgatgactgtgacacattgtcccctgaatgttggagtgctatatcaaaggttattgatcgtgctcctagaagggttgtttttgttcttgtctgttcgagcctagatttgttgcctcatataatcatatctagatgtcaaaagttctttttcccgaagctaaaagatgcagatatcatctatactttgcagtggatctcacacaaagaagatttagaaattgataaggatgccctaaaacttattgcctcacgatcagatggttctttaagagatgccgagatgactcttgagcaactaagcttgcttggtcagaaaatatctgttcctctggttcaggagctggtatggtgtttcttatcagtattatacttttcaatgtcttactgtgtgtgttttttttcttattacatatttaaatcttgaaaatagtgctggttcgaaaatatcgagcagttattgcaagcacattttcattgacattgctgctataatttatctacttgctcataatcttctttttgtgaatgtaaatatactgcttgtcacactctgaaaatcatttatatatttttcaggttgggctcatctgtgatgagaaactggttgatcttcttgatttagcattatctgccgatacagttaacactgttaagagtttgagagtcataatggaaactggtgttgagccattaggcttgatgtcccaactagcaacaattattacagatatacttgctggcagttatgattgtacaagagagaggccaagacggaagttctttcgccgccacccacgtgagtcataaagtttattgattttattaatttacgatgactgtttattatcatcatcaagacctaactatttggattttttggttgtaaattaatgcttatataaaattaaaatcactattatataattctcgtcacaagtcacaattcttaaaagaagtaaactatctcattatttatcgagaaaatgacaggaaaagagaagaaaggagaaaataataataaccttcattgttttgaaagaaattaactggttttagttttgtgccggacaaatactcttctttttcagtaatgtttccagctcaatctacttactctcatcatgattttaaacatcttatgtctaaatttgatgcatacagtatccaaagaagatatggaaaagttacgtcaagctctcaaaactctgtctgaagccgaaaaacagctacgaacttcaaacgacaagctgacatggctaacagctgcactgctccagcttgcacctgatcaacaatatttgttgcctagttcctcaggagacactagttttaaccatagtcccttggcctttaataatgtggggggaagaaatgttgttagaaaagcaagtgagcaagatcatttgctaaatagccagagaggtttgtcaacaagtgctcgacaagcaggaacttctggtttacatggtaatagtttaatgaaggatgctactttggataggaaaagacataatggtagttctatggcccctcaacagacatctacacgttctactgatacaataagagaaagtggcaggccagtttctggaaaaagccgtaaaattgaagaaatttggttggaggtgcttcacaacattcagtatgttggtgttaaagagttcttgtaccaagaaggaaaactgatgtctgtcagtttcggtgcaggtacaattagtctgcatttactgtcatttataggtgcctcttataccccaatatgatacttagatgtacaaagacatgtatccgtatatttatcaaccaattttcttgtttaggctagttttgtcattccagccaaacttttctggacactattgattattggtttgcgttttacctcttcctatacaacatactaatactacaaaaagaaaagtgttggtctcttaacgagaattgaacagcgccttgcttttttgataataataagattgctgttttgatagtaataagcttgttttttttgtttataaagatgtatgctagtattccctctctctctctctctctcttgtaatttatttattaattttgcattttcatgattatctattgtaatggcttgtgaacattagatgagttcaactgtcatgtccttcatttgggtggccttaggtgtctcactggcatcatccgtttcctttctttgcttttccttaacttatgcttagactatctaattgtactgatgaaatgagtagcttcttcttgtactgtttaccgtaatcatttcctttcaaattttgtggttttatgtatttagttaccgttttcttatacatcaaagtactttattatttttagtgtctattatcacctgctatctgattgttctctcttgcagctcctaccgtgcagctagtgttcagttcacatctaactaaatctactgctgagaaatttcgaggccacatattacaggcatttgagtcagttctgggatccgctgtcacaattgaaattagatgtgaatcaaaggaagactccaaaacaggggtgcgtcctcttatgttgccagcttctatggatggctcgtcgcagattagagatatgaatggaatgagcggtgaagctcaggcattgcctttcaaagcagataaaacgggtaagactgagattgttgaaacagctgcttctccaagggaaaccaagggtgatgagcatgttaataaccatgaagaatctggtagaagaggtttaaaaggtgcaatgggagcagaagcagcaacttcccaacagaaatcaggtgttgattcagttgcagataggcggaaggttggggaaaaatgtcagagtcagagcatagttaggagcaaagtatctcttgcacatgtaattcaacaagcagagggatgttcccaacgcaatgggtggtcaaagcgcaaagctgtttcgattgctgaaaagctggaacaggaaaatctgtgagttattctattgccattatctttctcacttcatctacaatctttactgacattgaagtcggcaaataaagagagaattctcaatttctatgccatcgtagagtgctttaatgttgttgctctattccctttcatttgatttatggatttactttatgtgcaggagactggaacctcgatcgagaagtttgctttgctggaaagcatctaaagtaactcgccggaaggtaaagcatggttactgtaatattacaataaacttgccttaagtcttattaatttgtgtgtggggcaacaggtgaaggccgtagctttagcctaattcttcttgcccgtatacaaaccgtaactcgttgccttgattatcttggtcgaattatatatcttcaagaccaaccccttaaaatactgaaaacttctgttgtgcttacttgtgtacgccaagctattactggattatttggatgtactagatttataagagtatgcaagttttggatctgcttattgacctctttgttcagttcatctggcgacttctggttgtcctagtattttatttggcaataaactttgttttttttttctttctgaacaatctaacttttttgcttatcgtttattttcgttttataatgacaataatatagattccaatattgggagctagttagtttatgtataatgacaataatattgtcgctgcttgaagatgtaactcacaactttgctctatctgcagctttcacgctttaaaatcagagcaaggagacctcgctccctattgaaattcgtctcttgtggaaagtgtccgtctacaaaatcatcaagctaacctaagaatttttcgggggctagctttaaagggtttgtacaaccttatctgtataacactattacttgtatttagccattttccttaacttactaggtcaaattaaatttctctgtcaaatccaatttattattgaataaagctcaaggttgcattgaagagaaaatatgtagaagacaagtttatattgttctgtatccattattcttctattgttactagtttaagagcacgtgtatagccatttaacttactaggtctgattaaatttctgtcaaatgaagttcaaggttacattgaagagaaaaagatgtcgacggcagttttaaattgttctcagtatccattatgcttcttttattactagtttaaggggacgtgtcctataaatcctataaaattagtgtgaacactgtgaagttgtaaaataatttcacatggtccttggaagagtgttcttaaatataaaagacagtgtagctggcatgctcggattttattgggaaggaccatatcaagtaatagaacttacagattttagagcatacaaacttggtcggtatgatgagaacatgaaactagttctagtgccaagatattggaacagtaaacatttaagaaaatactaccaataagtgcataaggttgatgattccataaagtgcacaacacttgaacacttactcttaagtaggtggcttttttagtggatctcgctcaaatgtttggaaaaaaaaactagtactcaggttagatgaccactcctaaagtgtagtatgtttagaaatcattgctcttgagcaatgtcttctggtaggggtgttcatctgatccaatctatacttttttagtcaaacagcatccatccgcactaagtgcgaattgttagatttttgcactaagtccgaattgttagatttttatatgtataaaatgaaatatatgtatatgtagataacatgcggaataaacaaatacatacactataaaactataggatcgaaatacctccagctattgatttttgagcttcaaaaccacacaagctttgatttgcaaaggaaactggttgatgtgggtaatcgggcttcctcactctctcaactctctttagatggaatttcgctgttatgaacagaatgagtgaggagctcggggaccg

SEQ ID NO: 297381 - DNA, 3635 bp, Cannabis indica
tttattatttttttaatataatgaccaatacaatggtcataatacaacaaacaatttcttccaaccaaataagcttatatttagaaagggaaaaaaatcttctcaaaaaaaaaaaaaaaaaagatttttctcaaaaacaaaaaaaaataaaaggaaaataaatatatttttctaatgtatataaaatatattattttaatggagagatcgtttaaaaagttacgagtttttttggtttgtgagtttggaaagaaacgcatgccagactattccgatttctgctaaactttcatctctctcattccgttttcctttaaattcgtaatcatacatttgcaattcaaagattgttgaaatcaagttcaagacaagtaatcgcctttcctcgcgtatatacacagatatatccatataagcacgccccattttttcgaagaaaaaacagaggtttgtatagaagaaaaaggcatggacagtttgtgtttgaaaacagggattcatggcatagctccgccgattcaaatgggtggagggcttgaagtccgcacaaacccatctcagtttagcgccgtaggaaggtctaacacaggtgacaagtcaacaacggttcaaaagaaggcggcggtgtcttcgatgttttcttttaaatattcattgaaatctttttggcccggtggaggaggagaaggtcggagtggtggaggcaggtatggtggaatggcccttgacgacaccgttttgacggaaaccggtgaagagaagaaaaagaaggtcgacaaggtaggtggtgagaggagtggcgtaatgggttcagatggacgaaatgagaactgggttttgaagattttgcatgttcgatcgatgtggaaggacgatgaggagaaagaagaagaagaaggtaaaagttttgatcttgatgctaagctaaggaaggaggttggaaatggtggtggggccgttgataaccagggtgaaggatctgagggtgaggatggggagggttgtcatgcgtgtgatgggtgtagagtagaagatggtgacgaagaagtggctgagtttgatagagattcattttcaagattgcttcggaaagtgtctcttgccgaggccaggttatatgcacaaatgtcatatttggggaatttggcttactgcattcccagaatcaaggtactgtaaaatttgactcccaaaaacttctgctttcgatctgagttgttatgttgctgaaaaaaaggaccccttttcgccaggattgggaatttaagaatatgggttttaatggtagattctggaaaatagttagatctcatattatatgatgtttgtatatataaacttgattcatatgacatcaggagtttctggactaatcatggagatgtttgttatcatattattcatattgttgcgaatatatcatatacaagaaagaccttttttttccctttctttttggcttgttttagtcagtcttcaatgataagaaatgttagattgaattttcttaacacttgaatagaaagaaaaaaaaatgttgtctttaaagttatggttgatcattatttggcattgcattttcaatctaaggatcataagttctattgaaatcgacttggttttgaacatattattttggttttgtttattcagccaggaaatcttctcagatgttatggcctgcgttttgtaacatcatccattgataaaagggaattggctgctaaagctgagaaaactcaggagccagaggaaattcaagaagaaaaaaaagaatcaaaggaggttgaagaagtagaaaataacaaaagcaatggatatggaataagtgcatctgctgcttaccatattgctgcctctgcagcttcttatttgcattctcatacaaggagcatacttccctttaaatcttcaaaaggtgatgttgggaaagatttgtccgaagaaattaggaggaccaacgagggtgtcaggatgatgaactctgagatggcttctttgatggctaccactgattctgttactgctgtggttgctgcaaaggaggaagtaaaacaagccgttgctgacgatttgaactcatcacattcatcgccttgtgagtggtttgtgtgcgatgatgatcaaagtggcacaagattttttgttattcaggtaagaagaaggaaaattgatccttctccatatcttcttaggtaagcaaatgttttcattttgattatgtttggctgatgtatcctaattatgttcagggatcagagtcacttgcatcttggcaagcaaacttactttttgaacctgttcgatttgaggtaaattttgttaatttgctaatctgttttctaatttttgttgtttgtgattgatagtcttatagaacatggaagctagctatgatgagtgaattcttaacaaaattggtttcgatcgtttccagggattggacgtgcttgtgcatagaggtatatatgaggctgcgaaagggttatatgaacagatgctgcccgaagtccttgcgcatcttaaatcaaagggagaccatgcaacctttcgtttcactggccattctctcgggggaagcttggctcttctaataaatctcatgttgctaatacggaacaaggcgccagtttcttccctgctacctgtaataacttttggctcaccatctattatgtgtggaggggatcgtcttcttcgcaaactaggattgccactaggtcatgttcagtctgttacaatgcaccgagacattgttcctagagcgttttcttgcaattaccctaatcatgttgctgagtttctcaaagctgttaatgggagctttcggaatcttccctgtctcagtaaccaggtaaagaatgtgtattttgttcaaatctcaagcttgtccctttcctgttcaccttttaaattggcattaattctttttgtgtatttctatataacagaaactattatatgctcccatgggcaaccttttgattcttcagccagaagagaagttctccccaaaccatcatcttctacctttaggcacaggtctatatcttttaacttatccgttgtcgaaaacagatgatgcagagaagcttcttcgagatgcaaagtcagtgttcttgaactcaccacacccacttgagattctacgagacagatctgcctatggttccgaaggagccatacaaagagatcatgacatgaattcctacttaaaatgtgtaagagggtttattcgccaagagctaaatctcattagaaaggccaagagagagaatcgccggaaggtgtggtggcctcttgtggcgctgcatagcgtcaatgccggcattgttgtgggtagaagatctctcgggacagcagcaggcaacatgggccaagagcagttcaacttttctggcattgtaaaaacaggtagagcatcattgaaacgatttagcaggcttgttacatcacagcacatgcacttgtttgttgtgcttctgttccctgcgcggttgttactcttaggagcattcaacatgatcagttccaattgacttgtcatgttgaattgaggggctggcaaggcttgtaatgtctctccctttagctttattttttttcctttttcttttttctctttttggtgggac

SEQ ID NO: 297382 - DNA, 583 bp, Cannabis indica
ataccgcctgacagtatttttgtaaaaaaatgacaaaagtcatgtaaatttccctacctaaaactacttggtggccaagagctagggctttcttgttgaaatgacaataggccaatccaataagcttaggaaacccaattagccaattaccaacaaaatggggatttttgtataaccaattctatttgattaacacagcaaaaagtagtgatatgatatgatgatatgtaatcatatattaccaaattagatatgactattctttgtattagttttcgaaaatattgatttataaaatgacaagaacagttttttaactggataagttttgccaaaatgtaaaaaggtgattaacacaaatagattagacaaatagtcaccattagtcaatttcacttggaaaaagtactcttttaagtcctccatagataaattaaagaaataatgatgttggaggttttagatgattaaagaaaatgttttagctatatctcctatttcatttatgtattgctaaaaatgaaattgttgagaattatggggctggacaagtatggatcgaaagcccgctagggatatggct

SEQ ID NO: 297383 - DNA, 3120 bp, Cannabis indica
tttattttgattaatttaatctcctattttttcctataaatatggtgttgaaagaccattttaaaacacatctcttcatctgaaacacccttcactctttattccataactctctacttttcaccctatttcactcatctttataccattttatattttgaagagcatgtcaagtatgttttattagaatatttctatttatggaatacaataaagaattaattttgtcataaatgaatattttatattcattgaatctagacaaaattaattacgtaatattctatatatggtcagatttcaatattcattacgcgatttaatttcctgaactaattgttaaaatataaaatggagaatactacattaaaattcgtgagaatgaattcgcccccagtctatttgcaaagtttctttaaagtatgggtttattgcctaatacatatgcctggtacacccaaattatggtgtgtgataggcttaagaaactaaaaattgttggacatggggtggagcctgcataacaaactctaaaatttcctaatctttgtcagttgatactcttctagggaggtgaaaaccggattgacaaagacttgttcaatcttctctacaaagactattgttcaattcagatagctagatcttctttcgagggtttttcggatagttccttgagtgatttgaggtcaatagtggccctctgaaacctgagattcaacaccaccattgttctgagcaaataagcggtgagtttacgatcggttcatctgggaacttaaccaggggtggagacaattcctccccaagtcgtcgacttacgttgtccaggagggtgtgcttggcacattttccattggacgagcaactcatacggctagagatttccccacagctaaggctgtcatttccattgctagatattccaagtcgtacccgaccgtgtctaggagaaagaaaatatgccgtaacgcatctctaggggaccctcacattgtcgagttaatggcaagaagtagggttcgagttgttgaggaggctcaacaacccacaatcagccaggctgaagaaccttttgctgagaaacctaaggtcggccaggatgaggaacccttggctggttaggaagatgagttaggggctaagcaggctgaacctgttgccaggccaaggactgctagtaggcagtataaaacttgtgacgtgatccagggtaatgccttgggtacttatgatgaggctggacgacctttaaatgccatgggtcaaccgtcaaaggttgggattgaccatgttgagaatgaggctcctgagccttggtttctcgagtatggagatgagcagcactgtatatctcctccctctaccctgtcagctggaaagctcaatgagatcaaggaaaggggaatcgtgggaatagtctagtgtaataagcctagcatggtccagttggcacaccgtctgccacctcaactgctggcatggtaaggtccccatgctgggcaaggggcggtcttgcctttgcatccctactttagggacatcgctaacttctttaagttttgtccaactcagatcactttgaaaggcatcaagtacattttggccctcttcgttttgtatgcagagttaggctgaccactgccttcaccttacgaggtgagctacttttttgagctgaaatccacccctaagcagggcaggtccgtgtacttttactttagctagcagggctatcagtggctcagaggtactaatgacaaggccatgtctaaaattgggaagtacaccaagagctacttcatcgcttgggatgtcaggtacgtccatcatcactttcaaagggtcttgacataccttcgtccaatccctactctcaagctgagggacagagctaatcatattctgtctctccctgctgaaaggcgtaacatttgctaattggcctgcgaggagaattttaggagctactgcttgtatccttctggataggatgtcgagggtgttacccttctgaggatcctggacgacactcctgctgtaaaggaggctggcaagaagaaaaggtctattcctgaatgggaaaaggccaggtctgatgatgacatcccactggccaagatggcttgaacaaaactaagagggaacatgcccttcggaagcgcttgtcaaaaggaggcactgttgacgatgcccccatgttgatcaagcccaaaagacaggagtctgctaggcctgtccaaccaccacctgcgtctagacataaaggcaaggttgttgcttctgaggacaactccgatgattcctcttctgaggatgagaggctcccggacaaccctccagacggtagtaactttcctacttttacttgcatttagtacttataacttgtattttaactttgttatttttatttttgcaaatatggcttccaggatgagagacttggtgacgaggtccttgggtggctcttcttctagtcggacaggtgagtcttctaatgtgacctagaccgacttgtctgttccttttccagaccctccactggccaaccagcctgtggttctagtccttcctccgaggactacctctccccctcagagattatcgagtaaggcggcccaaaagcatagtcgagcaacttgctcgactaagggtcagagggcgaaagaggttgcccacaactacattggcaagtgcgtaccaagtgttgacgagcaactccaagagttggatgccaacacccaacaccctggatataccatatcgatattgatacaattaagtatgtcatgtataatttaatatattaatttttataaaattattaaccaattataacacattatctctaggtggtattactttagagcatctccaatgaagagctataaatgtggtatattactattttttagaatattttggtaaaacttaactccaatagtgatgtaaaatgtgtgccaaatatggcacaagctaaaaattgtgctacatttggcacaaaagatagcatgggctaaattttagcctcacaataaatatcatcttttttaattacctatttgccacttattaatactatttattgactttgaataagatatatgtataagatat

SEQ ID NO: 297384 - DNA, 8287 bp, Cannabis indica
atatttatcaattttgatccttatgtttacaataatctatttttcagatttgtaactcctcatatgttacaattttatgtgtattattatactatatatatgatataatataacctccaacacataatatatattaatctcctattaatatataatttgtcacatttaaatattttaatctatattatattatatcaaataatataacatttatcacattttaatctatacttattatattataaaataatataacattttcttcattgtttgttttctattctattcaacaattacagagttgtgttataacgtcataactcgtagggttgccacgtgtgtgcttttataaattagtttataataatatactaacgatttaacgaaaaagtgtgatttaattaaaagtttatttagttatttgaggtataaagtcgattttttagcactatacaataattagggttggggatcccttttttttcttaaaaaaactacttacaaatattccattaaaatgttacaatcaaatacttatacttttcagagttgccacaaactaaagctctaactactcggcattgccgatcggattaagttgatatatattttagctaaaaaagacctacaactcatggctgacctagctcaatcctttcctttcctacactacaaagcacatgtgagtcacaaagattcaacaagaaaagcaaaagcataaacatgatacatccaggtacaaatataatcaaacataatcattaaatcataaccaactattcacttacttctctcacaagcaagaaatcacattatctaatacaaacacccattattatcaaacaatcatcttataaaacaaactaaactgttacttactacagtaaccattcctcagcgtcgcctaacgaggcaatccaatgtcattatttctgtctaaagaaacaactgataagtaagaagcctaacaacaattcaattagagtagtactttgttttacactatttcctaaagagataatctaataaagtaataactctttcttacactactgcctaatgagacaactaaataaagtattaactttctcttatagacagtaattaccgagtcacatattgacatgctatgtggtacaattatacttttcttaccacaagtccaaattcaagcatcttggtaaactcgagtggaaaacgcttgatgatctcggaccctatgtcacaataacagtaatctggtaaacaactcatttaatccattgtaggacttaaactcaaaatttttctatcgataaatagcgtggaaataccttgaatatcgataaaacaaaaaatttaggcacctaaaaataccccaaatggtgaaccgttttggggttcaccgtttacccaaaatagttcaccgtttttgtagaaatggtaaactgtttttgtaaaacacgaataataactcttcaaatcttacccaaactccaccaaaacctacccaaactctccaaatcagctctaatataagttctaaacaaatctcataactcaaaaataaaaagtattcaaaaaccacaaaatcaccattgaaactcaagcttgaaacttctaaacacactagcaacgacacaacttaaataagcctcaagtctaattaaaaccaagactaaaataattcctaatagcaccaacaaccctagacctgaagtcccacaataatttaattataaacttccaatttcaccaagaaaataaggaaaacttaccccaaatagagaagaaaactttggtttttctccaggtttggtttgagccgaatggagaagaaagagagagatggagtataaaatgtgtttgtcttctaattgcttctacaaaacttaaggttttatctaaacctttttctagtaaaaggatatagataaatttaaattttattaaaaagtagggacttatctatcaaatattctcgaaataactattttggtcttcttgacatcacttttagccaataacgctgagtcaattaaagtgatgaaataatagataataattaatatatttatgcaataagaacaccagaattttatagaggttcaaccccatgattatggcaataatactccccttttacttgtattactttgaaatgttatcaagatcacaaggagctggccaagtgagtttgtcaataattttaagaaaaagtttacaattatttagacagcataatgactctctagaaaattagaaattggatccttcgatagtgaaatgaattcactgtttatataggaagaaatatattaaattagtttcctaaaacgaatttgaataaaaaggaaaactaagccaatttcctattatttctttacaatgcatgttaactccataaaaataggaatttaaatgggagatataaatgggaaatatccctaagaattgtgcttcatccgcttttaccttgtgtagagtactcagcttcaatatcacgttggaagctgcttggatggtaacatttaacttgtccagatgttccatgctaatcttcagagtatcattcttgggcatgaatcaccctaaatgacatattgagaaaataccatccgtccaagtttgagaatattttccaagtgtcaccttattagatgccacatcaccttgtgtggaatttgggataacatttgccctctaagtttatgtgggaaccatatactcgtatgtaaacttattcagtctatggggtacttgaataggtgacacatgtctagatccttatgtttgccttttcctgataaggtcaggtcacgaggtacgaagattcaaatgtcctttcatattttgagcatttattactttgcttcgacaaatgggtcttgatgtgcgtgctgacagttgtactccctaatgtgtactgattgtaattttgggggggggggagaaacccaaatgttgaaacttaggattaccaaattaccccttccgtaaactatagaaaggggtttgggtttcctttccactcttttcgcattttcaaactcaagaaccagagaaaaaatcttcagtgtttccaagcttttccaccgaggctttgaagaacactgaagcaatttcaagagatcaattcgaatcataacccaaaaactacaatagtgagtaagttttctaaccttttttacactttctttaaatttctacattttatttttcacttgaatttgttctatgaaatctgggcttgaaatgaactatgcttcgacattagaagttaggatttctaatcctaagtctgaatgtatgttgtgacttataattcctatttttttgttaattccaaaccattttgttggaaaacacttaaaaatacttgctcaacatttttgggaatttctcgagttcttcccgtgttcttaaacttgtttgctctggaaattttgtcatttggatagaaattttgtcctttgatccttaaatttatctgattagaacatcggtgatgtttttcctttggaaaagacattatatctatttggctcttacctctctctccttcattttctaaatgaaccctagcgattttgggggggggggggggggggggtaaggcatcggatagacaaagatttgcttcatctacttcatgatgagcagcccaggctccgtgcaacttcattttcatctaataagagcttatcaacttcaacttttaatgagtgggaggtgacaagtgattcatcagagtcctcaaaatctattgtacaacattattattactcgaccatgttggcagagacgggtacaaaaggttcttctgggagtggaacaaaggttggagacagtacctcctacatcttagacatacagagtctgggtagacattctagatactctacccaaaggccatccaaattcgttgaggaaagtatcagtgttagtggaaattttagcgaacattttaaagcacaccgtccagccacaacatgcacccagacataagaaagtggcgcgaactaaacaaacctacagtaatggctaatatcgagtgcgccaatatcttgaagaggatattgaagtgcttattggtgatgaggaagtgcaaaaggtcaagaaccagggggaggtctgtccaacaggcactaaagaggaataagaaacagctcttgtggctctaccgtacggagggcataacgaggttggggagccaatatcagaacttggtaatgtcctaattgagggccaagactatgtcacgaaggaatataaagaagcccttcccaccaagtatcaggattaacccaagacttagtgagtttctcctccatccactctctcgtagaaaagaatcaagaatttgtaggccaagggccttcttggtggtgtggaaacctttcttccctatgacggacaacttgctaccaatccagggaagggaattgtgcgtggttcagaccacatgcccagtagggtgtgatcctaccccttcacccgtactttaagaggatagccagctggcagctactataagatttgccctatgcaattcataccgaaggagatcaaatatatgactgcactatttatcttgtatgcaaagaggcagtgggaaatgccatcaccccatcacaccaattggatgctcgagctaaagtccagcccgcagcataaattctcgggttacttttatttttcttagctcgaacatccttggttgaccaacatgacgtccaaggagatcgtcgaaacaggtgggttcatcagggtttactatattgtacaagagatggaggccgaccacctatccttctagctagcaaagacatactaccatcccccgttcacttacgttcaaggtcacaagtcattctttggctaccgagcagggctcgcaacatatctctgttggccccaatagataatttcatttagttcgcactgtatccatctaaggggattgatgaagatattcctgtggccatgccttctactcctgcgcaggatataccgaagcaaaagaagaaaaataagaagaaacataaacaaactctgcccgtgaggcctattttgattagagaggttgtcgaggaggctacacgttctattgtgcaggttgccgctgggaagggtaaatgggttgtagaggaagagttggaagtactctttggatgacgatgccccttcaataataggtcaggaaagtgcttccccagagatccatggtatatttttgaggattttcatcctgcgttttgctatatatttttgtgaaaaccaaccaagtttgttcgagtcagccaatgcctttactttcttctcaaggtccatccttgtatcttgggaagccttctggagttccgtggagaaacttttgacttgtgaggtcagatacttggcgcaagagtaacaatgtttgagcttgagattcacctaaaaaaggcaaagttaagaattagtgatcgacatgtattgagctaaaataaaatacttgttaagaattcttaccttggttaactccctgaggagccctccgactactatctcaaccctaaactcatccgtccccttcatcttcatccgtccccttagcctcttttttctcagaagagagggggacaagaacctcggaagagtgcctagccttggtggaaggagcgacggaaggtcgactatgagatgaagttttagaggcaagatcagtgggcgaagaagttaggtcgaccagatcaacaacaatctctacaaggggttggcctccactagttggggcattataagcaaccttctttgctggaggggttttctctccctgaacgagggaattttattaggaaattttagcaggagactcccaagaagaagatctatcttccttcctcttgccgagtcgatttaacatcttacgtgacatggttgtgcaataagcaaaagacttagcaaaatagacaaaagaaaagctaagttcaacatcatataaggaaacgtaagagattaaaaattcatactatacaccccctcaacgatccgagttgtgtcatcatagagaatgatggttggccgttgattgtctaaagaatcattggtcgactcttcctccaccatcttttttccttaccctcgacaataggcataggggacctagcaacctcaaccaacgattcatttattcttatgtttaaatgaacttgtcgggtgggaggtgtaggatcccttggagtagcctattccttatttttcactaattgggtagcacgggacttccctttggcctctttggacttcttcttgccaacattggatgaatagagtccgtacttgcaaaattatcctttgtgcccagcttagaaatattcctagcctcctcggagagcctggctatctaatgagccctactcctcaggttcaaagtgaacagtggactgaggaatggaccagcagtttaaaatgaatggtggttagcctggacatccatgggaataaattagtcccaatcataacctcctatctttgttatctccttagtgcctgttagccatggataactcaggagtgaaaataaaagtacttcgagttgtaatggtggtggtttgatttcagataaaaaaaaaaaaaaaaagcaattgatctcatgggaagaggctcccccaaccttgttgggcatacaatatgtaaacgccggtaagtactttaacccttttgggctaatttgtattgggctgatgttctaatagttggccaaactctggaagtaaggatggagcggaaggatggcacctgctcagcatggggccttgaccatgcgcaaaggccttacccgagcctatcagccaactaaccgtgatgaggaagaaaggtaacaatctcattaaaccatccgttggcaagaaggttgttcaacctcttctctattagcctggatggaggagattagtataggggttggggcttattagacttcttccaaacagacatggcctctgtaagttcctcattggggtagtccacactgactttagaacctgcctagaaggtgatacgaatttcacattagagttatatccctcgtcgatatcaggaggaccaacctcttgcatatctacctccacttcctcctcggaagcttcgtggggttttgaatcattttgagcctgaactgccattagctgcccgatgtgagggtctaaaccaaagactactcagatgatctgcgtggtctaggccagtctgcaccttggaggtggggtcggcttagaattatgcttcgcgacaataacgacaaggtctactagatggcttgtgccctaggcagagtggtacgaccagcagggagtgtgtcctggacatctgttcaggctatgtacatccacgagactggagggaacttcctccaacctctgtttaattcccagatgtgttggtcgtaactatcaccaccaacatggtcagggtagtggtgatgttggaaggaagactccaaagggtcactagagaactcctccttggtagaaaaagaagttttgtttgaggatgaagatgagcttgttgctcagagtgtttggtggtcatcaaagagaagtccgagcaggtggtcatctattcagttatcacctccctagaatttgcatggggttcatctacagaagaaagatagagaggtgaggcaccaaacaacgtggaaagttttttttatggaaaaacacttccaatgctctgaccagagggaaaatcggatcaaattaagaaacttcatcttctcgatagtgttttgagtgaagaaagattttttcgattttcaaaacctaaaatttctagaatggctcaaaatatataaaatttgctaagaacagacgaagcaagccagactatagccgaacaaagcataaattatagatccaaaaatttaagaaccttcaagcatttaaagattttcacaaaacacaatttcaaaatttgacaaagatttaggcaaagagaggtttagagaaacttactcgttgatcgacttgacgatttaatgaattcttgggaaatcggtcggcacagctgtcaatttaaggaaagaagctcaaaaaacttaaaaactcctctcttttgctctgagattttgatggaaaagtttcaaaataatctttggttgaggtatttataggaagaaatatagtgtggggaaaatcttttgggggtaaaatttgaaatgattagttttccccgaaaaaatccaaaacccccatttttcaataaaagccacataggaaaacatgtaaccgtcaaacatagtgtaacaccctaactatcttaggcg

SEQ ID NO: 297385 - DNA, 10692 bp, Cannabis indica
ttgtgctggcaaaacgaaatctatttttgatgtgttggcaaaaggggttggtaaatcaacgttggtattagaacttttaccgacgctaaatgaaaagtgctagcaaaaatgacttttcccagcacgtaaatgcattggtaaaagttatatttttgccactgcaaatatgagctggtaaaactttgacctttttgccagcgcagtttgcgagatgcactagtagatgttacttttactagtgtagtaacaaactgtgctggaagtgacattttttgtaatgactcctattgatgatggcagctagtatcataattctggtgccataaattattgtacaccaaatctgcaaaacttgatgactactgcagattacaatggttcaaatcaaatatatgtgggcaacggaacatgtctgtcaatcaaacactgtggccaaacttcgttgcttcaaataactctgccaagcctttaattctcaataaattatatttctcttagtaagaatgcaatatatatttggtttattaaattttaaaatatttttattttatatgtattatatttttaaattattattttttacgttaaaaatattaattatatataattttttaataaatatatataaatgtctggattaaattggatcgattacttttatatgtcaatcaatatctaatttgcacaagtacgaatatctggactttgcaaattaaattggattggatcgtacagattgaattgaattgagtattttatgaacattcttaatgtaaatagtatattttgtacatatgaacaattcaacatagaagttaacaactaaaaatgagtaaaaatacataaaagtttagaggattttatcgtaatgaaaaatgagtttttgtaaataattgagtttttgacggcaaaacctttccaactgttgtttcgcttgcatttaaccctccaagcttaaattttggcggtaaaaccctccaaattactgaactagtagcaaatttaaagtgtcattcggttaattgtcactatgagttgcttatgtgtacactcttgtccacatgtcacatttatattggtacacctaatattattatttaaaaattattttcaaaattcatttcaaaattaaataaaattataaaaataaaaaaaatattataaattttgaaataatttatatacttttaaaataataatattagttgtattaatataaatttgacacatgtacaaaaatatacatataagtcgtctatattgataattagctataaaaaatagataaaattttaaatttataagtagtttagtagtttggagagttttactgtcaaaatttaaatttagagggttaagtgtaagtaaagtgataattgagagagtttagaacaaaaaaaactcaaaataactgggtgaaactatttaaaggtttgctgcaattaagtctagctaaaataaataacaaaattggtttctctaagcacaaaaggcagaacgcatagagccaactatgaacactgttttgtgttcttagttccaaaagtagtccaacgaatgtaatatggtcaatgggtcataacttgacaagttttaatcgctaacacaatatgtgattccaaacattacacgtgttctcatgaatcgaatcagttaaacactgttaattgacagtaaagtaactcctcttttttttttttaaactatgtgtcaagtggaaataagagttatattccttaaaataaaaggagatattgttttccaaatatctcgtaatgagttattatggcagaagaaaaatgggctcctgtggaggtggttaagtcggctagattagtccttgatcattggaagattgctaattttgagtcgtctcatgctaattttgttactggtgatgttattggcagtaatctttggcgtaaaccagatcattttactgtcaaggtgaatgtcaatgacactatttttaaagttcaacgaaaattcgtatttggttgtgtggctcgcgatagtcatggcaagcttattgaagctgtctcggggagtaggtggggttgtgttcttcctgaaattgccgaggtcattggtattatggaagcgttgagttgaataaagcgcaaaaggtgggaaaaggtagttgttgaatcagatgctttagttattgtccaagcaattaaaagttcaattcatatgccatctcaattcaagttgctggtggaggactgtcgtttaattttatctactttaaataatatccatgtttcttttgttaatcgatctgtaaatagggctgcccattgtgttgttagagggtcttgtttttcgtcagattgtatgtacaatgagcttaatgctccttcctctttacgagacaatgtaattgcggatgcaagttgattcttaatgatattatcctttattttattttattttttaaaaaaagtgatattgtttggttagttataatccttaaaaaagaatagaattgttaaaaaatattaataactcagtatggaagagttagtccattatattaagtcttatggtttagacactatatctcttgctaatggtgctactcattcagcaaaacttgtaatgtctataaaataagatcatatttggtacaaagatatctttttatatttgtggtttcactttcattcatacgcaaaaaacctacttaaagaaatttcataaattttcataaatcaaaacaaataaaaggtatcaaaacaaattaacaccagaatatactcccaagtgtgcaggagtgaaatccaaagatgcactaaagtttcaagacattcttgtcatcatccaactaagaatgaaaataaataaatgaaaaataatttactctttaacaagaagccaaaacaattcactctcacttttacatctcaatcttcctcacatatatgcctttcattttctcccccaaaacccttttctatcttgttctttctcttttccacttatccaaacataattgtagccatccaagtatgaattttgaagctctgtgcttggattggacaaattgaatagcctagaaatatgtctcttctattatgaatttttgacaagtgttcacatagaatgagatttgagtaaaaccctttaaggatgagacaatttaagcatgatttttaccaaataaattggaatttttacacaagtttttatttttttaacttggttttcaaaactaaacaaaacccagttcagtaaatctaactctctctctgtttggataaactcactataaaaaacaaacatagaggaacaactataaaggctgcagctttaagtaaatcttcattctcttttgagatcactccaattcttgaccagtctccactatacctgaacattttaatgtcattatttcattataacaatcccaataagaaaaattcttaaaaagaaacaaactttatctatctatgattatatatggttttatagtaatagaggaaaaagcttaccctgcatcaatgaatcctaatccaaacacagcaatggctgattgagtaatgagtgtggttgaaatcctcagtggaaaaatgggacctttctgagtttttgagttctcagaaaaattcctcttttgacctaatatgataccaaatctcttgccatttttggtcacatataataaaggagaggaaaacttggttaagataaagctctttgctgcaaccactgccattttcttctcatctaaactcttctctgcctcacatatcaaatttctgaaatgctataagacaagataattcacaccatgagatgcttgaaaaggtgagaagttttttaagtgttgagggtattaaggtaatatcacatacatttttgagaaaaaaatattgaagactaacttctatttgtggcttatgaattttatatatataaaaaataaaactttataataatgtaatgtgtggcctgtatatttttaaaaaattaataagcatttacattcttattttttaaaacattcatgaaagagtgattcaaaaaactctaaaatatggaatgtggatagggaactctcctatggagagacgattattattattattttgctttttaaatatttttatagtattataattaaaataaaaattactcaaaatcatatagagtcgtagtgagtgttggactaaactggatatcaatatgatcaagattaatattgacaaaactatttttaaaactaaaaattcttatgaggcaggattagtagctcgggatcgaatggtttaattttagaagttttctcggttattttttggggggcatgttcagcatgttattgttgaattaatagatgctaaggaagctttaagttggataaagagaaaaaaatagagagataaaattattgaaattgataatttggtgattgttcaaagcatgtttcaaagttgtctacatatgctttcttcatttggtttgttaataagtgattgtaaagatttgttatttacttttaatcatgtctaattttttttttgtttcacggtttgtaaataaaattacatattgtcttgctcgtaacttttatttttaatttaactgtctgtttactaatagcaatgtccattttgctcatcaatgggctcgatatagggcccgataggtccgatatcaataagacaatatcgaacctatcgggccctatatcagacccatcgtgtcacaataaaacttaaaattatgaggaccatagggcccactatcgggccctatatcggatctatcaggctatcttcttcaaccttcaaccccttcaatattagactaccatcgtgccctatacccgagcctacatcaaacatgcatcgagccaggcaaaaatcgaagattccccccaaaacacaaatcctagcctaaaacctaaaaattacatattctccactaaaaacacagacttaatcctaaatctaattgctttaaccccaaatcatgaaaaataaaataaaatgattacagttaaaaattaaggattacctttgacgaagacattgtcggcgttggatggtggtcgcggtgtttcgtgggtcatgtgggtgatgtggtcgcgaggttgaggtggttcgtgagttgtgggtcgtgtgggtagttcgattgtgtgctcctccgtgtgcatgtttatagagagcgagagagagaagaggaaagagagagaaatagagtgaggggtagaatgattttagaaaaaaaaaatgatttattctactaatattaaataacttaggtttaggaaaacaattttggccaataaatgtataattagtcaaattttccctttaaaaatgtactcaaaactaaaattttgtccaaaggaaggataactgtataaataatttaaattattgggcgtttcggcaaaggcatcaaaagtttcttgtttataaatctcaaaaatcaaaattacagagacacatctaaagttaaacgtatttcataattacccctttaaaacaaataagtttccataaacacccctacagaacaactcaaaagagagagaagtcaccataaacagagtgacagtagtacagaccaaaacccttaaacccttgacaatggcgatcacatcacacccacagcctccccaaatccaaaggttccctcagtccaaatacatagacgcagtccggtggctacctccagtcacggccttggaccggttcgcagccatcgcctttttcgactccgattccgacacttcctccgttgaaatatactcaattggctccaacaacccaccaaacctagctcctcagtcttcgtgggtttctccctcgagggtctcttctctcaaagcctctcaatcccaacacagaccttttgttgccgctgcaactttttcgagctctctacatgtcctgttctccgatccaatggacgcttcgtcgctcgaatcggagatttctatcccggggaaggttttacacgaaggacccatttcttgtattgatttaatggacggtgagcttgagtgtttgactgttggagaagatgggaagatcaatgtggtgtctattggggtttcgaatttgaatcaccggagagtttttgatagcagtggtttggtttcttacactgcgacgaaatgggcttctccggctgagtttgcgactgctggatatgggtttagtcttcaatggtgggatcagaggaaacccggtggagctgtttctcagttcaagggcgactggtgagttattgttattgttattcattgttgtatatgctttgtttttgggcttcaacaatgctttgtgcttggttttgaaggaagaatttctagtgtccaagatttttgttatgaaagtcaatagaaaaaaaagttagtttgagttttgttagagagtctcacattatcaatgtatcaatgtgtggaaaattaatacaatatgtaacttaaacaattggttttgagaccatttttacttccacaatatttgttgatgttgtgttatgattttgttgatgttgtgttatgattcatgattcattaactaataactacataaatatagtttgttactttctttggagtggtagttgacttgaaatacaaataatgaaacaattgtactgaagcttcattatttaagttaataagaaattagtttgaactcttgttttcttgtgattactgaatactgattactgtgatttggttttggttgaaatgaggcagggctcaaagaagaacttcgggaattgttcattccattgatattcatccatcacgtaaacatacatgtctggtgagtttgctattcctattttagtttaattgattattagataatctttttacactattggtaacggtgttggattagtttctagagatcagataacaattcagatatttctttagtatagtataagggatttcatcacttcttcaaaatatgaaagaaaaattatcccaagacaagtataaagctgtcatttagtaaatgactaaaagtgagattttcttgttctcatttcaacaggagaatgaacttttctaattttctgataattgtcttctgtctcttgacgtgtgatacataatttaaactattcctttagtttagatagttcctatggaatacttggattatgtaaatttatgttcggttttcttgcttgtactaggcaggaggttctttaggtactgtatttgcctgggatctcagatggccacaacagccaataattctttccggggttgggacaggtgatgccggagctcattctccatccgaaagtgaggtttgggaggttcagtatgaccgctacgcaacgtctgtgaacatgggaaatagttcatcttcaaaaattttgccagctatgatctgctcagaagatggtatccttgctgttattgaacaaggtatatatatgttatttgaatcttatctgtcatgacaggaagctttcctataacacaatattttcatagagctcgaataatacgaaactattaatattccaacttgttcaggtgaagaaccccttgagcttgtggcagaaccatgtgccatcaacagcttcgacattgatcgacaaaacccttcggtaagtgaaaatagctaagcaaatttgttttgtttacatgctcgatttggtcaaaatgtaaaaaattatgtttattgacaaatttcatgttatggtgaacaggatgtaatatgtagtttggaatgggaatctattgcagtgttgtcaaggtcataatatccatgaaaagacaaagtgttgtagagtttaatttttgtaattggttcattattttctggagcatgtaggaaccaggaaatgggatttcccctccctgatacttggtgctgaatctgtaacttaaccaatggaaatgtagatttcagccttgaaagggggcactttttgagtgagtgttgacttcaattatctgcttttgtgagattctgccaaccctggagaatggagatatttcttcatttgtttcaatatatgcttgctccatgagaagttgaatttgcatttgacaccttggattagattttgtattcaaacattatatcaatggtaagattaaactacattaaattttttgagaggctttattataattttcgtttgtaagaggtgacaaagctgttggaaactacaactaatacaggtttacattcacattagagtgatcttcttataattgtttgtgccattagatgacttgtatttgtttgattatttggttttgaatttatttttataagatcttaaattaagaaattcctgttttccaaaacattgttattgggaaaacttgtgtatatttgactactacttataatggtgttacactttttttttttgaagaaagtaatcgaactttattaaacttcaaattctgcaaccaaaaaaggaagcatatcagttgggacatcccccatactgaatatacgatcagggtaagaaatagcagctttagcaattgcatgagctactaaatttgctgaccgttttacaaaagaaatagtaacacctcttaacctcataagcaagttttgacactctttaattacatcaccaaagaaagagatcatatgaattggactacgtattgcttgtaccaccaccaaacaatcagtttctaagatcacattcagccattgcttatctttaatccagctaagagcctctcgaactccaattgcttcagctaactccggtcgaatgttgccatggcacagccgagacactccttctagcatatagccatgttcatcccttgccacgatcccataaccataatcttgactgcttccaaaaattgatgcatccacattaaccttgatttcattgacattaggtgcacaccatcggtctaaaccatccccagccagcaaacctgtccgtgatgtctccaaataaggagtttgagccgacttccattgatcaagatagcatgtggcaaatgcaaaaataaaggaggcatttgtgtctttgttcttccataccttatcattccttgcactccataaagcccaacacaaagtacaaaacaactttcgggtctctacagtggctgtgttgaagacagttacacaccagtcgacgaaactggtttcctgctgcaatggaagctgtattgcagctttctcccaacactgagacgctgtagaacaataaacaagtgcatgcattattgtttcattgtgcaaaccacaaaccgggcataaactatcaacatccaccctttttgtaatcaattggacctttgtagagagacaattagttccccctctccatatcaaattcttaatcttaggaggtatttttaatcgccacagctcgttccaaaactcagatgcttcaacactattccaaaactcagatggtgctacacttttactctttcctcaatgttaaagtatatcaaataattattattttcttaattttctttcgcagcaaaataatttttgttattagttgaattaatctttattattttctcagtttcttttactatcaaagaataaaattataatactcaaatgaaaaaaaaagaataaaattataatttatttttaattatttattacatgtaattttgaaaaaataaaaaatttggggggtcacgacaccctctagctaggagtggtaattcgtgtttatgaattgtgttcatgtcgagattaggtattacaaacaatatcaaattcaaactaaatccatttattaatcgggtcaaaacctaaaactcaaatccattaacctgacccaattcatttaatctatttatataaaagatcatgttagttaacatttataataagttgaacatgtttataactattttataatatatttatgagtgatttaatatatttatagcatacttaactagcttagtacagtttacatgtaacaaaataataaatataagagtgtatactttcatataacttgttgttgtgtcatttttgggttaagtatgtcaatttgaaaatgatatgtttgataaacgagttaatcgtgtcaactgaaaaattatctaaactaatttataagaaacttaaactcatttatttcgtgcaaattttaaatcatgttgccccatttgacctattttgcttgccgcatttgacctattttactacagaaaaagttcatggtatcttatctgatcagcaagacttcaccactttcttccatcccatagctagtttaggaaaatgatttatttattgacaatatcaactttttaatttatggtttttttattaaaaaaatgagatacttaatgataaataattagtaaaaatttaataattttttagttatttaagtaataaaaataatagtcttagatgttactattttgtaacaaatgaatttggtgaataatatgttacactataaaaaaaaatatgcaattttattatcctaatttttagaaattatttatgaattagttgtgcatgttgttctaaaataacttattcgactagataatttttttactatcatattattttgtaagcaacttctactccttttatttatgacttatgtattagtacaagtttccatcttttatattcggctaattaagatttttgccatctaaattttaacatgtactaaatcatgccacttgaacttttttgaccgttaaaaattctc

SEQ ID NO: 297386 - DNA, 2027 bp, Cannabis indica
tttttgaaaaaatttccgtgtgacagtatttttgtaaaagttaacccaaattccagtatttttgtaagtttccctatacttatttatatagtttcgtccagatcaaatcatagcagtaaagcctaaaccttccacatttaccatctgggcaagccccaagcttcacattactccaagtagataaggcaagtcctcaacatccaatgaagttgagtactccacacaaggtgatgtgacattttcttgggtaacgtgcatacttttatcggtatgtcgtccagagtagattatctatcaaatactgctgatttaaagaataaaataaaaattttgcacaaggtatataaacggcaccatccgactagcatcaatttcacggttactttacatagtaaatgcgacaaagagaacctcaaagatactttcttccttttgtcaattaaattcctattttcatcgaatttccagcgtaaatattgtaatttaggaagtaactatttccttttctatcctttttttttttgagaaaatcaaaaaattgtattgcttcaatcaatttacatcctaagaataacaaaatctatacaactataatttaaaatgttcaaaccattctatatctttttcccatcttttttggcaaaattgcttcaatcctcatcttgattttatgttgaataatgaatacaattaaacctcagttgaaatcgaactgagatttttgcaccaaaggacctcattaattcctacactttcagatctaaaataacattaaaagaataaatgggaaatattcacatcttctttatcacaaagaaagcatctgccataagatattgaacttcaacaacctattctttgtttgtaaacgatttagaaaaggttctccaacagtagatcgccgtacgtattacaaaacaaaaataagtgttccatagtttcatcattatcccaacacaaagggtaagaactatcatcaatgttcatacagtggccaataaaaagtgggtaaatagttgaaaaatgtgtttcacaaaaagctagagggaagaaatacattttccaattgagaaatactaaaaggtactagtggtgtcaaacaccctcctacgtgtaaatatcgctattgatctaattaagtatcaggtctcatatagtttaatataatagattttaggaagtatcgctagccaatcacaaggcgacacgtcttaagggtgctagctaggcaccactggtgcccaatagcaattccaatcatttcatcacattttgtcatcttgaaaaataaatagttgagcttcaagaaaagtaattttttttccaactatttaaatcattacacttagagcatctccattcaaataagctaaaatataactcacatccctcaatagagtgtcaatattgctatattttaacacattttaaaaaaaattactactctaatgcatgatattctaaaaagtatgataaatttagcccattctaaaaattgtgataaatttgacacaagatataacattatactaaatttagctcacaataaatgttatttttgtatttactttaatgtcggtaattattataatttattgacttttactaaactttacattctttagttattatatttttattatttaaataataaaagaataattattattattattatttttgcaaccatgaaaagccaagtttggtcatatagattttgattgtaattagtataattttatttttttaggagagatcaaataaaataaaatcaatatataatactatatgttcaatctctctctatattactctgtgaaaagaaaagatcggatctgaatgatatctcagatcctcttttggattggactgaaaactcgattatgaggtgagtttctttcttgtttttgaattaaatcttccattctttttagatattcatatgagttatgaattttagaaatatcttttcgaacccaaaatctttaatcccctaaattttcttggcccgtgagaccccaatttct

SEQ ID NO: 297387 - DNA, 2756 bp, Cannabis indica
ttgttaattgcaataaaaaatgataatattcttaccaaatattgaacttaaatgaatgatattagttttttttttttattttttcaagtaaatattaaaaattaaatatgtaattagatattagtaatttgattaaattttaagatctaattgaattgaatcaagagaaaaatattaaattggattggatttctaaccctaattttaaagagcaaaacaatgctcatattgatagttaataataatcccacaaaaaactttataaatacaaaaaatgatactactaatccagcatatatgtgttcaaaaatcgaacaaggcatactggaaagcataaagtctcaaatttcccatcaaattggtacaatattgagtgatttaaacctttgatagaaaagaatcattatcatgccaagtgcaatatccaagtacagaagctacaacatattaaaactagaagagcggcaacaatagctagaagggctatacaaaaatttgagaaggaaaaaagattattgaacagagcttaaaacagttatcttcagtttcccttcgtgtggaaggcatggcactggaaagcatacataacttaacgcttagagaattgtggggccttacgagctttcttgagaccagccttcttcctctcaacaactctggagtcccttgtcaaaagcccttccattctcagtggcgtcctgtggtcctcactaacctttagtaatgcacgggcaatgcctagggagattgcctgagcttgaccagacaggccaccaccatgagctttgacaaaaacatcataactaccttcatatcccaaagtgaccaatggaaatttgacatattgtagccacaatgggttaccttgaaggtattcctgcacaaattaaaagccccagtcacaaaatatagatatatatatataacatgatttttaacaaatctaatctaatagaggtcttcgtcaaacaaggataagtagaaccggctttcggttttcctaattcttttgtcaacccacggtacagatcagtagtattttcaatccaagtatggacacctcagactcttgggcttagcaaagttaactcaaaacaatatccagttttgaaaggagatcaaatgttactatttaaacattaatctttatttcaagtccataaaatctcagatgcaagtggccacaactaagaggcaagtgatagggaaaatataagtttgctctagcattttagtttaaaatccattcacagtagtatgaaatgttcacatgagtgcatatctcccacaaactagtgcagtgactgcagaaaatatttcttgaggttaggaaagtttttcatgactattcaaattcaagaagacaataaaattagataaaggaaaaataaaagcttttaaaaggatagtgaacctcttcacatgaaagccggtctactttgtgaaaataaagagcaaaagctggaaagcctcaatgaatgaaacaatttaaagtcctccacttgatcatcacatggccaaagccacaaaagacgggtatattttccaacatgaacttaaagaagtttaaagtatcaaaagatgccagtacctactttgatagcaacgctaccaactctaaaacttcagcattttcaagactaactgatatgtgtatacataaatataaatccactatgcgatttttcccaaagaattagttgtttataccttaactagaatcaaatttacttaactatagttagtacaattgacaaaaacaataaccaaactgttattcaagcaaaaaacccaacaactctgctgtaagcataatgcaagaaagtaattcgaaaaatatggaaattagtaaacccaaaacccataaaaaaagtacggaaaaagaaaaatcaaacacagaacaaaattacgcagtcataaatgcataaacgcacaaaataccaaataaaatatgtttgtatgaaaagtatatatagagataaagggaggttatagaccttggcgtcgcggtaattgatgataactttcccagtgccttcttgaagaacaactcgagcaatggcggattttcttcgaccagtaccgatgattgtttgggcagcgaatccacctgggagcctcgatttcacgtactttgtaaggtcagcggtctccactccttcaggcgacgcaactgttgctgaaacaacgagcggcgaaactttggcgacatgggagactgagataagcttcggtcggttgaaggaaagagagcttggtttgtaagaaacctgagaagaaaaagagagagatgatagagaagatgtgagggatgcaaccgaaaccgccattatcacctttttaagccttctcaaagagttaggattttgaagagacctctggagtggaatgaagtaagcgagttgcaggagcggaactatagattggggataatgtgtgtgaattgacgatattacccccgactcagggaacgatactctgatttaggactactgtaagccctatccttttcgtctctgccgttactacaagattttttgcacacgtggcaccatatcgagattctcttctttttattattatcttttcgttctttgatttaacagaatgccttagtgggccgaagagaggcccatatccataatagttttaacatttgtttgactttcttttcgaaaatacgtaatttggttttaaatttgaggaaattacactctatactctttttatattgtcctctttaatttttaccttct

SEQ ID NO: 297388 - DNA, 1424 bp, Cannabis indica
gaaccatgcaacataaaatgtgatttctgatctttattaattagtaaatctgactatattgaaatgagttttatttagggcacaaaacccaacagatgacatactaggtactggacctaattcgaagttaatttccaaactcattgctgacctgaatacatcatttgtcttaaaagacttgggtcctatacactattttcttgacattgagatttatagagatgttgcaggcatgtatctttctcaaagcaaatatgtgactgatttactagatggtgtcaaaagctgccccaatcccaccagttctacttagaaattgtttgtggctgatggtgaaccttttcaggacatcactctttatagaagcacacttggtgctctgcaatatctcaccttaacacggtctgatgttgcattcatcataaataaactcagtcagtttattcatgccccaactgtcaaccattgggaagtctgcaagcgtctgcttcgatatctaaagggcactatttcacacggcttacttctcagaccagcagctttcatggatatttgtgcctactctgatgcagaagcagaatgttgttgctagatcgagtactgagagtgaattttgatgcctagccaacacttctctagaaatcaaatggcatgttaatttgttatctgaattgcacatcaaactagctcacacaccagtcatttgggttgacaaccaaggagcagctgctcttgcagctgattcagttttccatgctcgaagtaagcacatagaattcgatctacactttgtaagggatcaaattatggccaaagaaatatctgtcagatatattctaggaattgatcaagttgccaattcccttacaaaacctctctcaacaaatcggttcttgcatcttaaaagcaaactcaatatggttgctaccccttttcgtttgagggggatattaactaactagtgtttgtttttactattttagttagttagttattgtagtttgttttctcaactctcttttgccttgtaatactgtgatataaataaagggattgtgctcatattttgagttaagtttttcagctaaattctctctatttcttccctatcctctctgagttttctttctacaagtgccctgaaatctatggtggagtttggagagaagaaaagaagacatgagaatgtgaggttgatgaggcatcaattttagtttcattcaaattgttttttctttcatttgtagtgtaatggataaggatgaagatgttgatgaagagagaaggttcctctctgtctaggttgggtttgatggagacagaatgcatgaagaagaaggaatattttattattttttttattttattaattttataactttaatttaattttttaattttaaaataaatttcgaaataatttt

SEQ ID NO: 297389 - DNA, 7163 bp, Cannabis indica
cggtccccgagctcctcactcattctgttcataacagcaaattccatctaaagaaagttgagagagcgaggaagcccgattacccatggtagtcaatttcctttgcagatcaaagcttatgtgggtttgaagctcaagaatcaatggctggaggtatttcgatccttaagttatatagtgtatatattttttaattccgcattttatatacacattcatatatttcagtttatacatataaattgtctaacacttactcctttttagattctccatactgcttacttatcaattgtactctctttctttcctaccaaacatagagttagatagagtctaggagcttaagacaccactaatcctctttttgacaccattaaataaaaaaaataccaatccacttaaattcaaattagttagaataaaatataattagaaaagagtggattgcaatcactttaggatacattcttttaagtacaaaccaaccctctgtattgatttctgaaaaagactctgtgtcaaaattaacacagatttctgagtcaaaaatttgataaaagttagacacatgtggttttcttttggatgataacaacagcaatgataataagaaaccaaataaatggggaaccaaattaagaaacgtccaaagctgtgtggtgtagtaatggctgcagccaacatctgacacactcttcaattagttaagtcttaacaactttatttgatgacccttttacccccactatcctatctgtctctgtctttaggggtaggcccaccaaaaaaagtaaataaataaaaaactaattaaaatttttttctccgaacttaaacatgtatcaaatcatattctttaaatttttttgaccgttaaaaattttccatgaactattcagattgttagatttaaggatttttgtctaatttcattcaattttacttttcagtgattgcttatgtactaaactatgctcaaatctatcaaatcacgcctctcaaattttgatacgtactaaattatgcatctgaactttcatccatgttagaatcttaatagttcagggataatttttaacggccaaaaatattcagggcaagaataagtacatgtaaaaattctagagaaaaaattactaattaacctaaataaaaataaaaaaaaaaatcgttaataatagagagaaaaaaaaagagtaataattaatatgaaaattattatggagagttcatccacttctatactactactcataactacctttggtatctcaaagaattacacttcacgtcaacccaattaccaatggaccttccgatccgcaagttcagccttaaccttctcgcctggcttcaccgatctcgtcgccgtaagtatttctacatatatatatacactcaattatggtaaaattcagaattaggaactattatttctggggttcctttaataataaatgtttgaaccaatttgggtaatattgtttttgcattaaatttgtgtttttgtgatataattttcactttgtaacatgtcatattctgtacaagctgcctcactatatctggaaatatagtcaattatcgcattatattaagaaactgtgaattttcgttttctgggattttgattttggttggaatatagtcatttgtgggaaatgtagttatgcgtgtacataattaagcactttatatgacataagaaggtgctggtgttttataatgcatgttatagtgagatattttggtttcaaattgtataactttttggcatttctgtttgactgtacatttgtagttgtttcagtttatgttagtaatatttctaattagtttaggatttcaattggatgtaagaacctatataagtggtgcacctgttaacagatcaaatggtttctcttgtaagagctgcaaaggagcctaatcttcaccctttttcttctctcccttaaccttctgcccataccatgtggtatcagagcaggcttgtctctggtttcttggctgctggtgacctgaaattgtcaccctccagccaaatttaagaggtctcttcggattctggtggagcagagctttaattatcattccacctcttatgatggcttataacaagcggttaaatccatcctaaagaccttgtctagtctggcagtgacggttgatatgtgccacgacaaaccagtagcaaatcttgctagagtagtcccctcaagttcatgtctcagttgagactaacaacaatggtgattactctcactacaaggacattgaagattgaagaagctgctagaatggttgcgcttactgctgccaaacatccgatgctagacttgaagctttaccatatgactctccaatcgagggcaagagtaaaacatcctggtgcaagataatagaaggggattcatgatttaattttgctaaaggacatcctggttggtgcttccaatgttgccaacaatgtgtccgatgttccttttgaatacaatatgaaggtaggcctatcccattttgatgatcaattacaaaatatgattttcttagattgattacataaactgtagaggctgtctttcattaggatattcatacagaaaatggagtaaattggtagcatataagagtcaaaaggggaagtagatgtatggtggcaagtggcaacagctccaagatttctgactgtttcattcctccatctgggtttttagcagatactttatatttaatatcaaaattgcttcctagttttgatgaaatctggccaattatgcacaagaattagctgattctcaaggtacatcagagggctaaagattttcataatcatttggtttcacttctgatttggagttctaatgagtaaattagcctacgattccaattggttaactacttatgtcagtgcctacatgagtgctgctccttcatgaattgattatatatattcagtttggtgaaattttcactcatatggctttttcagccatgcttactgaagtgtaaaaatttccctgtgccaataataatattttggcataagttgggagaggcatagaccctggagatattcttgcgacttgtgaaaacaagaaatattaatacattggagttccatttactttatatttagggtggagaaaattacatttggtttgtcattgcattgatgaaacatatctaaaggtcattatcaagttttgaaaacgttataaagaatttctaggcttagatatgtttacacggagtggctcgtttcaatacgtaaatttgtgcatttacatatccactgtactacttgaaaattttaactatagattatttctttgctgcaacagccaacacataaaatcattttatcccatttgttttcccattagtttggtttaaattaaaattttctgttagatgtttattgaaccaatctacttgaatatatctctaataagttgtcatttcagggcgtctatcatttatcaagcgctatgcatataaagatataaagagagcaacagatggttttcacagaattgtttatagcaataatcacagcgctgcatataaggcaaaatttcgagatggtgggattgtattagttaaagaaattacagacataaatcaagaaaaggaagtgttctacagagaagtccaactattggggcgtttgcatcaccgccacctccttactctccgtggtttttcttttggtcataagaagaggttcgatgctaatctctttgtcattcatgatattgcataagctaaactaacacgtatgttttgttgatgtgcttaaatctttgttcaaaagcaagtctttaatcttataaagactttgttaatcttataaagattaaatctttgttaatcttaaatggaaaaataaaaaataggctccaaatagtttatcactctgtgaatgttgcaagaggatgacactatgccattcttataaaggatctgaacacctattttcagagattgacattagttttactattttagcattgccatatttctgttaattttgttcttttacagattctttacttggatagttatgtggtgtcttgttcaatggcacactcttggtgtgatttgtagttatgttgcattacttatcacatggatgaagtaaagtactgagaatgtttcttttgtaatcttatttctttattttttttttcaatcaaagcttaaacattggaatgtttagtttgtacttacccttaaatacaagaaattgttctattttacattgtgataaataaaacaatttagatagatactgaagacttttaatgttttcctgtattttgtttgtggttctaatgattttctctttattggcccatctccttctttccctaaataacaagttgttggattcttgcatacacatgaattgcaaatggactgccctgtgatcatctttctcctcttctcttcttgtgtttttgaaactattcaattatcatctcactctttttagggaatttgaattctggctttgtcaaagtttcttttcttctcttaattggagtaagatgtttacttgtagtgatagaattgtaacgataagtcttgtgaactgatacattagcattgttgtgaattagaaaaaccttgaatagtttaatgagtatgctgttcattttaatatttggttagataaatgatggcacttattttttcatgtgtcctgttccagagtacatctatgtgtccgctaaatggattcttgaaccttactatccacatcttaatatatagtataaatatacattctttaaaactgagatgttttctatggattgacagcatgtttaactatttaggctaaagtcgatctttgaaggagaatatattatttggtgcctgtcaaattaattataacttttgttcctattggcagattgttggtgtttgacaacgtagaaaatgggagcttgaaggagcatcttaatggtatatatgtatatatatttatacatttctagattttgtaattgtgtatgtgtaacacaaatttaactcttatcattggtttttgacagatcctcttagaactccccttaattggaggactaggctacaaatagctacgggagtagtagctgcattggtatgttatatacttgtaccattattctagtgacaaatgataacaagtcttatcatgcatacagaattctaaagttgataaaatatcaaataaacaaaactatggcatctgacttgaaataactgtggatgtactgaaaattttagaataattacacacctttgcctaatctgtaaggtgtaactttatcttcaaaaggtgtaggttcaggttgtgtcttcatgatgattctatgtctgaacctcctctttagcttttttttcctccctagagggaaggataattaaggttctcaagcaattttcaccaatttgcttgcattgattcgggatattttaacgtgtaggaacaatggtgaacctcattcactctcttctaaaaagaaaaatcaaaacatgtgagaagaaataattgtagaaggtttagttaaacagatactcaacaaatgtgtacaaagtttaagctgacatatttgtccaatttataacatttttgtgtcattaactctcaatctttccatatctaagcaggtgttatgatatgacaactttttttttctcttatgaacgttgagactatacaaatagtatgtctatgctgggttttgtttctctaacaatttaggctcaatgtactaatttttaacgctggatatcagagttttgtcttgttttgcattttaaatttgaccattgttattttgaatgcaggaatacttgcttctcttcaatgatccaccaatctaccatgtctccataaactcaagtaacatcatgctagacgagaatttcaacgcaaaggtagaatctttacattcctatacactcacacttctattgtagttcacttttcaaaatccaagttaaagcttccctattctttccacagctctctgatattggcattgttacttctactggagataatgaaacaatgcctcatacctcatgctcaaaaggtaggctcattttactcatcatattcataccgggcattttcggttaccctttttctctttattgtaacatttttggtttatctctgttcctgcattgtatttgtagatagtatggatcaggaatgtagtaacattatataccaacttggtgtgctgatcttggagctggttactggtcaatcctcagataatggtgatgctgatttggtgcaatggatccaggagtctcgattccgaaactccatccataacatgatagatcctgatctgggcaatacctatgataatagagagcttagaagtcttctggctgtagctaaattatgcattgtatctcgggaaaaaccaacgttttcagttctacaaatatttcggtattttcagaagaaggtagaaattccacagtgaataaatttaactctcaaagcaactctttttggaaattttatagtgattttttttatttcaattcattggttgtttcattctataatatttgtgtagtagactgtagacacaatagtgggatcttcatggaaacctgacaatattcaaagagaaaagcagaaataataataataatatatgtatatttttttacgttatctgttattttctattaaaagcacatatttttttgttgaatataataatgtttattcttatcatttgcaaactattactttagtgcagcaattgaaaccgaatcagaagtatagtattttattactttagtgctttggaagtaattgagcatttagtctaattactagtaattacacagtaagagaattgatgagtataattgagacctttcaattatttcgtgtaaattatgtcagttaaacaagagaattatttagggtgtctttggaagtatcagtgtaattactaagtagtataattactagggtggtaattacacagtgtagtaattacgctatattttaaaatgcaaggtgtgtttggatatgaggtggtaattacatataaattcctaatatcttgtttgacaaaatagttagtaattacatgagaaattaatattttttaatagctaatatttaatat

SEQ ID NO: 297390 - DNA, 2655 bp, Cannabis indica
tttttttttttttgccaagtactctagtacataaaggccgtacaaacaaaactagcatgtgatatgtggaaagtggtacatacacacatgggctccaaatgaaatgcaaatttcacgattttttttttaacttgcttgcccatgtggtgatattatgaatgaggagttttgatacggatagagataaataaaatatctatatatctacacaaatatattatgtacataaagaattttaatccacaatatgtttcaacaaaattatacaaaagagaaagatgagttttgctaagatgtccaagaaaaagcaattgcatgacagtacggaattgtgaaataataaatgataaaaggataatgatgtgtaaacagaaattgacccatgagagaaacaagtaagtgaaaaataaaaagaaaaaaagaaaaagggtggatgagaatgggggattaatgacacacgtgtggggtgggggtgtggatggcgatggaagcaggtaagtatggagtgttgttgtggtttggggtcttaaagtgggcctaagagggtggcccacaattacacgagggggcgtaaatcttgactgtggaatgggcctgcggaaactgacgggggtaagtaagtcattgtctcacagtcaatgctgtagctttttgtgtctccgtcgctttcaaaaggatcaaagggaggagttaaacttagccatgaccatgcatctcatctccaccacatgaataaaaatcatcatcttcttcttcttcttcttatttttcctcataattttatatataatatatatatttacgaagtaaattattatagaaaattaggagggtcattttgtgagaatctgatgtatgggacgaagtatagaactaagttttacatatagattcaatgaattccatctttctatctatcatatcttgaacaaaaaaaaaatgtttatatgcacatttgaggaatgtggtgcttttaattttaggaaattttacataaatatacatcaaatttaaaataattataaaaatattacaaaaaaattaaatattaaaaatattgtgccacatcagtttatataacctaatttcaacttaattgtatagaaataataaaaaaataaaaaaaaagtaatataatttcaattttttttgtttttttttttaaatatttccctgtaaacttttattaacaataatattaataatatactaactagttacctttttataaaaaaaatatatatatatttttaaataaatttatatattgattgtgtgatatgattttgtcctgtgatgtactttcacggaatgtattccgtggtacattaaatgggtttcaaggtatattaaatgagtgtcagggtacgtttctattttttaaccctaactacacctagatcaatctcaaccgtcagatcaaataactctctcatctgacggctgccgtacatcacggattacaatccgtgaaagtacaataataggataaaatcatattcctatttttatatctataatttaatatactaaaatgtatatataaaagtggcattcaacttttatattatcttcagatttaataaactataaataacatcagtaaattaactttgataatataagcacacttaacatacactataaaccatcattacagtaatcaattcattagtatagtacaatttgcatgataatcataattttgctacatatttattgttgttattaatattataattttcatgttattttcacagacaataaactataaaatatataaaaaaaaactaatattgataatataatcacacttaacattactgtaaatcattattaccgtaatcaattcataagtatattacaattgcatgctaatcttaatcttgctacatgttatattgttacttgatattgattttcaagatactaaacatacttttaaagtattttgttggttgataatagcatgccttaaaattttaatattttttgttgccttcatatcaacttagacgtttacaattaacatttcttaaagactgatatgtttacaatcactgtaaatttgtatcagaagctaaagacctttaaaaaaagactaattagaaaattttgccccttaaattatgacatgtaccaaatcattctccctaaactttttaagtcgttaaaaattctcctcgaactattgaaattattagatttaaagacttatatctaatttcattcagtttaactaatacgataattgtttatgtactaaatgttgaccccaaactttgatatctattaaatcataccccctgaactttcaaaagtacaaaattgtgccccctaatttttcattcatgttagatttttttttttagtaaaattggataaaagtccttaattctaacaatctcaatagttcggggaaaatttttaacgacttaaaaagttcaagagaatgatttggtacatgtcaaagttcatgaggcaaaaattcaaactagccaaaaaaaaaaactattattttaaaaagaacctaaaacgctataagttgggtaatagacccacaagatttttgtaatttaatcactggcggagccagttgtaaatgttagtggaggcaatttttttttcttttttttttttgttttaaagtttaag

SEQ ID NO: 297391 - DNA, 3221 bp, Cannabis indica
ctgcagcaacagctggagcagagaaagcgaggagagggagagagaaaatagagaaacggaagccaagataaggagcttgagagaggaagagatggcgtcactgagtcgaattgagaacgagtacagagaccaactcagtgaattgcagagagaagcggagagcaaagaggccaaactagtcgaagcttggtgcagtaagcacgcgaggcttgccaagctcgttgaccagattggggtccacgctgctggtgtttcttctcttcgcctcaacactagtactcgtccaaattagtttccttattattttttgtttttctttctttaatttgtattgaaaaatatatatttaatggcgggctcaagtgatcgtgattgaactactaaccccacatcacccaatatgcatgaaaatattcagaatcaattttgctttatatggttaatttatattacatgataaagatgatgatgatcacgttcatttaattttgacagttttagattttaagaatttagtgtattgtttttgtagtggatcatttgttccaagagaaaaagaagtaattatataaaagagaaaagataaagaggggtttgaatgattagacgttgatattgctgagggtaaagggaacaaaggtagtaagggatgatgaaagagaacagagagctttttgatgtactgtctaatctgctgctgttgttgtttacatttttgttagcgaaaaagcggtgtgaagtgaagggactagggagactcaacagagataccacacccttttcgtcaccctatactaacccctttccaccccccccccccatttaatgttaatgcaattcttttaaaaattctccataaacacttcttttgatgcatggggcgctctctctctagtctgtcttcctttctagggtttttactgtacttctctctctcatctattatattgttctcagatttattatgtgagaatttattgaagttttaatgtgcctatatatcatatgatgtataagttagtattgaataaatatcatcattcatgcatgaagcagaataataatcttatcttatataagtaaaggtcacaatatataatatctaatctacgtattcatatataaaacctatggtatgatatgaaattaaaagtaattatttttttacgtagattttttcttaaaggagttaaaataaaaataaaaaaattgatgagagaaagggaaagaggtagggaaatcagtgaagaaggggggattgagtgagataaggagatagatgcatgctacgtacagatgctgtcctgcataacaatttacatacactaggctactgggtaggccgggagtcctccctagctatgtgacaatgacaattcaattcttcatttattattttatttatttatttattcaagagaattttttctataaataatcatatatttttatcttttcttttagtattttaaattgggaaaaagaaacacaatttttggttatggctattgtggatgagcagagaaaagaatgtttggacttccttttaaacagtccagcaactatcgctatgctagggtttcttgtgccttggggtcatttgtcgtcattgttgtcgccgttcatcgacatttatttccttcctaggcatttccccctggtggcggtagcatctgaaaagttctaacggttgcttcaacagtgtctcacgacgagatttctccttttgccattaaactctttgccaagcagataagcctcaaatcaccattaacttcctgcaatatgtctattcagtgtttaatttctgcaattgctttccttatatagttaatcctccacccaattttttattctccctttctcttatgtagatcacgccgagattttcccttttgctattaagtctcgccgccaagcagataagtctcaaatcaccattaacttcctggtatatgtctattcagtgtttaatttctgcaattggtttccttatacagttaatcctccacccaaatttttattccccctttctcttattcgaatctgtccatttttagcattcacttcttcttatccccctgcacctccttgggtcatcagcaaacctactagtatagcctgccttctcctttatctaggttttattgaaactgaaataggataaccgtagaccatatagtttacatgattgcttaatctgacatgaggaacttcttcttcaatgctaggcgatgtcttcttcttttactcgagcttattcactcctatttaacaagtttatatgtattcatctttcatccattcattttcttttcttgctttgacctttcactatcacactgttttttttcctctttgtctcttcttacattctctttcctgtctcatctgtcactgtcttaccttcttctcattccatggacgacctctctaataccttccaagatgcattaaaccttacagaaatggaaactcaaattcattccttatctgaccagcctgaggaagcctctgaggaatctcaggaggagccttatgcctttcttgctatcaaacttctcattagtttccatttcaatgtcaatgctttcaaacaacgccttcaccaaatgtggcttgaacgtttttccattaacattatggaaaaaactccaaacttttacactgtttaattaatttggttgttttggtgatcaaaggcgcgtcttgattggccaactgtggcactttaactacaaacttattgtcatgactcctctcgaagcaggttccattgtcactgcaatctgtaggcatgttaacctctacccttttctggatccaagtctatgggattctatttcttcatcgctctaaggcgctagcccacaaacttggggtcattttgggtcagttcattgaagttgacactgcttctttgaaggaatcttggggtccttacatttgggtccgaattgaacttgatgtcactcaaccacttctaaaaggtctttgctttcaattccaaggtatgtcatcttttgtctggcttgagttttgcttcgaaatgtaatatctcataaacttaattatgaataattcgagtttattatatattatgggattaattaggtagtaatgagtatgattatgatcttactaacctaatttagcataaattataaattttaccataagtggataaataagcataatttattaattatagagatttattt

SEQ ID NO: 297392 - DNA, 1360 bp, Cannabis indica
acaattatcctcttaagtgaatacatgaatgttgtacttaaaaaaaaaaaacacatgaatataagatgatctcacatgacattattaggacaataaaaccactcatctcaaatatcccgaccactcaattcacatgattgatgtgggtggtcgacaagtttcactgtagacctatcaaccaacccgcatccactaagtggatcgaaatagttggcttaggatgaatagcatagttcttattagaaatagaaagaaaatatgattagaatttagaaccgtataaaaatgtatttcaaaacattaatatcttaaaaataaagaagagatgaagtgatcagatgagtcattttaattttgttttaggcatagctaaaatatgtcgctacatgtaaatattgttcattctttaaaatatattttattaatttatcactcttttttttctctctatttcttttactttcttctctataatttttttgccgcgtttttataattttggcaccaaacactaaatcagaattattttttttaagacttttatattttgataaatttttattattttcaatcttctctctttttttataactcgtgtattttctttttctaatttgggtttctcatgaggtgagtattttttttttttttgttctttctttttggttgatttaatgttgtttcaaaatcattcagcaaaaacatgttgttccaaaatcataataagttcggttttttttttaaagtatgttttccaatttggggaattagataattataacttctactcttctcatgttaaattattatttaagcgcatatgtatataaatgttattggtttgtttaaatataagcaaatgttggttgattttatgaatttttttcttttcaactttattcaccataatcatttaataatgtttcatctgatatacatctctaccaaatattcaaaatggggaacagtttagagagacatttcatattaattttatgctaagttgattttatagtgaatctaagaaaacaaaagttaaagcccaattcatgaatttgacttagaatgagttcatggaaataccaattgtaagaattggtttcatggaaatgtcaattgtaatatatgtatataggtgtacattatgatattttaattggctttcatagactcttattagatttttttctgtttttttgaacaggtggtgactaaaggtccttgccaagaaacagggccggccccagcattttgggggcctcgtgcgaaattttaaaattaggccctttaaaaaaaaaaaaaaaccatatatattaaaactacaattctattagtagcttttttttttcttttaaattgc

SEQ ID NO: 297393 - DNA, 1591 bp, Cannabis indica
ttttttaaaaaaaaaaattatttcataataatatatgatccctcttcatttcacagccgacaaaaattgatataataagtaagtaataatgcaataaaatcccattgaactatacatattatgtgtagttctcttaaaacaataataataataaaaaaaaaagactatatcagtaaaagtctcttaaaaatttattttaatgtagataaattcatgttagtctttatcttttttccataagttttaaaaatttattttaatgtagataaattcatgttagtctcttaaaaatttatattttttttttcaaagtctggtagtctttattttaattagttgaaaattactatgggttgaaacattattgttcaaaataataattttaaataaataaattatttaaaaatcataaaaattattttttttctttatatttcattttcatttcattcttcttcttcttcttcatccaacttaacttgacccttactcctacgaccctcgatccacccccaacttgacctagactgcatccctgatcttgtcaaccagtcaggaaaaactcaccacctaccctctcgatctctccctcactgagatctgacaaatcaacacatgtcatttttaaagaactactaccggccggtcagtcaaaataaagactaacggactatagagagtttgaggattattaccgtaattttttgaaattgataatttatttacatcaaaagaactttttgaaatcttatgccgcaatttttccttcaactaattactaattctttattaagatataaaatctcatatatgttgagcaatcacctagctacacttatctctaaaaatgcataaaatacaataaaatatttgggaggatatatattttataaattgaaaaataaaataaaaaaatttagaaatcatgttaatgaaaatttcttttctaaacttgtgtacgattattattaagtaatttgaacacgatcaaattggggaaatgatacaatttgagaccttcttaatgtgtagataatcaagtttgtacttagaaggctaaacttgcatatataacacttacgagtatggatcatgacccatgttaccaccaaaaccatgtataaaattaataaacaagacaaagaaaattaattattagtgggcactttttctatagcatgcattaacaattttaagttttttcatcttttaattcattccttgtcaccttattttacaaatctgactcatgttagcagcttaatttatatgaatttgagtcatgaaacaatatgatttgcatctacaacatgaagctttcccgataagctaagagcggtgagcccccaaaaagagtattattattagatcatctcacactaatttatttcctgtggtatctacaccatgtaaaaaaaattatttttaagtacaataactctaataattcacactaaataaatatatatacgagtgactatttaattgttacatttttattgtaactatatggttacatttttctttaaactgtaatagcaggttattaataggcagactttcttttttttagatttaattaattataatt

SEQ ID NO: 297394 - DNA, 980 bp, Cannabis indica
aataaaggggcggacccaacactgatgatggtggctccggtgggcggaagaggaggtggaaggtgtaaggctagcggttgtgtggtggagttgattaaagagtgccctgaggagctgagagttatgtatggtgatgtgggtgtgggatgtaataatgtagtagactgccaagcaagtgaagatgatcaagatgaagattattgttctggtgtgactagtaattctggcttgtttataaaaacattcctcattcttctcctaatgacaagattagtagtagtagtttctcttgcttaacttctaattcttatgattttactttttgtccttctagttttcctaccctccacaggtacgtaaattaatattatatgattgtttgaaaatttgcatgttattcatatatttttcttgtattatgattgaagcaaatgtttagataccttaaaatgatctaagatttactcttcttatttctagtaccataaaaaactaatacgaaagattatcctccctctcccataaggcattacatactataattagttaaatattctcaaggcactcttgttaatgcaataatgcttgtaattatgtatatttggttttagttatgtaatgtaatgaattcatgtttaggtatttctattatatatgaatatgatcctcttattactaattgtgtattatttaatagtagcggttcagggacacaggaaaagaagtacaggttggtaatgatagtggtgctgggatcgtgtggctgcgcaggttggtaatgatagtatgctatctttttttggtgtttgacactttaatgtgtccaccttaatatgtgtcttattaatatttttgttattaatatatgttaatatctttattaatttatattaaaaaaattaaatatttttaattatatataatttgcaagaacatcttcaatgagagagtaaaaattgtactatatttagcaaaaaaaa

SEQ ID NO: 297395 - DNA, 896 bp, Cannabis indica
tttttttgcacaacctatccacatgtactgctgccttgcaaaactggcactctcacaaatttggaaggatgaaatctgagatttctcaattgcagaaaacaatttcaacactcaataatgcagcagaccagacgcctaataatgtgtctcagctcaaaaaatctgaagccattcttgacgagttacttgtgcaagaggaggaatattggcatcaacgttcaagagtggattggttgcaatgtggagatcaaaataccaagtttttccatgctcatgcctcttcaagaaaagctaaaaacaccatcaagtctctattgaatgatcatggaataatggtaaataataaaaaggatatgactcaagtaatctgctcctactacgacaacttatttgctactgagggagttcagcaagattctcttcaagacgtgttgaatgctactccaaccaccattacttctacaatgaaccaagcacttaccgaacctttcactgctgctgaagtagtggctgcccttcaatctatgagtcctgataagagccccgggagtgatggaatgtctgcaatgttttatcagcaatattggaatatagttggcaattcagttactcaactggttctgggtgtccttaatgatgggaatgatatgtcactgcttaacaaatccattatcactttgattccaaaggttactaatccttctggaatgagtgattatcgaccaataagcttgtgcaatgttatttataagcttatatccaaggccattgtactcagatttcaaaaagtcctaccatttgtcatttcagaaacacaatcggctttcctctccaacagactaatcactgataatattcttgttgcttttgagctaatccatcaccttcggcataaa

SEQ ID NO: 297396 - DNA, 2511 bp, Cannabis indica
ggaaggagacattttattccactgcacccaatgtaaggtttctcgtactttatatgtgtttatttcataatcgttttagaagttcatatttagggtgttaatcaacatacttgtcagtagatctaagatcctggtaaaataatttccaacactattaagttcctggattgaagttaagttatctgtctccataataacattgctccattgcttaatctatacccaacttaaggcctccttgatacttataattttagcaagaattggttgaaccgtaccaatcctatacgttgcaaatccttcaatgatgtggccagcagcatcccgggcaagagcaccaccatcgtaaagcactcttagtagcaaataacacatcatcaacattaattttaataaaatcagcttttggtttagactagttcgcaccaccagtgacaactctaaaggggattaaaagagggtcgaaacgtcattcacagacatatttccattgctgcaggactgactttgcaatgtatatggtggcagcaatagagtttgacttggcttgccataatagttcgtttctctccttccaaattgcccaagttttagcaccatcttcctacgagagacacaggagttgtgcccactataccagtaaaccagttaggaaagtctggagaatgcaaatgttaaggtgccacaccatcgagattctaacatgatattgcaaaggagcagctgaccaacacatgggagatggattcctctgcaacatcacaaaacacacagtttgttcccaatggcacatgtttttaatgaagctgagtgcgtgtgggtaggtagcctgttaaagccttccaaaagaagtgatgaattttgggggggatcttcaatttctagatcttgctccaacattctaaatcttgtgtagaaactatgtgttgcttttaagcttgcagaaagtgataaacactcttaacagagtagaagcccgagttctccatagaccaaaaatagtgatccaaggtagcggaatcactaagacaaataccaagaatcaactcctggtctctctcgacaaacaagtcctggataacctccacatcccattttctcctttcaatctacattaagctattaatagagaagctgcctaagccaagtaaaacaatcatgacaaatggattagtatcatgtggaagccatggatctctcacaatactaattgaggtgtcaacccctatgctaacatgcgccccagctctaaccaactctttagtctcatgaattctacgccaaataaagctcgaattgttgccaagattagcagacaaaaaagtaccatggggaaagtaccttgctttatacacctaacttacaagagagttgccattcatcaacaactgccaactttgcattcctagtaaagcaaaattataatcatggagattatgaaagctaagaccaccattatttttgctaacacagagacgatttcaactcatccaactaatcccacgtgaattggcaaatttagaattctaccagtacttagccatcatcttttccaaatcaccacaggttttaaggggtaaacggaaaacgaacatggtgtaattaagaagagcttgtaccactatcttaaaaagcaggtccttactcgattgtgataaaaatcttccttcccaacaatgaatctttttctgcattttctctttaaggaaattcaaaatcgttgtcttgtctttttttggcccataatgcaagggaggccaaggtagaagctgtttttatctgcctcagtcataccaagcaagccacaaactctttgctttgttcccaaaggagcattgcaactaaagaagatggaacatttcctatagttaactttttggccagatgcttcctcaaacgacccaagtaaatgaatgacattcgaagcttcgtgctcattagcctgacaatagtcgataaatagcatgtgggaaattataggtgctctattagccactttagcaaccattaatatcaccattaacctcaaattgatttattaaagaagaaaatccttcagcatagagccaaaataaatacagggataacagatccccttatctaatgcccctttgaggggtaagcaaccttaactctcaaccatcatggatcaccgtataatgaaccgaacaaatcgtagctagaattagtcaaccaaatgactagaaaacccatctttaacatcatggcacagagaaaaccccattcgatgtgatcataggacttactaagatctaacttaatggccatgaagccctctttaccttgcctcttcctcttaagataatgcataacctcaaaagataccataatgttgacagagattaaccttcctggcataaaagtgctctgagtatcagagattacaaggggaagaacttttgggttttatgccctaaataaaactcatttcaatataatcagatttacttgttaatatagatcagaaataacatttaatgttgcatggtt

SEQ ID NO: 297397 - DNA, 6427 bp, Cannabis indica
aaatgaccctacacttagaatattagattattgtaatttgggacaatcaaaaataaaactaatatataaaaaaataaaaaaaaaaaaaaaaaaaaggccccaaaaaaatctttatttaatttacatttgtcattaaagagtctatcaaccaagtaagcaatttctactacaaatgccttcagaaagaaagattggcagatttgccaaaaccagaaaagaccaaaacagaatatccaactcgttgagaaaatcataacccaaatggggttgcttgaatctcactttcttgctacaagaaattccaaagaaaaaaatatgaaagcaaaagttgtcatcgaacacaaagtacgcatcatcaacacgcagaacactgtttatttggttctgactttaacattaagcgtccagttaatcttgccagcaggcaaaggaattgactttggcaatcggagtggcacttcatactctcccacagtcgacaaatccgatggtagctgcaagttttcaggagatatttgcacacagagttgccttgccacctaaataaacacaaacacacatctttcaagtttcaactacaatgaaatgaactacatagaaattaaaagtactgtcttcaaaggattgaaaagttttattgccaaaatgtaacaccataagtaaatagatagcaagagcaaaaccatacctcagctacaatctcatctgcagtgaccggattacgcaattctataggctcgtctttagtcgagcgagtccgaaacttctcaacattgattaatctccgcagcacctataagcagatgtaaatgttagatttgcccaagctcattctgtaaggccacaagttcagaaaatccctcttatcattatgagctttagaccagattctatgccgaaaggctcaaatacattatacaaagcataaatttttactaaaaacagcactttgatatgatccaccagcaatgtatgaagataaaggcaatacttttatattccaaacatgaaatgttttctatgtctttagttttgcaaccattgtctatctcatactacaccccaaaaggatcatctattaacagagttatgtgtatagaaatcaaaccaattcaggctataacttataagagaacagaagaacacataatcaaatcataacaggaaatgggatataaataggacaagagtttactaaccaatcgagcattatcaagacgtttggctgccctttcatgttctttcatcttatcttctttagaaactttaaccactttcacctcttctttctcttcctcaggtgggaaaatctaataccacacagcataaaattaaacaaaaatttaagactcagctcaaatggtaaataaaaaatcacacataaaagtaaaacagaaaaagaaagaactcttaatcaaattagagaacaagaaagaaaccttgtgctgctccctgatgagataagcatatttttcaatattaggaacagcaagcaacttaggcatgaggtgattgcgaaaatgcccaggtgcaaccttcactgtctctccagatttaccaagcttctctatgttctgataatccaaaaaaaaaaaaagcccattataaaatcttcaaataaatcaaccaagaatgaatttttttttttcagaaaaattaaacatagaacaactacgctaaacttaatcttacatccatttactcactgtggttagtataacttccaattttctgtgtcgaactccttgagaaagatagagaagagggttcatcatgcggtcggagctatggaggttggtctccttgataatgtggcggagagcgtttctaccattttgtatgtaagccattcaaacctattaagagtataataatggatcagatggagaagaagaagaatgtagtgactgtggaagcgaaggagtttggagggagaagaaaaaggaaaggggtttagggttttgtgaactgaaatttcagtagagctcctcttggggagcgaaagagactacgaatggaggggattttggggttaaattacccaaatacccccacttttaacaatttttttttttggccctcgagttgatttacgtattattgtgtgaaagagcttatctaagctatagagtctacaagaacccaatttatgagaattaagagaaaaacaagaaatgagaagttgttacaaaattcccccaaaaaaaaaaaagttgttacaaaaattgttacaacagtacaaaactaacagtattaactaactaacggttagtttagtaaaaatagtagttgtatcatccctcctcaaatgaaaaggtatttagcacacgtgaagcttgtgcttgaggtagtcaaaacgttatgtggacaagggcttcgtgagaatgtttgttgtttgatcacatgatggaacatagcgaacttcgacttggttggctataatttggtctcgaatgaatgtaaatcgattcttatgtgttttgatcgagcgtgaaacacaagattagcagctaaggaagttgcacctaaattgtccacccaaatgataggtgtgatagcagattaagtttaagttcaataagaacagagcatagccattttatctcagctactatgtttgcaagagctcgaaactcgcttttggtactcaatcgagcaactacttattgctttttagcataccacaagactaagtttctcccaaaaaagattgcatagccacctgttgagcgtctgtcatctagacagcttgcccaattagcatctaagtaggcctgtaagcatagtcttgttgctggtctgatttaatggtaccttgaagatatctgaacaaccttttgcatgcctcccattgtgttgttatgggagcatgaatgaatcgacttaatttgttcacaatgaatgctatttcatgccaagttaatgtcagatactttgaagctcctagtgtgttgtgatagagagtgtgatccatgaatggttgaccatttgtaagagatagcttgtgagtggagtttgttgggtttggacatggttttgtcccttccatgtgtaacttgactaatagatcagagatatacttggtctgagaaagatacatgtcagtattatttcgagcaatttctactccaagaaagtagtgtacgtaatagaccaagattgttgatggagaacacttgattcaattcaacaattagattgttgatgataatcttattatactccaagaaagtagtgtaatagaccaagattgttgatggagaacacttgattcaattcaacaattagattgttgatgataatctcattaggccctgttattattatgccatcaacatatataagaagtactatcaaaacatgtccagaaccttttataaagagggaggtgtttcaccttgaagctgagaagcctttatgaaacaatatctattttaatttgtcattccaagctcttggagcttgcttgagtccgtacaaagctttatggagtttgcacacatgagttggccctgttattattaggccctgttattattatgccatcaacatatataagaagtactatcaaaacatgtccagaaccttttataaagagggaggtgtttcaccttgaagctgagaagcctttatgaaacaatatctattataatttgtcattctaagctcttggagcttgcttgagtccatacaaagctttatggagtttgcacacatgagttggtttctcggcatccacaattcttgggggtttaggcatatagactgtctcttgtagacatccatttagaaaagcatttgagacatatagttgatttattgtctagttgttaaacacagctattgtgagaaggattcgaactgttgctgtttaacaactggactagaagtatctgtgaaatcaatccctagagtttggagataccctttggctacaaaccttgatttgagcttgttaacagaaccatctgagttgagttttattctatgcacccatttgttgtcaactaatgtcatgtttgaatcatatggaaccaatatccaagttccatttcttttaagagctaggtatacatcatgcatagctttgaaccatttaggatcagcaagagcttgtttaagtatttttggtttagttggtgtgagagattcaggtagagggtgagtggtagcatgatatgcctttggtttatacacaccattttttgatctggtttttataggatgagtgttgccaattgttttaaaggtagaggtacatggaataaatgaggaagatgagcctggagcagagttgggagctgctgtgctttcatgtacttcaacattggtagtttggggcaccacatcggtatttgggagctgagttggtaaggtttgcgtatgaatggggggttcagtcatagtggatggttgaggcttattagaagttacaactagtgacactattatggatacaacatgttggctatcacagttgtggagagcaacagtgactaattcattttcttgaggagtagcagtttagactggaggatgattggatgaattgagcacaggtgcagcaggtaattgtgcattctcagttggtctaagagccatatcaggtaatgtacttggactagcaccatcagcagcaggtgttgcagaaaaccatatggtgtagttattgaaactactttccaaaggtatggtgaagaaacttgttgtaggagtaaagtagatggcgagatagttacctgttgaggttgtggtgaagattttgcaggaaagtctagctcattgaacatgacattttgagctatatagattctccctttgttgcttctataaagatagcctttgtgttgtaaggagtagccaacaaaggtgcatttttctgatttgatgtccagcttgtgagactagtaaggtctcaaatgtggaaagcaagagcaaccaaaaggttttaggaagttgtagtctagtattttgtgaaagaggtattcatatggtgataaatcatcaagaacaggtgtaggcaacctgttaataacatagacagtgtgctgaaaagctaaccaccaatatgtcagatcgagaccagatgcagcaagcaatgttaggccaatttctgtaatgtgtctatgcttcctctcaacccttttattttattcatgatcatggggacatgggtgttggaactaaatcccatttttggtaagaaacttagagaatgacttgtattctcctccccaatcagattagacagttttgattggtagatcaaactgtttttctacaagatttttgaattctaagataatgggaaaggcttgggactttatatttagtgggaaaatccaagtgtacctgctaaaatcatcaatgaaaatgatgtagtacctatgaccttcaagggatgttatgcgggagggtccccaaaggtctgtgtgcggcaacttaagtggctgagatgctctagagttggacaaagaataaggcaatttatggctttttcccattttacatgcttcatagaattttagttcttttaaacttggtgaaatgttgatttttaacagtgatttggccaaaattctaggtgcaggatgacatagtttaaagtgccaaagattgacatcataactgttttgagcatacagacaatttggaagaaaaatggagtcacttttatttattttagcattgttacaagagttacagctggtaaaacagctgaggtacaattagacaaacaacatttaaactctaaatcagtagacatggagtgggcattgtctgatgcagaagccaaagtagtggccatgttacattggagtcccggattatagtctgaagtaaaatgttggggaagcacgtaaagaccatttttaaccctccctttgagcaggacaatctctgtgagtttgtccttcaccaaacaatatttagaatggaattcaagaaagacgttgttatcattggttagttttaaaacactaactagatttttctttatttcggggactttaagaacagaattaagcttcaagggttgagaaatagtagggatagagtgattaccaacatgggttatgagaagtttcttaccattgctaactatgagagattcagttccagcatagggatgtttattttcgaggtgttcaatgccaagagcaatgtgattggtggcctttgtatcagcataccattcttgatcaatagcatagtcaagtagcatggatgaagagttagcttgaggctcctcagagtcatcaatttttgtcaagaatgcacgagaatcgccgacttttggtgtaacaaatcctttgtcgaatctgtattggcacatagtagcattgtggccaagtttatggaaattattttggtgtaacaaatcctttgtcgaatctgggtggaccacgatgttggaaattatttt

SEQ ID NO: 297398 - DNA, 2806 bp, Cannabis indica
gaagtggattggggagtcaagataaagaaagtcactactgaggcgtcgttcattttctccttcaagaacgaagacgatttgaaacgaattgtgaataaatctccatggctgttaaacaatggagttctaatccttcaacggttcacaaagattccgactaagtgggaggaggaattgaaccgcttttcctttgacggggagagtattaaatctacctacgaaatcaattactcggaataacatgctacggctagcatcaatggcgggagaggtaattgaaatccaaaaagaagatgctacaaagattaccttgaacagatttttctggttcaaagtttggatttcaatcgataaacctatttgtctggggtttctttttccgagttctgggggccgggtttggttgccattctgttatgaacaattaccctttatgtgtttcagctgtgggcatgtaggtcacgacttcaggacatgtgctaagcaccctgagaaagtttctgatggtgtatggttgaaagttgaagacaaatctcaagagaataagggaaagaagccacttgaagaggcaaggggcattggaatgaaccgaactcgatctcagagggatgaaatggtgaatggtgacctggggaaacatattaacgaatcaattggtgactcctcgatcttgaattcttgacgcaccaatggtgaaatgaaggggattgaattggttccaagaatcacgaatcagaattccctacgtgtagaggtactggtttctaacccttctttgtcttgtgattttatgaacctaatggacaattttgatgtcaaacgggttgagaaggattttgagaatgatggagggacaggtagtaaaaggagggcagattattgggagtctatgaacaggggtgaagggtccgagattgatactgggaaaagaattcatagagagagttctgaagtgcaggtgaatttggagttgagtttttctaatgaagggagagagtggattgacatccctataactttagaaaatgatctcgggggtgagaactcaaggcagaagggagaaaggaagaagagggttgtggctaaaaggaataaaaagattgatacaaagaccaaatcaccatgtttgactaacaggaaaggaacggctgagcacttagagcaatcggtgaaggagaaggatccaggggacatttctagctttttggatttggtctctggggtaaacttggaagcggcgtacccggtggagctgggtcgccgagaacaatgaatgccatgttttggaatgttcaggggcttgtgaacccctggacattgaagactctttgttcccatgtgaaagatcatcatcccgggatgattttcttgtctgaaactagacttaatgaagctgcgatggagagaattagagttgtgctggggttcgatagttgttttgtggtggctgccaaaggcaaaagtggaggtttagccctcttgtggaaagagccttatgaagtgagtattaagtcctatattgtttctcacatagacgctattgtggaaaatggcctgggatttatttggagatttactgggttttatggtagtcctgatctgggggtagaaaattctctaggcaactcttggagcgactccgagatatgatacatggagcctggatttgttgaggtgactttaatgagattgttaaggccagtgagaagaaggggggtagcttgaaacaagactctcagatgcgtgtcttttaaaaagccatttcctattgtaatttcaaggaaattaggttggaagggggagagtttacttggtgtaatgggcggcaaagcaacctggttttgagaaattggatagggtattggctaacccagagtggttcaaaagattcttgtcatcttcagtcaccctccttcccttgtggaactcggaccatcgccccttgattcttagcgccaacaatgttcaaaatctctctccaacaaggagcctggttggagatctcgatttcagtatgaacaagcttgggccgaggaggaggaatgtggaaaacttgttgaatcggtttggcttgatggtaccaattggggatctcctcaagggcttagggggcggattaatctttgtggggaggtccttaaggattggaacaaggataagaaggcggaattaagggctagaactaaaaaactcaaagaggaattgaaaaatctttcttcttcagttggggaaacggattggaagaatcgaaggagaattgagagagatctaaatgttgcggaggacaaggaggagattttatggaaacaaagaagtcgggctctttggctcgcccacggggatcgtaatactaaatatttccatcatagggcctctcaaagaaaaaagaagaacacgataagcggtttatatgatgaacaaaggagatggtgcaaaaaggacagcgagattgaagatattctggttcgctactattcgctactatgttgagtgggactttatcgaagaaaaaatgaagtgtttgggatatgatgagcgatggattggtaagatcatgggctgtgtaaagacggtcactttctcagttttgctaaatggagaggcttggggccacatcattccggaaagaggtttgcgtcaaggggaccctctatcaccattcttgtttctcatttgctccgaaggattgtcttgcttacttaatgaagcaagccgagccaacaagattcatgggcttcggtttggtaacttggaaagaagattgacacacctactgtttgccgatgatagtgttgggttttgtgcc

SEQ ID NO: 297399 - DNA, 1727 bp, Cannabis indica
gttactcttaatcttattgtgttttcactatttttaaagcttagaacattgaatagatagttttttatggaaatcatttttcaagttcttcttctttcagtcctaccttgggaagagtaaattttttctttgtttggatgtttcactctctggatgtcataatgagctgatgaaagtgtgaatctgtatgactgataaccgtgggattaggtgattgaagaatttttattcatttgactgtgggattatgatatttatttatgatactgcattgctgcacacttgcaattggttgtgtggtttaagtttcacttcgtcttacaccagtttattacagtggttaattaagcatacggtcagcatttttttcaatctcatattcttaataaaatatgacattagtgtatctacacatgcaatgtcaatatgatggtgtgcgcgagatataatttactagtcatgtaattttattattgttatttggatccatttctttctaccgaggagactttgtgtcaatatctaaatgcatctggttcttatgcagactttggttgagagtggtattgctgatcagatgcggttgacagaacttatcttgaatgatgtaagcttgtaagccttgtacatgcttccctaatctacagattcagatattttttcctgttgatgagtttggtgggcctttcttcttttcattattcttgatgactaacctctaaaggatatgaaaaaacatttgctataatggttttaagtgcggattttcttttcatttttgcaactagtcttttatcattggttagtattgtttttgagctcttataaatagattggttgatgcagcaagaattttttcggaagctgatggttgaatttaggatgtatgaagacttggaaaacgttgaaggtctacacatgatatacaaaatagtaagggggatcagtaagtactcttctctcatatatgctatttaaatgcgttactttaattgctactgactggattgtgtattttttctgcagttatgctcaatagtcctcagatctttgagaagatatttggtgatgaattgatcatggatattataggctgtcttgagtgtaagctctattgacatcagtaccactcctgaaaacattctgttggttgctgaccattttgaatacttaggtgtcattgtcactttacatataccatcatgttgttttgaggttttcaataataagttatgattatataatttagtctctctctccccctctgaaccctttgcatgtggaatagtgagttgggagaggtttttatacacctttaatctgtaatcccttcaaccttctcaactgtttgttatgttatacacaccatttgtgtcctatattttgttatagtgcagacataagtgttttggtcgataatgtggcttttgctgctcatttgattgtgatgataataacagtccttaaattattaaaatgcagatgatcctgaagttcatcatgcccaaaaatcatcgtaattttttgaaaagtagcacgttgtttttaaggtaggtaacattttctgtctgctttcctttgagtgaaagattgtagtttagtgatttaggaatgaagactgggtgatatctggttatttgtagtttattgttatttgcttcttagaggtgcatttatacattacttttctaggctatacctatcaaggatccattggtcctctcgaa

SEQ ID NO: 297400 - DNA, 2216 bp, Cannabis indica
agaattgaggaaataggttgaggggagttacagttgtacgtcttactcctcctatgacaacatcaactggggttgttcctcctccaaaaatggaaacattgagagtgccaacgttgcaagattcatttttgttgttcgtggtcatctaatctatagttattttttattctcctccaaaagtttagaaatataatgattctcacagaaggctccaaatgttgtcagaagaatttagatagcaccaaatattacgagtattcaaagtaaaatagaatactcaacaacagttatgcgagtattcaaggactgcttgaataccaaaaaaaatagatacgcgccagtactcacttaaaatagtgaatactcaaagtatagactactaaatagacaaaaacgaaaggagaaataaagacaaaataagagaattatagtggttcagtcatagcttggtctacttagtccacttcaggtaatgatttcagcttaatttatttgatttggatcacccctttatatagaaagcaagtgtcctttaggattacataactgattggtttaaaattgttttacaataagtgacaatatttaatcaaaataaacgtttaaagaataaatgaggaacaattttgtccgttcttgaattaattgcagcaacatatgcgacttgataagtcgccacttgtcctttcatattctaacacacgagctcacgggctcttcggtgttgtactcgcaggataggcctttgggcctattttgtctgaatgtctgcattcacattaatttgattgcacagtcgaacactttatgcatgtgttgacagcataagacatgcaagtctctaacgagtcgtcgaacacattagtcgttcggaccaaacctatataaagagacgttctttactcgtcacaagagagatatatacttgatcatcgcatataatcagtatatgcgcgaccagtattgacttctcttggtcctgcttattcttatactatgcagggcatagtatgcgactagaccttgtctcggtcgcatcttctcgctagttcacatcatgtgaggtcagctctactgaaactatttattgacacatcatccttttctatcaggaaccgggtccacatgtcagttgtttacgagattgtactcgtatttctagacaaaaaattcgtactataacaataaccaccacttcggtacaaccaacataaccaacaataaaccaactcatcacagctagcaatgagttgtaccaactaataaaacgaatttaaagttgacctagcaaaagataagtgaaaacagatttaacaaacacaactaacacaggcttaaatgaacaattatcaaatataggaaagatgtaactaaaaactcaacagatagaacaacaaccaacataagttgccataaaaaccatggtacttacaaaatattataaagatccgctaaataattattgaacgccacctcttattggtactaggaaccttggaaccctataacaatgctcaaaataataaaagtcatttgttgtagaattatcctaggtaattaagtagaaaagttttatttatttatttagttttgaatagaagctaggaagatttaatcgaagaaaaaggtgggtttcctcaggggtgtggtcggtgagtggcagtgccacccgaagacacttaaatcagggatttcagggcacacgcccactacacactgctgtcatgtggtattttcagaatgtgtaccaatgcatttcagaatgttttgaaggagcaaatatgataagttaaaaatattttcacatatttgagtaattttttgtttttgttgttgttaaaaaaagtattgaatatttatggcgtaagtgtttttaaaatgtttttagaatttgtttgactagtacttatgtatagcactactacatatcattcaagttgataagagtttaggcacaaatcccactatactaaatatatatatatataatttcttacagcactaaaagatttaatcctaaagaccctatgattttttcccctcttgtaaggtagtaaggtcgtggccaatcacttttggacttagtctactctagaaatagggaaagttaccgactgctcccaaagcaaaatgttaaataattaatctgaaaaatgagaaatatagatataaatatttaaaacgaaattaggagtattcttacttttttttttttt

SEQ ID NO: 297401 - DNA, 3253 bp, Cannabis indica
caaaacctcttgaattactacatacagatgtgtggggtccttcccatacaccttcacttgatggctttcgatactatgtctattttattgatgattatagtcgatttacttggatttttcccattacattaaaatctcaatcatatgatgtttttattaagtttaaatgccttgttgagaaacagttctctttacctattaaagctgtccaatctgactggggaggagaatatagagtgtttgaaccttttttgcaggcacagggaattcagtttatacatccatgtccacatacacatgagcaaaatggtaggccgaaaggaagcatcgtcacataattgaaacaggattaacattactcgcacaagctggactagatttatctttttggtggcatgcctttcaatgcagggtttacaccataaacagattgccaacaaaggttctcaatcacatcagcccttaccaatgtctttttggtcatgaaccagattacaagtacttaaaaccatttggctgcatctgttatccatacttgagaccatacaacacacataaaatgagtttcagatctcaaccatgtcgttttctgggctattcgccaaatcacaaaggatatatatgccaaaatcttcaaggaagaatatatattgcccgacatgtcatcttcaatgagcctcaatataattttccaccttcggcatcacaccagcaacaacagcagccgaacacagcctctactcttccaagtgctcaattctttactgaagcagccccaattgaacctgaacctgctactgtggtgtctcctgtcattcccacatttgtcgtgtccaatgaacaaactgaatctactcctatggatacttcagcaactccatcactgtctacatccactgaccaagtttctgctgtacaaaggactcatccaatggttactagatcacaaagagggatttataaaccaaaggcatacatggcaacacgacaccctctccctgaatctcttttgcctactgaaccattatctcttaaagctgccctcaaggatccaagatggaatgcctcaataaatgatgaaatctttatgctgaaaaagttaaatactaggagtttagttccaaagacatctgatatgcaaaatcttactaataaatgggttcatagggtaaaactaaaggctgatggtactctcgacaaatgcaaatctcgtctagtagctaaaggttttcctcaaacaccggacatcaattatgaagacacctttagtcccgttgtcaaaccggcgactgtacgggctgttcttatactttctgtctcattcgaatggtttgttaaacaattagatgtcagcaacgctttcttaaatggtaccctcaatgaagatgtctatatgcaacaacctccgggctttgttgatcctcacaaaccaactcatgtgtgtaaactacataaggccatctacggactcaaacaagctccacgtgcgtggaacgataaactcaaacaaacacttttctcatggggttttcagcaagcaaaatctaatgcttctctctttatctttgggcaaagatccacaatcatctatcttttggtatatgttgacgatttcttaatcacaggtcctaactcaacacttattaccaagcttataggtgatctgaattccaatttttctctcaaagacatgggaaacatccattactttctcggtatcgaagtacacagaaacaaagtggggatgtacctctctcaaaccaagtatataactaatatgttggtcaaattacacctcgatggtgccaagccatgttcaagtcctacaagttctacttcgaaattatccttaacaaatggaactcctatggatgatgtgcatctgtaccgaagcatagtaggggcccttcagtacctcacccttactcgccctgaagttgcatatataataaaaaaactcagccaatgtttccacgcacctactacacttcactgggaggcaactaagcctttactctgatatctcaaaggcaccatcttggagggactacttatcaaacctgccctcaatttgtctctccatggctactctgatgctgactgggccagttgccccgatgatcgtcgttctactggcggttatgcaatatttcttggtgacatcttggtctcatggtctgccaaaaagcaagcagttgttgcccgttctagcaccgaaagtgagttttgggctcttgcaaatgctgcctcagagattcgttggctacgctccctcctgcaagagcttcaacaaccacttacaacatctcctatcttgtgggtcgataatcaaagtgcggctgcccttgcagctaaccccgtttttcatgctcgatgcaagcatattgagatcgatatgcactttgtcagagatcaaatattggccaaggaattatctgttcgttatgtttcgtcggtggatcaaactgctgacattctcaccaagccgctgccaactgacagattcaactatctcaaatccaaactcaaagttgtttcaccccatttcgtttgaggggggctgataacattagttaaaattagttagttaaatctgtcaataattagttaatattttgttttgtaacaaaccctctgtattctctctgtattgttttgttccagcctgtactttccttatataaataaaggtcttgatctgttgtaaggtcaagtattcatttgctcaaattctcagtgttgttctcatagaactctctgcttttatctctgtaagtttacagccttgaacactacatctcatgacttatcttgtttcttggatttgattatagatgttcgttgtatttatcctctttatctagtattcctatttctcatgtacgggagaaatgttaatcttgccgcccatgggttagcaaaacatgcgctagagttggatagagatacctcttggataggagaaattcctcttcttatttttctattgttgtaaacgatttgtaatttataataacagttgaatttttttaaaaagataagggtaaattgtggcataaatacctaatgttttagattttatacacttaaataccttatttttatttttggtaggcaaaaataactcaatgttacaattcttttacattcattaatactacttatgttaactcataaatatggacacgtggagggcccatatgcattacattatttattttattttaaaatttaatattcttaatatcaaaaa

SEQ ID NO: 297402 - DNA, 1691 bp, Cannabis indica
tttttttctttattgagtaagtatgttgtccatattggttctggggggctcacatgaggtcacttgaacacacttatggcatcttttgtgttcagatcatctagggcatcattttttttatgagaattcactcattttttatgttcaagagaagatttttttttatgaggtttaggtgtggttggtccatttttttcttttaatctttggtcattctttttcgagattgagtaatttttggttttcataatcttgtttcaaaaagttttaggcttctaccttgtttgatttttttaccatgtcttcatgattgggtcatgtgttgtatgattttttttttttatgttaatgggccttatactaggcccaggaaattaataggtttcttaattttggctcagctgatcctctatattttgaagtttaaaaagggtttcttccattattgtttccacaccagacttacctactcgaaagtctcctgagctcatccttgtgccgagttatggggaagcgtgcttatcaaaaatccttaaaggttattctgtcctcctacaccgtgccaccatcgcctagtctctcacctacattgtctgggtcagttcatccttcatatggtccaggtatgtcttctcttgtcaataagcaatttactcgttcctccttgtcttccccagtatagaaaccttctactgctgtgtcccctgcacaaaccatgtcaccctcactcacactgtcaactgaaccactatccaaccctaaagatagtcaagttgggtcatcttctaaacgaaaggatgtccatagctgtaaggcttctctgtttaaaaaacctagggtctcagctcctgagtcttctcccatttctagtccacctttttattctcatgacaaacttctttgttttcaagagaatgtgtgttgccgtccattgtggcctgagtatagagtcaagcttaggaatttctcaaagattcgtgagctaatagtgtcaagaaagtgggaacgaactgtctcccatcttttgcagcccaatgtcaatcttgttagtgaattttatgctaatttggatgaaaatattgtcaatgagaatagcgagtataagtatcaggcttacattcaaggaacttggttttggtgtgccccctcgaccattagtcttgtcctgaaaatacctcggttagctaaactcaccttcacaaataactataaaccatcttttaaagaaattagggctaaaattactagtcaacctgactttgtgttgaatggaaaggaacttcctgttaatgtgctctctgagttctatcgggttcttcataagattgccttatccaattggtgggctagttctcatgtgtccacagtgaattataatactggtcgtcggttcctatttgctcttggcactggtgtctctattgacttaccaagcctaatgtataccagaatagtggattgtgctaaagcaaaatgggttaagcatactttaccttatcccagtctggtgcaacaattggttttgagaagtcattcttcttgtaacgtcccagcttcaagcctccattgggtccatacacccacggaataatggctcttatacacgggtacgtcactctggctgcttcatggattgatgactggccctacagaccaacacgagtgttccagcgtgcttgtcctcactcgca

SEQ ID NO: 297403 - DNA, 4520 bp, Cannabis indica
tggatattcaaaaataatattcattctggtccgatcacaattagatatccaatgtttggagaggtaagttgtaactggatcagtcagttatcattggattggatcgattcatgcacacccctagattctttatatattatcaaactttaatggaaaaaacattttttattaatatattgaacgaatttttggattaaaatatttttttcaacttttttttttactaattttaataaaatatttattatttattgtagttaattttaataaaatattcattatttactattttgaacgaagttttggtttaaaatgtccacaaatgataattttgttgagaaaattcgaaagagttaggaaaagccaatatcaagaacgacaatgtacaaagtgctcaagattatcaacaaagaaggtttcaatgacattcacaaggttgatactcaagcaaaacaggctatgttggagattatagaagagctaaataaagatcctcttaatttccttacaaaaaaatcctcttaattttattttaatggaataggaacaaagggccagagacaaatatttcaattttcatagtgtctataatttatttttagctcaaaaatttaaagcaaattgggttaagaatagggatgaaaatacaacaatatttcatgcatccttgaaggctcgaagatctcagaatcgaatttactctatcaagaatgaggaaggcttttgggtgtataatgcagaaggtgtccaagaagcttttttgagctattatcaaaagctgttaggaacctctacgagcaacagagtcaaagtgtattaatcaatagtcgatttaggtttatagaacaagaaaaatacatagcacaaaaatagagcaaggctcgagagaacaagaaggaaagaaagaaagagagaaaaaagcttgactattctgttaatagattaatatttatatatcgtgattatacatggattgagcataaaactgtgataactaactaacattaattacttaactaacaattgacataactaactgataacaaacatcaagtcatattgaattatactaacatccccccccccttcacaaataaaaggagtagcagccatttgaagattggactttagatagttgaatcgattagttgagagagacttggtgagaatgtcagatgtttgatccagagaatggacatatcgaacagacaattgttttgctatgatttgatctctaacaaaatacagatcaatctctatatgcttggacctagcatgaaatattggatttgatgcaagagttgtagcactctagttatcaacccatataaaagggtagtaggcaggtggagcttgtaattcagtaagcagagatgtaatccatcttagttcagctgcagcattggctaatgcctcacttttaatgctggatagagccaccacacttttcttttttgcagacaatgatatgatatttccccaaaaaagacaacatagccactagttaagcgtctgtcatctacacaactcgcccagtcagcatcagagtagcatttaatggtcattgtaatagcatgtcgtaatagtatgccatctaaaatagtgctcttaagatattttagcaaccgtttgcatgcttcccagtgtatggttgttagagcttggatgaattgacttagtttgttgactataaaagcaacatcttgccttgtcactgtaaggtattgcagagcacccaaagttgatctatataaagatggatcttcaaagggatcaccctctgtcaaagaaagcttggtggaggcactgttggattagggcagctctttgctccatccatatgtaatttgaccagcaaatcaatgatatatttagtttgggataggtacattctatgtgaatctctatgaatcttaactcccaagaaatagtgaacttcacctagacttttaagttaaaattgtgtgttgagatcacgaacaagtttggaaatcagttgcttatttggacctatcaagtttggaaatgtttcctcatagtcaaggcctggtgtttgagagtagccctttgcaaccaacctggatttgaacctgtttagggaagcatcaacatttagtttaactcgatgcacccaattgttctatataatatgcatggcaggatgctgagggacaaggatccatgctcctgcagcttttaaggtttgagattcacttgtcatggatttaaaccatttgggatcttgtaatgcttctttgagagatcttggctcagatgggagaaatgattctgggagaggatatttagttgaataataagccttttgtttggtgatgctacttttagatcttgtaatcatagaatgtgtgctgacaattggttgtggaattcttgcagaagcagatgattgagcttgcactaaagggttatcattatttgaggatgaaggaggtaagttatgatatgtgtgaagattgttggtggggagaggattaatttttgataagtcaagttcagtgtttaggatagcagatgttgtaggtagaatttctggtgttatgtttaagatactaggttgagtgtttgagataacaggttcatttggtggtaagtctgttactatgtttggtatatctgatggaatagggacagtgttaggtgttggtgtagtctaagttgggttagttgcatgctcagtagaagtgtgcataggcaaagaagaaccatcaacattagatgcaaaataagtagaaaaggttgtagtaggaaaataacaggtattaggttcagattgtacctgtgttttcatgttatttgagtgaattctaggaaagaaggcttcattaaaaactacattcctagaaatgtagattcttccttgatcactttcacataggtagcctttgtgatatggagaatactccaagaacaagcactgttgggatatgaaatccaatttatgagagttgtaagctctcaagtggggaaagcaagaacaaccaaatagttttaggatagaatagtcaggggtagtaccaaagagacattcaagaggtgagatattgagcaaaacaggtgtaggcaacctgttgattgtaaaagaagcacacaaaaaggcatgccataagtactttagatctaaccttgcatgaactaacaaagtgtggccattttcggtaatgtgtttgtgctttctttcagatctaccattttgttcatgtgtacgtggacaaggatgagagaaaagtataccttgatcagccagaaaacttgcaaaaggcttgtattctccaccaccatcttcttgaacactttttattggcaaatcaaatttcttctcaaccatacttttgaatctgacaaacatgtcaaatgcttgggatttcagtgttaaagggtagagataagtaaacctgctatagtcatccataaacagaatatagtatttgtaaccatctcgagatggaacatgggaagggccctagagattagtatggatgagtttaagaggtttaatggccctataactagacacataaaagggtaatcgatggctttttccctgttgacaagcattgcagaatgctaaagtctttaaggagccagagtgtttgatatgaggaagtattttactaagtgtattttggttaggatggccaagtttgtaatgccaaatgctaatatcaccatggttatttcagtaataagcagtaggcactgaacaaaaataagaattttcatttattgatgaattattacaatcatgattatcatgaaaggtgttgtttacagatgaactagaagaattgcaaagatatctagtttgatgggctgtagaagtagctagatgacattgtagaggcttcttgaatttaccagtagcatcaccaaggagaaataggccatccttaagtttcccatttgccagtactgctctagttgccttgttcttaacaaaacaccaatttttgtgaaattccaagaagacatcactatcatgtgttagatgagaaacactaacaaggtttttagtcatagttggaacttttaagatagaattcatatgtaaaggacaagaatgtaaaagaagatggtatagtagtagacagttagtgtttcatgaccttgataaggaatagaggtttcaagattggaattgtcaaaagtaatgtaattggttgcaccagtatcaatataccaaaaatgacgatcaccaaaatcttgaacagtggttgaggagtaagatacatgaggttcaatctcaaaatcaattatcaatgagagtagtaactcgtggatcttatatatggtattatatttgcacacattactaatgtgggactctctaacttcgcccctcaagatggtgactattttttgctcaccaatctttgatcactcgaccacaagtagcactttgttaggttatatttagcctatgtttcgggtttgaaaagtgagcattttctcgtctattggtgtcttttggagcggttttacgcttgattttcattatttca

SEQ ID NO: 297404 - DNA, 2899 bp, Cannabis indica
tatatttatatacaaagctaggatactaaaatgaaaaactactaaatacaattaactctaattttgtacaactaatattgtaacagtaacctattattacaagtaaaaaaatataaccatcatagttacaataaaatataactattaaataatcactcgtatatatatttatatatacatatatatatatatatatttggataaaatcaaagatgcaaacaaggcctttaatctgttgttagatgagtatcaaccatgctacatgtctgtacatgatagtaaagaaataaaagaaaagataaagaataaatagtagtagattatcatcagttttattggcaggaagcagaagtaacttgtaaatttcatttgaatcttttgaaaaaagaatggttcaagtatagttattattgaagtgttttactacatcattattagtctttactcaattatgagggaagaagaagatacagcgacattgcagtggctataatgagttcataagggaaaaaaatgacaggtgacgtggggaacagtagcaacatttttataagttgtaactgatcatacagtggtagccttgagagaaaggaagtctgagatcttgttggtgtaaaaatctggttgtatggagttgttggggctctggagcattgacaaacttgtgacacctattaaatcaaaaaaagaaaaataaacaactttcataacaactttgctcatgtaacatacaagcacccaagatactagacaggaaattgcgtatgtcattgaaaaacacaaaaagacatttaattaccagaaaggacaagaagagttttgcaaccaccattttgtccgaacagaatatcagtatctagtctgtccccaaccatgcagatctgtgacttttggatcccaaatctgtcaatacatttataatccaatgaaataatgttagtcattaaatttaaaaattccttataagaaaatgtgctagtgaaatcttttaacacagcttcattaatttcattcgtaatttggaattgggaggtagtcattacatgtgtcctattatatatcttactcgttcttgagtacgcacacatgtatatcccaatttgatttcatgtctatgttgttattattctaaaatccaataaagctactattttgtttcatagtagctgattcagtagcgaaatttttcagttcatcttttatcctgttacactcgtgatgattattcttatgcagtcactactacaaataagaatgaacatgcttatcctctgggttttggaggtttgaaaattgaaattatgtagtcacaaagatgtctcaacatgaaggttacatacattatcatcccatgtatgacacactcaactttaagatacgtaacaatggctatttttttttctttttcttaatttctctgtccaacccctacaacatttggggagtaggaaactatatttgctatgtagatgcctagaagggactcaaacttgtgggagaaaaatatctaacggtttgaactaatcctccagggctaacatgaaccactcattggaaataagatttaaagcacttattgttagcagaaagaaaaaaagttagaaatatgtatttatagactttagaattactcgtttgccaggtagtccatcataaaagttgagggttttcccacaacaagtggctcacgttgagttgatccaccaagagcaccaaccatggaaccaccacctgaaatcaaatataaataattaggggccttcggaataaagcaagcaaacatcatagttcttgatgaaagctcaccgttcagcacacactcaaaaatagtaataaataaataaacaaaagctgaaaccagttgtatgaacattaaagaggaattattatgtatggttgcatttggcatgcaggatatgaaaagatgattgggaagggttgtgttgagtactatgcttccgttgatacagtgcttgatgctgatagacactgtggttagtaggagagggtataattgtcattgtattgagatggtagtgagtggagaataggatagcataaataggtgagtaataaaatagaatgggtaagcaaagtattgagtgaaatctctgcatcaatggagagttcttgctctccaccattgtaagagactttgtctcatgtttacaatatttcctatatttcaataatagctccccacaatctctactactcttctattgattgctactgtttcttgtttctagctactgtttggatattctgctacttgattgagtatttggcagcaggttcttatcaaatgttctccaccatagcactgatgttgccattatttgacggagaggatccatttggttgggtccatcgcatagaaaactatttacgtgttaattggatttttgagagagaagatactggttgctgaaaaatgtctagtggtgttgctcggctatggtttcagatggtagaggagcaacatccgatcaagcacgggttggagtttcgaataatgttgttcaactgttgcggtaaaaccaaggacgatccatttgatcggttgatggctcttcgatatacaaactcgatgatggagttttggacccaatttgatctgattgcaacacagttgccgagtattccgatgacattttttcgtgacttattctttgggaaattgaaggcagaaatcattgttaagatgtgtagaaaatagtgaatcgaattatatgtgtatttcatagaatagtacatatttatatacaaagctaggagactaggaaataggaaactaccaacaaaataggaaactactaaatacaagttaccctaattcttttacacctaatatacagctaatactctaacactccccctcaagctggagcatagatgt

SEQ ID NO: 297405 - DNA, 2718 bp, Cannabis indica
tatattgtgtaatttctactatttattttgataacaaaactttacttcttgttactttaaccgaacaaagtattgctaaatattcatgtggttaatattgtttggttatcatattgaataagggagactgagacatcactaagctctcagccctctttcactcggacacaacaagagatgtttttaaaggaggaaagcccaatggccaaggaagagataggtgggtctggatgaaagaaacgagtggtttatttacagcaaagtctgtctatttggcccaagctctagagagatcccctccatgtgttgttgctcctgctatgtggaacaaactttggaactcaaaaattatggagcgtcacaagtttctctaatggtgtatactttctgatgccatgcctatctgttccctccttgctcggaggattaggattgaggaggtctcttgcccgctttgtggtgagggcgaagagtctatggagcatctgttccttttttgtaattttgcgtaccatatttggaggtcttccccttggggagttattccagtttttgagtctggagcccaggtctgggactgggtatctttcctttggaacttgaagttaaaaggggtggatattgataagttgttcctctatgtgtcatttgtaatggatagaatttgaaaggcccgcaacgataaggtacatagtaacacctcagtagacattaaccactctattgattctatctctttttgttacacaaattatgcctcttgcttgtttgcctcgaagttggcagctatgtcgcctgtttggtcccctcctcctgaagaatggatcgagatcaattgtaatgtcaaggttggtagttgttccatgtgcgtggcgacgttggctagggatcacacatggacagttttgtgggctgcaactaaaagactcaacttcacagattcactgattggtgaagctgcagtctgtcagctggcggtggaatcagctgttgtgatgaagcacccttttgtcctgattgagagtgattcggagaaggttatcaatgctctgaaaggaactcgtgcgtgttagaatattgataattatatttccttgtgtaatcaactctctaattattttttaagctgtaatttttcgtttatttttataagttgtaatttgcagtccataatgtagttaggtgagtttctgctcagaatgtttcaagtatgatagataatgactgtgaagtctaatttatttatttatataattgttttatttaataacaaaaaaaaaatatccaagaaagttaacagttctattttacaaaatcacaagacaatttcatttttcctaaaagcaattgtactttagttttcatcaacttcttgaacaagttttaattattatattattttattttaataaaaaattatttgaaaagtattaagaagaccctataaacagaaatttatgtatgttggagccttgtaagagagaatatatagtgaagagacagtgaaagctcaaagctccactaaactttctctcttccactttcctcttgtcttatttattgaattgactataaatgaataaataagaaaaatctatttaggacaagatattgtatgagactacttccttgttcaacatgtttttttttcttcttaacagttcaacatgttaatacaacttaattgcttgctatttctaagatatatataaaaatggtcattggtgacaaatattaaaaatcgtgaaattaagaaagaaattatatgtatttttataataaaataagtacaaaaaattataatttctaaatttaataaattagtcttgtgacttgatgatataaataattttaaaagattatttagattttttttccttaataaaaaaaaattaattactttttagaaaagtttttacattttgtttgcttttaaaaactaaaaataagagatttatataaaatgttagttatagaattttttatataaaatatttttagataagatgattaattttaataaattatgtggatgtaaaaatttatactttaaattgtaataatataaatagacgttattattcatatgactaattatttcgataatgaaatatttaatgttttattgttttgtgataattaaaatgatagatatcgtatgaagttggttatgtgatcgtccaatctttataatcatatagtgccttacgcgatttttataatattgaaaagtaaaatttaattaatgatttcgtttttgtatttttattttaaatatttatattttaagtagttgttaatatttttactaaattagtaaatattataaattgtgatcatctactatttttcaatttcttttaaataaaaatagaataatcctttaattcttattctattatcttatttttttttatttgcttcatttaattattattagatattattgttaactagggaataaacatgtgcttctcaccgttttaataattttttaaaattatatattaaaaataatttattaattattaatgaaattttaacttaattatatatatatatatatatatatattttgtcataatatgtatataattcttctatatatatgtataatcataagggactatggtaggacctagcaaaagttccctaccggtacgggaacgttttttagtccgtatgtatttagtatcatgtggttagttattgatgtaa

SEQ ID NO: 297406 - DNA, 2157 bp, Cannabis indica
attttctttttcgtttttttttttaaggaataaggaaaattatttttaattaaaaaaaaatttaagaaaattactggatataatcacatataattaaattgttcaaaaggtatcggaggaactgccacttggtagttcattcagaaggtcatacctatgtgtgtcacaatgtaatcactcgtaaatgacacgtttttgaaggtgtaatcttattttcttcttcttccttcttttttttttgaaaacaggtgtaatcttattttcaatttgattactacgtataatctaggaaaaaaagtctcatcataaactaattactatccccttgcatgtttttttttttttggcgataataacttccttaaaagttagtttcacatttactagaaataaattgttatatataagatgaatgagctactcttaccattgtcaattaattttgagataaaatctcattcatcttatctgcaaattcttctaacatcgtatatagttaaaaaaatataataaagcgtttagttagaggtaataaaatagaatgaaaataattttatttcattcttctatttaattgtattttaaaatattaaaatattattttaatggaaagagttatttattattttggtaaattaattattttattgtaaaataaaataaaaagttattttaagtgatttttttttaatagttttttaatcatttttttttagaaaaatttacatttgaagtcttttttggctttctatatatttgttaataataatatttttagatactgcatttaatttaattaattttgttttgattcacgtgtttgcaggtgacgccatcttcagacttatacttctaatccacctccccacgtcttctagctgtcacgcttcaagttgtcacatttttcctgcttcttgttattgctccctattttgtagactaattcagcatattgtagagttagagggagcgagctgtttcaaagaggtttctagtgggtttcttattttacaagttcagaagttttagagtgagagttttttagagagagatttgaaattccaaatttctcattctatttagagtgataattttcaaagaggatttttcatttcaaatttattaaaaaaaatagtaaaagattaaaactcgttcttcgctttctccatctggttcctcgaagcttcttgctgacaaagagaagatgaagaaaacagtttctgaaaaagacttgaggaagtttcttacagttttgatggttctggtgatgtgtctgttaaggagtttaagaagaagcaacctattcgtgaaataagaaggttaatgacgatcgaccattgaaaaagttaaaacaagttgtggaatatgatgaagatttgtacaacagtgatgatctagaaattcaaaatagtgaattgatattgatgaaggtatgtgttattgtttggtttatttttaatttttatttttcagtatttcatttttgttcttctttaaaattattttgattatgtatacattataatttttcatcttcaaattttattatttttttctttatttttgttttttattttgttagtttatttttgattattttttttttaaattaaatgagatcttgattttgttaacattagggttgtttctataagatgtaaataattcatcatattttttggggaaatttacatgcaaacacgtgtttgtgtattaaatcccaataataatttagtttttctaattattaacatcactgctactttataccgtttttttaatttaatccatttctattgctttttgaacacatgctgaagagaaggatgatgtcagggacagttggatgggacgtgcgtcgagggcgcagagcgcgtgatcacaattttcaaattttctataatttttttaaggccttctatagtaaacttcctttgtaaacatattttgcaaaaccgccttagtccttataaaatatggtacccattgcatttactgttagacatttttatgtctaaactgaaacatatatgattaagtataaaatgcggaattaagtcaaacatatatacactataatttaaggatcgaaatacctccagccattgattcttgagcttcaaacccacataagctttgatctgcaaaggaaattga

SEQ ID NO: 297407 - DNA, 2431 bp, Cannabis indica
aggacacaaatgaactttcacaccctaaaaatccctatgtataaatatataatattttcttctaaccctaacacttcctcaatctctctatcgaatttatagtctctctggagattaataggtcaaacacatcatgaggatcactaccatcatctacctcagatctcttcaagcaaatcaaaaactgatttgctttgatttgtacaggtatacaattatatatacagatctcgttttttaagaaaatttcttgctgtgtatttcttagttggtatggttgaacagaaaatgagatttatatatttatatataggttttgatttgttttttttcaaataaatattcataagctttattaaacttcaatctctgctaccaaacatgatagcagttcagttgggatatttcccatactgaaagtacatccaggatataaacttgaagctcgagcaaaagcatgagccaccacgtttgctgaacatttaacaaaatgaaaagaaacatttcttagttctgtaagcaacaatttacactctttaataatcaaaccaaataaagaaaacatttcaaaagaattccgcaatgcttgcacaacgatcaaacaatctgtctccactacaacttggttccatctctggtttttaatccaacttaaagcttctctgaagttaatcgcttcagctatctcaggccgaaccacaccattatagctctttgtaactccttctaggaaaaagccatgatcatcccttgcaaccatcccaataccgtagccttgaccaactccgaatatagatgcatccacatttaccttaacataatttctttgaggcacgcaccagctctcaacaccatcaccagcaactaggccggtttgagatgactccaaattggagctttgagctgatttccattgttcaaggtaactcccagcaaatgcaacaataaaagaagctgtagacactttattttgccataccttgtcatttctagctccccatattacccaacaaatagtagcaattaggcattttttctccttgcttgaatttttaaaggcaataacacaccattctaggaaagacatcccggctgcaccaggtgtaacaacacctactttctcccagcaagcagcagcaagttcacattgcaccagagagtgcaaaatcgtttctgcacaggttccacacacagggcacaagctactaaccgccaccctcttagtaagtagcatagtcatagtgggaagacaacttgtacttcctcgccatattaaattcttcactttgggaggtatcttcaatctccataactcattccagaactcacttgcttcgattgtattccattggccactcgttttctggatcaagttgtaagcactcttcactgtgtatgtccccgaagtgtcttgagtccaatacatatgatccccacctgaagtgagttgaagaggaatggacttaattaaaacttgatctcttgtattgaaaaggtcagctagtatttcatcatcccattcaagtctatcattaaccattaaattaacctttgcattcgtaagagctggatgatgagaagtgacaatcggctcctcatcatttggtaaccaaggttcccccaacacatcaatactcgaaccatcaccaatatgccatcgaactccttttttgacaacagattgggcctcccaaatacttcgccagacgtaacttggattactgcccagcttggtcgaaaggtatgtaccatttttgaaatatctagctttaaaaattcgagaaacaagagtatttggttgattcaaaaatctccaaccttgctttcctaagagtgacaaattgtgatcccgcagactcctgaaacccaatccacccacactcttgtgcttactcaatttgtcccaagacatccaatgaatacctttatccttagaattagatgtcttccaccaaaatctcgccatatgttgctccatgtcccaactaatatccaatggaagaaggaaaacactcatggcatagcttggtaaagcttgggccacagtctttatcagaatctccttccctgcttttgaaaggaactttgtatcccaattgtgaactcttttcctcaccctctcctttaaataccccaagactgcatttttgtttcttcccatggtgcttggaagaccaagatatgtgctattagcatcagccattgtcatttgaagaaggctaccaatctgagtcctcacatgatgatcaatgttaacattatagaaaatagaggatttccttagattgacctgttgacctgaagcattttcgaaaatacgaagcatttgttgcacataggaagcctcgttcattgtttctttgcaatacatataaccaatgtttaaaaaggcgtttttgaggcgcgccttgaggcgcgcctcaagctgagg

SEQ ID NO: 297408 - DNA, 3360 bp, Cannabis indica
ggggcggaactagaattaaatagtatggggaggcaatattaggtggcatatacaacaattttaaatttcggtgattaatattcacttttgagagtgcgtatcaattggagaaaatattaatagtttttaattttataaatattttagaaaatataaatcaaataattaagcaaaaaataaaatgtgagtggtgtaagggactcgatttaatattatcaagattaatatttactttaattttttattgaaaaaaaagaatagtgtaaaacaaatattaatttaatatttaagaatggtgtaattcaataatatagtaatttaacatttacttgcaatttttcagagacaataaaaaagggtggtgtaatataaatattaatttaatataaataagtataataaaattataatacaattataatattactattttattataattgtgagacctaccttttaatatatatatatatatatataatactgtatatgtgttgaatatgtaaattccaactctttatcattttctttttttcacatgttgtatacaactcgtattcattgtatatatgttatatatctattctatataaattgtggctatataacagaattcttggtttatgaaaaattattgggtgacttttttttaaataaaaaaaaataacaaattattaaatgttgacagggtcagcatccatgtaataaagggttgcaatttataataaacttgttcgtattgtttatttttttattaaaaattattttcaaattttgatatttagaattagttaaattttaaatattattttaaattaaatttgaatattttgatggtttaactagatgagcattttcattaattgtcaatataaatttaggacgaataataattttttaaaattattattataaagtataataataatttttgtttttatttaaatcactattatgcttttaaattttaatgattatcactacattgaatattattcattttaaaattatgatattaaaaaaaactaaaataaaaattaacatacgtgacttggcacgtaacatctatctaatatataacataactaagttctaaaatttaggggggccacgacccctgtaagggtacatgtggctctgtccctacttacgtgttatgtctttcgtatttgtagtactatgttgtacttaagcatatatttttttaccgtgtcaatttgtagtatggtctcgtattatgtctaaactcatattttttcgtgccgagttaaaaattctaaccccgtattttcagcactacttgcatacacactctaaactcgtcttcagaactgattcataaggagtcattaggatgatagttatgaagtaagaatatctacggcaaaaaaaaaaacaaattcttatgctatctaaagtagaaaatataaagtaggagagtaaattcttatgctaactaaagtagaaaatataaaggagtaaatttttgtttatcaccataaccattagattatgggagccataacacatcaaaagtatattacactgattaaagtacgtcaaacgaaattcagtacgaatgtatttcctttttgtagaaacaggagataaattttattccctagagatcgagaaaagaataggaccactttttcaaaatgaggtagcacaaatctacatgtatgtcattctaaatggaaaaatgaaccgttggggcccccatgcataatactttgctttcccttttgagagacctgagttcagtgatgcaattggcaactctatatttggttctttacctacaaagagaaagattgcttaatacatattcaaacatcctttaaagattaaatctccaaacaaaatgtctcaacagaacctgaatttggtgaaccatacatataaaactactaagctctctaagttggaaaattcatctcccccattaaaagaaactaaattatctatcacatcgcacctaaaaagatttccctctacctctatgaataatattagttaaatgcatacataatcaattcatagaaagctctctgctctcaattcggtctctattacgatacaacatttttggtctcaagcctttgaagtgcacgaaacaacatgggacttgaacttctcaagctcagccaaaacttcctcttcaggcctgtagaggagatcactcattcgccatatctgtgaatgacaaagcaaaggcattaaaatttttaaaacactatcaaaaactgcagtgtttgtttaccatgtgcatatttatttttattttataagttttatttaatacttgacaacacagaattacaaggtaacaaacatgtcagtacctgcaatgttcctcctccaccggtggtatcacagtcatcagacacactaacaatagtccatggatcagatgcattccagtgaaaatcaacaattttgtccctgaatcaaatcaaaggaaattatacagttgagaccatatatatcttaagaaaagaaagtgactaataaaattcaaaacacaggttgacaagaattgaagaaagagcaaacctgtgccctgcatgctggaaaaacaaccccggaggagaagctggattctttggcgttcgctcaaccttcttcccaacctgcaataattgtcatttacagtacagaggtaagagttagtagcgagtccgtgatcaattgcatagacaggaatctatgtgttcctttaggaacatatactttagaaagcttgcatagtaagaaaattgatgcgataattataataactgtaatttacttcgattaaaaactcaaacgttaaattccaacttgacaaattgttgtaattcactatatcattaaattgaaaactgtatagcctgagatctcttaaccaaataacagtcattttccataatatttgacaatttgtatattatcaatattttaaaatatggaataccatttgattaaatataccatattacttatctattacttgatcaattgatgtaaaattaacactatgcggtggaaattgttaaaaaaaatataattcatatggcacaaatgttttcctcctccataaggttaaatgagtgtggaccagaatgacataaggaaaatagttatttgatcctgtgattgaaaaataaaataaacttatatatatattttatttaagcgtttatatattacaatcatgttttacctgggactcgaacccagaacctccaagacacacacacccactatggccacttatagtggccacttgagctagcctcaagtgataaacttatatatataaatattcatacaacacactccaattagaacagacaagaaaaaaaaaagaaaaattaa

SEQ ID NO: 297409 - DNA, 5002 bp, Cannabis indica
acaacttttatttttaattttaaaataaaaataaaatgtgttctgtaaattttgtttattttcatttgttgattttattaagttggggttagggttcaagtctgggtcgggatctgggtccgggttccaatgtctagttcggtacagaattaggttacacccgaactcattcaactaaaactgaaatctatttttttttttttttttgagttttgagctgggtgagtttgtcgggtgaatagttctcgcgtgtaaatgtgcactcctattgtaaagtaacaaaaaaacaaaaaataaaacataacaaaatagaacaatactattccaaaactcaccaaacataggtagaaaggagcattacaacctttcaaaaagcaatggttttccaaactcaactttccataaggttcaaaatggtaaaagagacaatacaataaacatacctctaaaaaaatgggtgcatatcttaattagaagagataccattactttttgtacactaacaatgaaaataactcctgagattgtatgaatcaatgctgaaactaaaatatgttattgatatgggagtttgtacaataacagaagattcttataataagttaaattatgtgaatgtaatatttcagtgcatatttataattaatttaaagctaattagaatatctatcaaatcaaatcctccctcaattttaacatgtactaaactttgttatttatcaaattaaactctcaaattttaacatgtaccaaatcgtgcttcttaaattttcatcatgttagattttcgttagtaaaattaaacaaaattatttaaatcaacaatctcaatagtttaaagggaatttttaagctactgaaaggtttaaagaacatggtttgatacgtgttaaagttcgaaggaaaaaaattctaattaaccttaatttaattaaagaagaattttaaaaatattttttttatgttttatttacaattttacggcctaaattttctattaaaaaaatatacttgtaaaattataaaattataaatatacactttgctaaaaaaaaagtaagaaaacaaataaacgacaaatcaacttcataacaactataaataaactataaaacaacaaaaaaaaaataaccaaaaaaataagctcatgacaactactatacaaatttgattggtgtagatacttgagagttggtaatttctatggtcagcaagaagcaggcctgatccttggttaaggcaggctaagcctgtgcttagggcctactcaaactcagggtccaaaatttttatatagtacattttttattgaaaaaatagtatttttgaagaaaaaaaatgtgaaaaaaagactcaataatattcatattttactttaaataaaacacaccttcaataaattttttagactcattattactcgccctggcaagaaagagattctatcaaatgtgtttgagaaagttgacactttacttgtgccataacttcttatatagacaaaaacaaggttaactttactagtccttattaatttaatgtatcaaatgttatcgactttgaagtcttattgttcttgaaaatctaattagagttcttcaaatacattcatagcaatttctcattttttgtggtaattggatagttgcaagcagaacgaacaaacagagcgtgctttgaaagaaacaatttgttacctcgctatattattaagataaatactcaaagtttatatccgaagcgagttttcaaaaaactactcgcgtttaagcaaaacccacgttataaaaacgagacttatcagaatcgaacattcaaattattggggtcatgaagaatataaatttcaagttttatgttgaaatgccataatggttcaatttgaaggctgcattgactggtaaaactataatctttatcttttaaacccttatatatacacacatacattgtactattggtactaatagtaatacattaaggaccaattatataatttggggtgtgaaattatttaagcttctctattagtattggcttggttgaaggaattctttctagctgtggccagaacagtcttgtcagcaactatgaaatatgcagctccagccactgtcattagattgattaaacttttcattaacaaaaacccaacattttatcttaataactaaagaaaagagtatagtaagtaagtaagtaacctgtggagataataagagcttgagctgtgtggttgagatgggcttttgcccaaggcagaaatctcacactagcaagctgtgagtaaacaatatatatatatactatttttcagaaaattttgaataatttagtataccaaaatcagtattctaataatcttttgtacctgcgtaataactacacgtgcaataaactgtttgaatcttgatttcgatatcgaaaattatctagaattttttgaaaatttgggtgaaggagagggagggacttacagttggaatagcagtggcaatagtagccacaagagctgccttagctcctgctttgacaccttctgtttttgtgtgaaaaaggtaaaatgttattgcatttttttattggtccaagactatgtttattgaggctatcaatcatttttaataagggtgtctctcgatcagtttggtcggtttagattatattattatctaacttaaaaaaaaatttaagtgcaactcgtctaattaagaaaaaaaattcaacctatctaataaattagtcggtttagtcgggttaacacatccaaaccgagcactaatatttatttcttttttaaaattcaattgttatattttaattaattgtgattttaaaataaatatataaattgaattcaaagttcaaatcaaccaccatcagtagtttgaaatttctatttttttataaatgtatataaattatattatatataataaaaatatatatataaactttcttaattgggttcgtcgagttagctcggattaattaggtaagttggtattatttttaacacactcaatacaaagattagtcaagttgttatatttttgtcggtcggatttttcagtttatatttttcgttgagttatctcgatttgttttaaacgaattgttcggattagacagtttacaaaaatttatgcataatcctaatttttaatccagttgctatttgtgattatatgcacaattattacatactaaacatatacaaaaaaaaaaaacttttatagggattttctcatctttggttcatcaaacaaaacaaccaaaatcttaagagcattttgcattgaaagattaaaagcaacagaaagaagaacataccatcagaacatcgtttagccatggccaatctttggtcctgtgaagattgagctacattctttgccattaatttgtattataaaagatacaactagtgaagttgttgaatttaattgagatatttataagcatatttgaatgaaaataaaaatgagaaatagttggtgaatcagagacatatgttgaggttgttttgatgagagtttgatggttttgctttgaattctaaggtctgtggtaggcacttgttttcattaagacacatgttaatcataatcagttgccatttgtttttcttttttcagattttattccttaattgcccttggtttcacaagacttgtcttagttttgttgagggcctcaaggtaattttgatatatgagcaacttatcttgagataacttattcttttttgattataaaagatttttttcttctcaaattttgattatgtagatgtgaagctcaatccactggttttaagacaaaagtggccaaaacaatcatgggtcttgcatatgtggaatgtaatcttttctccaatgtaactaagacaaatgtttgtacaagtattaaaaaagtggttttatatttaatgcaatgaaataaatattattgaaaaaattctaaattgtaccccgctaaaaggatgtatcggtgtatttctatatgttttggtatctgaaataattttttagttaattttttttcatagtcatatacgttatagttatattagatatcttgcaaattttaaaaaattcaaaaaattttaacacgtcgaaaacgtggttcaaacattgtgttacacacgtgattattttattttatacgtgtgtgatatagactgtttgaacactactctttatattgtaaattattctgaatttctcaaaattttgtaacatatcttaaataactataacgtatacgaatataaagaaaaaagtttgagataaaaattcttatggatgtcaaaacaggtagaaggtgtattagtgcactccttttaaggagatgcattgtagaaacacccaatattattttagcctaatatgagattgagttattttacaatggacccctctaaagtgggtgcatctatgcaccttatatctgtttttaaaagtcaggataattttttagtttatgtttttttatagtcatgtacattatagttatttaagacatctttcaaaatttaaaataatttacaacataaaaataaaagttcaaagagtctactccacacgagtataaaataaaaaaatcatgcatgcagtagactgcttgaattctgttttttgcgtgttaaatttttttagaattcttcaaacttttgcaggatgtcttaaataactacaacatatacgaccataaaaaaaattagactaaattttttctcgaatactaaaatagataaagatacatggtacacttttttttaaaggatgcattgtagaatattcctatgaaatttattatggagtgattttcaataacatattgtgtaacatgtgtgtattggagttctttgcctatctcctttaacatttggctacagtggcggaaccagacgacgaaataaggaggggccaaataaaatatattttcacttaattttttttagtatgtaatatttaataaatcaatataaaaagttaat

SEQ ID NO: 297410 - DNA, 7443 bp, Cannabis indica
taaagagtagaagaatgagttacattctgaaaactctgaggaagaagaatgaggtagactccataattagagacaccttagaaaaggtccttgtcctccgcttcggccgaccatccgattctgcttgcctccatctcgacgacgtcgtatgtctctctactttctcttttatttatttattttatttgatttgattgttacttaattcttgttctattctcaacacagctctgtaaatcggcgcgggaggtttctaagtttgcaactgtggctttggtagatattgattctgaagatgttcaagtttatgtcaactattttgacattactttcataccttcaactatttttttcttcaatgctcatcacatgaagatggattccgggtatttttaataatttcttattatttttaaacatttcatcaatcaatcaagtaggatgcttagcttttgaacccccctttcaaacttgaattttggagttgaaatatgaattagatagcaatatcatccactattgtttagtatatttgaataggatgatcatgccctttgaattttctagctgttaaaaatttttcggtgattgtctgtgcaataaatgatgacactctcgaactttgacatttaccaaattatgtctcttaaattttcatccatgtcagacttctctaagtaaaattagacaaaagttcttaagcaaatagtctctatagtttagggagaattttttttctgtcgaaaccattttcttaaactaatagtcttatgttaatgcagtaccgctgaccatactaaatgggtgggagcatttcaccaaaagcaagatttcattgatgtagtagaggtacctatttctttgtaaccatttgtgattcattaattgttcttgagttgtatgaatctgtactatagctttctttcctttgattttttaaactatctgatgtatgtctttatgagctttgatttgaatatctgcttatctttttggtaggctatatatagaggagccatgaaagggaagcttattgtgcattgtcccttgccaccagaacgaattccgaaatatcagttattatacaaagatgtatagaagaaggtgagttcattacaaaagccttcatatgtgcacagattgtcaatatgaaactgtttggaactttcttcatgcaaagtcaaaacgttttttaatcgacgggcaatttggattcagtagaatgttttctccagaccatgtaaaattgcatattggcctaaattacgtttcttctgtgtatgagattgagatgatgtattgaagaccttgggatgtccttgcctgtagatagttagagaatctgaggtccaattgaaaatggttagacaaactccaaactacaatactacatacagaacaataaaagtttagaatttttctttggtgagtgagggcatgtgttttgcccctatccataatttttcttcatgcgatggtacttagtatcatttttttatctgattattaggtactccaatctgctgtgtaggattaagaattggactttgtttatatttttcgtttgttgaatcttttttctgattttgttgtgtctactctttttgtcaacttgttagagcatttaataatgaaaattaatgcataacatagtgagttataattgtaggtgacaatcatgtaagaaagacagtgatttcaattgtttgggttgggttatttattttattgctgtgagtggttggtgaattcaaatctgattgagtgtggtgtaattgtgtttgcacaacgataaacaatcaaagaatattgtaaaatgtatttctaattattaaagatgaaatcacatgggagtttcaatggtctaaataaaatgaatacaacttaaaaaaattaccaaacaactaaatagatagaagttgatgacttaacttgttgtcttcaatcttgtccacatgattagttgaatggtcaataatcttgcacttgattttcttttgcagtgattggggaaaaactcttagaggagtgctaccgtcaacttcttattataattaggagtgttaccgtcaacttcttattataatttttttatcaatctctgtgtttgaaaatatatattggagtttatttttttttcaaaaagataattatgattgtgtttgttatagttataataccatttctataaattttaaaaaaaattcaatagtttataatgctgaaaataaattgaatttttttgaacacgtggtaaagtagaatatgaggaactctgtttttcggtactgtaaactataatgatattgtaactataatgaataccactatgaaaaaaatgatgtgtagttgtcatattatcaccccatgtacaatttattagtcgtaatcgtttgaaggtggaagattttaaataattaaaaattatattatctcaacgattacataatattaccttatttagaagtgcacatgatatggtccaattttagatactctaggtataaacgagttaggtctgtgcctagagcctatctagccaagaaccctaaaaaaatttcccttttaaaatacatatttttttgaattaattacgtaaggtaccattttttgtaaaatatttacatttttatgttgaaagaatgtttttttttacattttgacggttttctaaaaaataacacgaaaacaacataagattaacaagaaaactacataaaagtaataacaaaaaattaacaagattacaacgtaaaaatgtttaaaattctatgaaactgtatttttgtaatttttttttgttgtttttatgtttttgtgaaataattcttatttttttactttttaaaaaatattacatttttcatatataagggttcaaaaataattttttcctatggcccttaaatttcaaagcaggccctaattctagtgcttttggtgacactttttcatgaggtgccccaactattgtttgttgtggtggtgatggttccttggtgggtttggtttggtagaaattttgtgttgtttggcgaggttcagttgagattggaggtggtcttggagttggctcaacatgctcttggtgagtttagggagcttcgggagggtggttcggtggtctccaccactagcggggtgtttctgtttgtccactaatgcttcggtggttctggataagggtttgtggagttaggcagtggcatgatggggagggggtggtgtgggcttgttgggcttaggggtggtgggggacatccatgtgagtgtggatgagttacttgtgattaaacatgaccttctcttttctatgagatttggtttctctatttcgagtattgaatgtgcctctatgatagttgtggattgggtgaattatcctcattctaatgttgtttttcattctattattttagatgtgatttctttgataataattgttggcggtgcttgtgaatggtgttgcctacgcagtgactacttttattaagaataatgataaagagtgtgtttgaacagatattttgtgacagttagtagtttcatgatccgtaatttaaaaattgaggcttgaatccaatgaaaatttgaaacaagagtattatatgcttgttcataatttttaaattttcctcaaacagttagattttttttaatgaaatgtgataaccatttttttatttaaaaaagtgcacacaatatgtgccgcaagatagggaagaaaataaaaaaaaattcaagaagtgtggtaaatatttctaatagaataaaactcaagaattgtggttaataattttaagaaatgagagttgattttcagaataaaataaattgtttctcattaaatatacccacctaaatttgtaaggattattaaattttcttcttcataaaataaattttcttaaaaaaaaagtttattttaggacctaaaaagctcaaatttctcaaaagaaaaaaaaagctcaaaattatctccaatggcggacatggaagcatagcagagctatagcttagtattatttctcagctaatctttctcaagatgaaaactttttccccttctttcacaacaaacactcatcttcgactattattgcctccaatttgtagattcaattcctcgtggccaacacaaagttcgattactcttctccgatctagcttctgcaattctatatctctgagctcgaatttcaagccctaccgcttgttggtgctctctgctccgagttcctctcaatcgacatcggagggttcgagtgaagagcttgatggagttaagaacgaaggagctgaaattgaatggcgtgcggaagtgggaaaccctagactttcgattccatcgatggggaaactgagcttgagtgatcaggctttctttcttcttgttttcattgcttgcacggtaattctctctctctctctctcgtttgaataatttgatataaatttttatgtgattttgagaaggaaatttgggttaatatgattcaatggtttgaatttagagacagaatgtgaaattcaataatctgagactcaaaactcaaacttagtttctgggttttgataaagcttgtttctttaaactttgtgcagacttctatggcatttataagccttgtagctgcagctgttccaactctgtatgtaagtttccttctcttttggatcctagtttgtgattgaatagagctttttgttatcaaaattgtatctgaaatttgtcatgggatttttgaaaatgaagaaattaaaggggaattgtgtaaaaatgtgtgtgtttcttctgttctgctttgtttttggcaagaaagaaacaggaagttttattgaaaaaataagtaatggaaccaaacaaaactctaacgagttacctattccaaaaaagaaacaattaacaaagatagccaccatcttacctaatcattgctattaggcaccagtaatgcatagcactttctagaggtttcgcgttgtgattgattagtgctattccctaaaagttattatattaaattatatgaattcgctatttaattacaccaataataatatgacaacaaagaggctgctaggcaccatacacttctgcatttgtagcaacctcaaaacaaacaaagtacattctgttgttctgcaatgatctcggaacttgggatatttatatgatgagtggcacatttaagtctcaatatttatgtaaagtatattggtacactgatttctcactcattgtttgatgagatttctgatataaacaaggcattctgttcttagatatgagttattgatgtgtggcaaaatgtgttcattctttgaaaagaaggaaaaaaatgaaaactttagtattatattctcagttattgatgaaactgatcactcatgtttgttccataggcgatggggcgagctgcaacagctctttcaaagctagcagatacagctcgtgaggaactccctagcacaatggcagcggttaggctctcgggcatggaaatcagtgatcttacattggaattaagtgatcttaggtaataatttaatctgatgttttaactgcttccctatgttactatacctaagctattgttagacttgaaacaaaatcactggctggctcatttgggcaattgtaataggacgagtcaatcaattaacatatcgtgtaatttgtattttgttctgaaaccagtcaagaaatatctgatggagtcactaagtctactcaagcagtacaagcagcagaagctggaattcgacagattggggtgcttgctcggcaacagactatgtgtatgtttaaatccaaatacttgttcttttgttttgtgactaattactatggatgatttccaagctatttgttcatttgatgcagcgatgattcaagaaagagcgagcctgcctataatatctttacaaccagtggttgttggtgctgctaagaagacttctcgtgttgttggccgagctacaaaatccttaatgaatatgatctcgggagggaataactccgaggctcaagaagaagaagaagaagatgacagccgagttgctactacagattcataggacctttttgtggtcttttcgaaaactattagagctgaagattcttagaaactcatcttcatatccaactttgatttctgtttattatttaaaagtttaagttggagatgaaggcaattcatggtgtttgaatcataaattatgctctttgtagttgtacatatacatcataatgtaaagactagtaagttatcaaatgttgaaatttgttatatgactaataatatccaaaaaaaacccaaataaagttcatcaattatattaaaatatcaatattgtttcttctttctctaatctgtataatgaatagtaaagattgggtcttgtttgagtctcttatttgagtttatccataaattgtgctaatttattagcatgatgatcagcagtatttgatagatggtgggtacgaaaatcttcatagcaaaagggtttatagagagggagtggaggattggaaccatggattaatgtcgtttctggcttaataatagtgtcgtttgaaggattaataaacaatgatattgtcgttctatcaacccttgaatttatcactctatgctctgctccttttagctttccattgctaatcacctatacaaatatacacaacaaattttactctcaactcaaacaaataataattaaatatttgattaataataacaataataataatatatttatagagatggataaaaaagagaaggatatttatatgtacctgtaaaatatagccaatattgatgacaaatgcatgagaaataggctcaacataaacccaatttccatgatgattaggaagttgaagacctagaacatttccttgaagaagaatagtgataagacttgggtcacaatgcttaggtaagcccaatgtcaaacttggatctgggcaagctgggtaatgattgctcaataatattggactctcaataagctcaccactaaaatatccactcttcaatcccaacccttcacttaacacctccaatatcttcaaacctaacttcctcacttcaactgaaaatttcccaacaatttccctataaaaacaataaagtattacccttttattagatgaaaatttcaactttccctaacaggagtcatagatatatatacatatatatatatatttatatatatgcatcatgatggaccttaggctaagacaagttagttgtgcctaacccaaaaaaaaattctttttgaaaaacatataatttttgctaatttttaaaaataccacatgtttttttaagcaggcccattaaagaaaattcttatggcccatcaaagaaagtatacccttttattaaaggggtaagatgaaaaatacctcttttattaatcaattaa

SEQ ID NO: 297411 - DNA, 3276 bp, Cannabis indica
atatataacttgctagtaaatatatatagcgctcccaatgttgggtggaaagaagctctgcttatcctccacctcaacatgagtgacgtgtattagcggagtacattactttgctacgcatattccgaatgggacagattaatattgttcttctttattacatatcatattacgtacactcgcttaatttccccaccacttctctctcaagatagctttttagattaactttcatcaaacatatatacatgttaaatgagctaattaatgaagtcatcatatatatatataaatgttcgttgtttaaacaatagtgacaattgatggatccaagttttaataatttttgcagctagctcagcatttgagttcctttcttttctaatttataagtcgttggatattgtagaataatgaagtgtgaattgagtaataatgtgctctattataaggagtgattttgttaagaccttgtcttggacttattattgtcctcaattaagttcctttctcctacgtccctgttagcttgataaagatattattcttacacgtgaaaaaggaggtgaagatatatactcgaccacaaaaacaaggatatatattctagaacaaaatttaaaccaaacaaagcagatgaagggaaagaaaaaaggctaagttacgagccaacaagtttctttacgaggagacaactcgaaactaacctaacctaagctagcttactacaaaaatgtaaaacaagcaattaaggaacataatgatatataggacatatatagcttgttttaacaatggtctttagccctgtcacaatgtaggaatttagttattagctaggaccctcctattaagggaacataaactaccgttgtttgttattttctgttagcttagttagttttattgtaactttcagttagttttatttcctgcgtgtgcttattgtactgtatataaggacggacacaggtgtttaatgtgggggctatagccctcactaacaaaaatattgcctttaaaaaaattaaatgtaattttttaaatttgataattatagatcaaaattatagaaaagcccctataaaattaaataaatattgtaaaaatgattataatataggtataaatatttttgaatgataaataagcccccacgaagtaaaaattctgcgtccgtcactgactgtatataagaagttttgtcttctccattgatcaatcaatgaaacagttcctctttcttgcttacctgcttcgttcttatttttctttgagagttcacatggtatcatagctttaattgctcttctacggagcattcttcagttgtcaacaattgtggatcgtcgactcccccaagtttgtctcaacaaattaatttaccaaaaactaatcttgtttctttctctcactctctttctgttcgcctggatgagttcaactatctgccatagaaacaccacgtcctagcagcagtcaaaggtagtcgcgtgcaatgatttcttgaaccaaatcgtgctccaccttagtttctcacaataaagatcgagctgcaaacagagttagtcctgagttcgaagactgggaacaacaagataatattcttgtatcttggctcctctcgtcaatgtatgaaaaaatactcacaaagatggctggatttgactctgcagctcatatctggctcaaccttcgtgaatactacacatatcttaatcgagccaagattggacaatacaaaattctactttgcaatacaaaaatgcaggcatttcttaaagactatctactcaaaataaagagcataattgatactctgacatcgattggtcaccctacatttgcacaagatcacattgacgccatcttcaatggtcttccagcatattacaatgtgttcatttcattagttaacacaagaactgaagcttatagtgttcctaagattgaggccctattaatggcccaagaagttcaactggacaaggcggctaaagatcttgatgttgccaagactgaagctaatcttgctcacaccaaatctcaagctggtcgtggctcctcttccttctcaccaaatcctactggttttggatctggacaatttaacagaggtcctaccccaggcttttctatgaacaatgctcctaatcctgggtattttcctcctggttaaagagctggtgccaattcctctcatgggcagtttggaaacttcagaggtggattgtctcgagaacatggtatctccaccatttgggggacaaaaatcacagtgcaagctttgtcacaagcttggacacacggtttatcaatgcttctacaagttcgataagacagtcactggaccagagtcatttcagactgctcaaggcaacaacagtgctaatatagttgaagttcaagcctattctgcctcccgtgaagtggttaatgatctagattgacaccctgattcaggtgccacaaatcacctcacacccaatgagttgaatctcagcaccagcaacaattacctcggtgaacaagtgcacatgggcaatagaacaagtttacaaattcaaaacattggtcaatcttactttacttcaccttttcactctcaaaatcttgttttaaacaacttattacatgtgccatcaattactaaaaatctactcagtacttctcaattctctcaaaataatggtgttttctttgaattttacccctttcattgtgttatcaaggatcaggtctcttttaggactttgcttgttaggaaacttaagaaaggcctgtagaagtttgactccaatcagctcaacattctcacctctcacacctgtcaaccattcagttccaagtctccaacagcagacacagaatgtaattcaagcagtcttactgatgtaaacatttctttctctttatggcacaaaagacttggccatccccatcatagaattattgttcaacatgtattaactacttgtaatattaaaaccagcaataaaaacaataatttttctcaactgtgttctgtttgttgtcttggaaaacaccataagctttcctttcccacatccaccactatctacactgaaccattacaacttttacaatcagatttatggggtcttgccccatcaattttgcttctgaatataaatattatatctttttttagatggtttctataggcacacatggatttacatgttaattaagaacaaaaaatgaggcactcaacacttttattacattcaaaacacaagttgagcttcaacttgg

SEQ ID NO: 297412 - DNA, 1485 bp, Cannabis indica
gaaaaagaaagtacgattcacagaagaaatagtaaggaccacacaaagtttatttacaacattaaaagtagtgtcaaaattcacataaccatcactccattccaagatataatacttatttcaataaatatttgagcttttgcacgcattaacatacaaaagactttttaaaatttcttccacatatttggaaatggtatttacagaactgaacatttctcacaatagacagtgacattacatatctgacaattcatcaatgcgcagagaaaggaacataggttacagaagcatgaccctactctagctcaaaactcttgcttccattacacttatatttgttttctatgaactatcaacgataggccatacttgaaacaatggacactaaattgttctaatagccaatgcaaggataaggtttcccaaaattagaaaataaaatatgaagcgtatcacaattcataataacaagataataagattacagttgttcctattaaaaacaatcatatgcccaaaagaacactgtactaagagccaatcaatccatacctcacagagaaggcaaccaattgtcgggtaccttgaaatattttcacgtgcccattaactcgtacatacatgccattcctgaacaaacgaagataaagaaacaaacagatcagaagttttccataattaagtatcagcatgtattattcagaaaagtggttgaaacttactcaattccttccatttcctttgcatcaaagttctcattcaccctgataatacaaacacatactaattaattaaactatttataaacaatatagattgtagatggaacattaaatctagccgttcaaatagtgtaagtattaattattatgtctcgtcttttacaacataaatctgtgtaaatggtttgctttacatattggaatttggaagcatttgtttagttcatgaaatcgggcttgcacagattagatcccttatcaattttttaacgatccttattgtacaaattgagtttgaatattaaaagagataaaaagaaacaaagaaagaaagtaccatcttctgcatttgattcgtcctgttccatcgtctagaaaaagactgacatcggtatttctttcagttttgtcagagaccattccaactagagtaacctaaagcattagatcatgtcaaaatttccataaaatgatggattacaaaaccaaaagcatttgaaaacagcaaaggataggttgtacattcgcagcttcaacaccattgatcacaaaattcgatttttcatcaccagaatgatgagcctcactaatctgcttcacagtcactggaatcaacccgtgactatcacgactctgtaacagcaacggaaagaggaatataaaatcaagctgtgaagagatcatacaaaaatcaacccaaaaaaaaaaaaacacactatatatcaaccttgaagttgaacaacttagaaaagaaaaaaaa

SEQ ID NO: 297413 - DNA, 3200 bp, Cannabis indica
ggtctgggtccgagtccaggtccgagttcgggtccgggtctgggtccgagtccaggaccccagtcagggtccaggtcccagattagggttcggatccaagtcccgagtcaaggtccgagtctgggtcccgagttcgagccccgggtcccggtttgggtctaggtccgggtccaggtcttaagggatccgagtctggggttcaagtcttgaattaatttttttcaaataaattaaaatcgagtcggatcagatccgatccatagaaaaattaggcggggaagagccgaactgatctaagatccaataagtatccgagtatttcggatcagaggtgatccgtcatatcggagctccaacccactccaactaaatggatctttttgacatgcccaggtatatatttctttgaaacctaccgtttagtagttaaaccttgcactatcaggataattttcactttatggataggacattcaagtggttgatatcaataatgcatttttgaatggtgatcttaaagaagatgtttacatgtatcaaccctaagcattcattgatccaaaacatccaaatcatgtttgcaaactcaaaaagcctatctatggcttaagacaggcccttagagcttggtttgacaagctcaaaacctgtctgaactattggagtttcagaccaacaaatcagacacgtctattttttacaagaaagaatggtaagtttctttttctcctagtctatgtcactactaaaaaccctaaaattcccaatggtctatataactatcacctatatgagtgtcgcgaatactaggtagaataggcgatagtagaaaaatattggtataaaagaattcccgtcagtttaaaactatcgggtatagttaagactatatgccacaatttaaaactatcgcctatactataggtgataattttaaactgtggtctatagtataaccaactgtttcaaaccattgctatagcggatttcctcaaaaaaatcatcacattcatcctccttgaaacaaatatgggatcgagttttgttttgccttaagattcccgaatagtaaagatttttgacgatctatgaaatacaaaaatctcaaaaatatataaatcccaaaataaaaaaaaataataaagaagttacgagaaagagtggataagagagagaagattgaccggtgctcgtggtggctcgtctatattcggacaagagagagagagagagagagagagagagacgagtgacggtggttctcatggtggagctcgtggccatggccgaccatggtggagcttgaacatgcttttgtctatggtggagctcaagaaagagaaagcgagaaagagagtgggagagacgagagatgagtgatgaagctcatggaattgccatctatgagaaagagagagggggaactctaaagagagactgaaattttgaaaatgtattgatttgaaaaattttagatctaaaatgccttatattggagtgagggaaaacacattattttaaaaattttagatttgaactaattgctgacggttaaaaactatagcctatagtataggccatgatttttaaccatcggtaattctcctttaaaaatattcgaaatttttaaggtttgcttaaaaattatcgggaataacactgtaggcgaccgtttaaaaccctcgcctacagtataggccacagcttttaactgttggcaattcgtctttaaaaaaaaattgcaatttttaagacacgcttaaaaatcgtgaagaaatcatcacaagtgttgaaaactatcgggaataactaatttttcccgacaattttaaacactcaagtgacggtcccccaaaaaagttatttttaggaccgtcaggaataataatttttgtaatagtgtgtagatgatatactcatcataggggaaaatatgactgaaattcaacaagtaattaccaccttgcatgaccagtttactctcaaagtgctaggatttgtcatgagttgcttcctaggctttgaagttcatagatctaatgagtccattactctcactcaacaaaactatgcaagagatttgttaacaactactcaattactggactctaaacctcaacgtactcttatgtgctccacatccgaatcgttccctaagatcgacactccaatgcaaaaccccacaatgtacagaggtgttattggagccttacaatatttcacaatgaccagaccatatattacttttcatatgaatcgattaagcctgttcatgcaatctctaacttttaatcattggagtgcttgcaaacatgttctcaggtacctagctggcacatttgatatggggttaacatccaatgtagcttacagtctcaatttacaaggatttattgatgctgactgggcagggtgctatgatgatcgcaaatcaacatctgttactgcattttcatttgtggtaatctcataagttggtgttcaaagaagcaaacagtgatagcaagatcgagcacataatttgagtattgtgctcttgctttagtcatatctgaagtgatctggattcagtcgttactctctgagtttcacctcaacgtttcttagtttccaaatttcatggtgtgacaacttaggagcatgatctttgccttcaattcagtatttcatgcacatactaaacatattaagattgatctctactttgttcgagataaaattttagcacaacaacttgctgttcgatatgtgaactctcacaatcagttggttgatctcttcacaaagcccctaactgccactccctttatgttttttcgtgacaaattgatactttgtctcgacgagtgtcatttgaggggggatgttggagatttaggtagttaggaattagttaatacctttgtacctaactaattattagttaacgagttagttagactctatttgtcaactgtatttttagctatgattgttattaacttatttttgtaaaaactttctataaataaaagatcttaaggccaattaattgattgagtatttttagtcatttcattcatctctttctcgttccatctctcccttttctttcttcttagttcaagaactctggttttacagagtttattcagagaagaaatgagtgaatgagagtatggaagcttatcaatacaaggctatcaatgaacacaatgaaa

SEQ ID NO: 297414 - DNA, 3015 bp, Cannabis indica
ttaggatgttaatgaaacatactcgttggtaaatttagatcttggtaaaatatttttaagttattgttggtatatatagaaatattataatcaaatgaatgaatagatgcttgtactactctagcatttttctctctgtgagaatgttgggatatccaacttgagttgttttctactctttaaagttttaaagtttcagtattaaaggcggttggtaagaagcttgaggagtatttattgttttctctggtcttgtcatggaggaacttaatggcgaacggaatgtaatgaatgagtctatggaagtaaatacggaggaggaggaggtggtcccgaattctataccatgtgatactcaacctttttcaactgcagaaaatgtgtccaccgaaggggcaaacgaaggaagtttaccagagaatgatgggaatcatgacgaattggagaatcttagaaaggactttcttgaatccatgacaatggagttagaatcagattttgatctaactgatgacattactaatacgggagttttggttactttctttgagggtgtaggagtttcaagaaatagattgaaagatattctcaccaagatttggaagttaaaagggaattggagaataaagactatgagtgcaggtctgtgggggatattttttgatcaagaagaagactgtgtggaaattcttgataaacgtccttggctcatcaacggaaaactcttaatcattaaagagtggccagcagatggaatttggagcaaggttaatatgaagaaagcggttttttgggttcaggcgtttggattgccaactccttacttgaatccgattaatactcctaccatagcagccaaagcagggacctatatgggctgtgataccgttgatcgcaaagtcattattcgaagggggtttttcaaaattcaagtggaattgtccacggaacatcaactctcctccggattttacttagacatactaagaggtagaaaggagtggatacaattcaggtattttaaactacctaaagtttgttataactgtggtcatttgggacacgataagaataattgttttaggcccacggcttatgtatatccaccggaagggaaggcggtgatggctttcggaccatggataaaggcagaaacagcggttttcagttgtttcaataccagaaatcagcttgattacttcagggaagaatccaacggtcaaagaccaagttggcaacagagcaaggtgaaaccagtggatggaagagataaagggaaacaaccaatcaatggcaaggaggggcagagtgtgttgaatcacaaagctgttatcagaccgacaaagaaggttatcaggatcaaccaaaacactccaggggctgttttaggaaaaaatttgaaagtagtgcagcaagtccatgcggagacagcacttacgcgcgaaggaaggacaaagcaagtagaagcaggttctgagttgccaaacagaggtaggcgtgcccggtcagcttctcctcgattaaggaataaacatccacaaggtaattctgctgttatttctgaagatgatattataaaaaaattctcctcgagaccggtccccacccaagatgatgctagggtaataacaactatcatggccaatattgggcctcattacagccaaatgatagaaggcccacatcataaattgtgtaaatctcgacaacctcataatcaccctgaagttacacattttccttggcctccttatgctaaagagactgggcttgcagaagagttaatgggccctattcaagttgacaaatttgagcccaatccgaccctctttcatgacccacttgatgtaacggagcaagtgcacccatgccctcaagcccgaaaaagaaaggctagtttgaatctggttccttatgttcctagaacaaatgaaaataccagagagttcatacaagaaattccacatttactacctgttgatacgaataggggtgaggtctcttttaaggttgggtctggagctacttcatcctcaactaagaaagacaaaagaagaagaaagggacctgctaccaggtcatcaacaggtaatgtcaatgaagcgaaaggaaaaaataagattgaaggaggagtggtcagaaacttggagaatacgctgaatttggtggaagttcgtgttgattgcattcagaactttcatacgggcgaggaggcggcccttatcaagccccctccctcccaatgaaattgctttcgtggaactgctggggactgtcaagagaaccggcagtccaagccttaatggcttgggaaagaaaatatagacctgactgtattttcttaatggaaactaaggttaataaggacaaaatggggggagttgctaaaaagcttggttattcaggctttgctagtcattcttcctcggggctttctggaggtttatgtatgatgtggaaaagtgatgttaagctacaaattatgagtgtagaaaggaacataattgaagtctcaatatgggatgtcaagaaggatgtgacttggaatctttttggagtatatggcacgccttatgaaaacgagaaagatatcttttggaggaatcttgaagatagagtgctgaattgtataagtccgtggatgattattggtgatcttaatgtaattggaggcgtggaggagaaaaaaggtggctcgaaggcaaattggaatgattttagatggctctcagattttctctttcgaacaggaagcattgacatcagttataaaggagggaagtttacttggcagaataaaagattcagtggaggtttaactagggaacggcttgacagagcagttagttccttagattggattggcattttcccaaaagcatgtgtcaccaatcttccaattacttgttctgatcatgctcctatcattcttgactcagagcaggagtctttcaaaggcttcagaccatttcgtttttatgaagcttggtgtagggaaagctcttgcagagatac

SEQ ID NO: 297415 - DNA, 5407 bp, Cannabis indica
agatcctggtaaaataaattccaacaataagtgcataccgttcttcaacatactttgaggacacaataaatttgaatggacagcagaatgtgaaacaaccttctagtaactaaaagaacatctagtaaagactccaatactgtctagactagttgatggacagtcgtggttcttgtacttggcaatgtcacatcatgccataagtgccaccttagtgcgagaagaaggaaacaacttctagtatattatgtaagcaaaagactattgtgcacggagtcaagatatcctatgattgagaagctttccttttgcttactaattgcttcacggaagttaagaccatacttttaggctcacgccataagggtactatccaaccaccctcttcgttatgtattgcaaaaactgaagtcgctaggaaaactcctgaagtgggcaatggaattgagtcaattcgatatacaatatcaaccgagaattttaattaaaggtcaagccttagctgactttattgtggaatgtatagggataaatgatgatcctgaaatgtcagtcccggagagagaaatctggaagatatatgtatacggagcatccaacaaaaaatgttctaaagacaaaatcattttaatatctccacaaaacctccaactttaaagtgcacttcatttcgagtttggagcttccaacaatgaagctgagcacgaggctattattgctggtttacaactagaaaaagaggttggcaccaaacacattgaactctacagtgattcacagcttgtagtcaaccaagtattcgggaagtactacacaaaaggagaaaatatggctagttacgtagtaaaaaatcaagagctattgtaatattttaagcattattctgtgaagcaaatcccaagggataagaatgcttttgtagatatgtttggcaaaattagcaaaaaactcagatacagagaaatacagactagtccccatcacacatctgatcacttcaaacacagaaacactggggtattcgacatcaatcacttgacctcctggatggctccaatattcaagtatctagaaacaggtacacttctaaaggatagggctgcttcgtggaagatctagtatcaggcccccaaatacgtgatcatcgatgggaaactatacagaagaggattttcaatgtcgtctctaaggtgcatagttggaacagagataagtgttgtcatgaatgaaggattttgtagagatcacacatttggacctagtctttctaagaaaatcatttgtcaaggctacttctggcctaccatgaagaaggattgcactgagtacacccataaatgtaaacaatgccaatattactcgaaagttccaagagccccaccaacggataaaatccctcatgaacactccttggcccttcgttgtatggggaatagacttaggggatcacttccaactagaaagggaggagtctaattcgccattgttgttgttgactttttcactaaatgggtggtagttgaacccgtgaacatagtgacttccaagaaagccctagactgtatattaagaatatagtgtgtagatatgaacttcctgacaagatagtgtctgataatagaaagtagttcaatagtgatcaaatcaatgacttttatgacaaacatggaattatcaaaagcttttctgctgtggccagacctcaagcaagctgacaagtggaaaccattaacgaaattctaaagactaccttaaaaaagaagcttcatgattgcaaagcacactggccagaagaactccaatgagttctttgggcctataagaccactgaaagaacttctacaagccacactctgtacttcatgacctatggatgtgagactgtaatcccaattggatccatagtgaaaaattgaatccttggatttaattaaggagcttcgagagcagtcccaggtccaactctagatgtatcaaaacaaaattgccagaaattttaactctaaagttaagagcaaaaaattcaaaatcagcgaccgtgttttgaaaagagtatttctagcctctcaggagctcggagtgggaatcttaggaccaaactgggaaggtccatatgaagttttagaaaaaattggtgatgaaactaatcatttaaaacgactagatggaacgagaatcccaagggcatggaatgctgaccacctgtgctgatactatcagtaaattgagggtggtcaggttcctttttgtttgtctttactttttattttagtatataatttccatacacgcctcatggcatgaagtctttaaataattgaagaagttttcatttcatattcggtctttgaaagttctaccatttaacaagtgatcaaaagtctcaactattaatcacttgggggtagcatatattatattgttatataaatagtttcacctttttcgtaagaaatagaaaaattaaatcctcaagtataagagtagggagtatagcctgaattttgaaccctagggaactggaagtaagccacaaccttattatatttgaaattaatctagcgtttaaccaagtataagagtagggagtatcacctaaaataggaatcttagggaaccgaaagaaagccactacctcattatacttggaatcaattttaacatatgaacagttaattcgggttaacttaaaataaaagttcaagcttcatgattaacttaggttaacgcaattaaaatatttaagctacttaaatgtaataattaaattaatttaattaaatatttaagccctgaaagcaagtagtaattaacaagaaaggtataattctaaaataattaattagctcaagttaattgattatttaagttctaaaaatattttaagaaaaacactttcaaatatttttattcaaaacaagttaataccaaggtttaggccattggaatcacattctaaagaatgcaaatgattttttgaaaaaaaatatgtaagtctaagcatttcaaatctataggttcaggcctttggaaccagaaactcataaggctggaagcattaaacttagcaaattctatagattaaaatgaaaatatctaaggagtttattaaatagtactacgtacttgaaaaccccacggcaagggtataaaatattgtctctacacacatgaaaggtgggacccttgtcccctaaaagacaaaaaaatatgtgataaagttgttgaaaaaatgcaagaatggttaaggctacactggatcctttggcagttggttatcttcagtttgagcatcagataagagatccaaaattgtagagttggttgagagaggaacatcagaggctcaaagagtagagtcatccaagatgtcacctacagtaatggtagttctaggatcgaccattttgtagtctgagttgcttccttagccttgtctgcttccttcagtgccgagatctgaggcattagatcatccctatcttcagcatccaagaggtctattacacatttgtcgtgttgccagatattgtacatcgagtagacaagggccagtttcagatcattggaggtctgggcttcctgctcttgcttttctaggattacctactggtgttgtccctttaggcctaatttgtctccctctaactggatgacctccttttgggactcttcataggctttcccaaatgaatccaatttagtgtcagcctcctcagccctttggatagcctttttctcacctttctccaccttttgctataactcctaatgcagcttaacctttctctatagagtagtttccgtaatgaacttgtcatttatgatttcaacatgtttgtcatactctcgagagaggatggtaagcttttggtctttttattgcatgtccaacttttcctgctacgaatcagcttcaaggtctttgacttttgtaagagcgacagaatgtaaatccttatacttatctccacgctcgctctccatgttggttgccatctttttgcgagttagggccctgtgcaaagattcaatcactctttgctttatgatagcctccatcttggtattggttttacctagagcattaacaacttcctccttgttttgatgagcattttcatgttccaccctcagcacattaaatttgtaggctagtaggttgaccatggagtagttcctctctgctattaggctcacctttgaaaagtaaagtgcaaattaattaaaccattgggaggtgcaaagtgtttattaaaattaaaggaaagtcaaacttacaacattggcctgggtcatcatagcatctgctacgtagattggatccctgctcaccatcatggcaaacttgttagctccgagcctataacttgtagtagcactctgatccaacacatcagctagaaatggtgatacatcaattccaacccgaggatggagcctctctatcatttcaactctgtttgtaagggcagggtaaggctaatcccatttgtcataatcagcgaattcagcgttacgtctcgtggagatactacgggtcagtttcttcttttctttgtattcgatactacaccttttttggtagaactgctcaacctccaagcaagcattgtctcatgttgtcaccgacaaggggctaataataaggttgaaaggcgctagaggaaacgaaggtaaatcagttctctccctagacagctgagtagcaatagctggaatgatctcagatgtcgggggtggaggaggaggatcctgactatcccttgtagttttggtgttttgtctaggcagccttttgccatcagatacatcaaatctcttccaagactgagctaccacaacctgcctccttgaagttgtcgattgtatgaccttctccttggtctccacgctcaccttttgtttgccccatcatttgaggaacctcgccatttcttattgatcacgattggtttatcgtaatcagagttgtcccctctagagttctcaaaaggaacttccctcaaaggttgcatgatcagaacgtgtgcagtcagattgatgatataagtagacaagccatctgtgcttggtgccttgaagtagcctctgtattcaaagctggaggtactggctactgagatccgctctcagaagcttagaggctgtttggctttacagtttaaaaactatcaggagtcgtttggcaaaaattttaaaaactgttttttaaaaattgagttttaaaaaacagaaaacagaaaacatcaaaaatattagttttcaattttcaaaaactaaatttttttttagtcttaacatattatattttatattttgctcacatactcggatcctagacccaaaaccatacccgaacctagacccggatgggttaaatgtcatggtatggtgctaaaatatt

SEQ ID NO: 297416 - DNA, 2049 bp, Cannabis indica
tcctaacacagagttactcagcctaagaatgactcaaagtcactcggcctcgtagtgacaagagtcaatgggctccaagagcggctcaaagtcacttggcctcaccgtgaccaatgtcgctcggctgaagagtgacttaacttcacttagcctcgtagtgaccagtgtcacccgaccccaagagcaactcaaagtcactcggcctcacgatgactagagtaactcggcccctaaagtgactcaaagtcacttggtcttgcggtgactagaatcacacgaccaaagggttaaaaaaaaatcttggcctcgagagcgaatcaaagtcacttggcctcatgataaccaaggtcattcgatcgcatggtgatttaggtcactcgacaacaaaaagcgaaaagaaaaaaagaggttggacgaggttcaaacccgcgaaagctcttagacaaggtgagaagcatttgtcgatactccacggtgtagattgtgaagtgaaactcaaggaaaggaggtccccaatctatagccggaaaatccttgataatcatggagattgtaaggctcacactgcaactgagataaaccccaattcacttagtcgacaagaacacttaaaagaattcttttagactggaggcaagtgttaacctaaaaaatcgacagagtggattttcaagattagtccataattagtccttaccatcgagagacatcgactgtacgagtcggtcgaggaatgactgaatcaatgtgtatggcccagggctcattaatctcaaggatcaatgctttcaagtctctgggtttatccatgcaactcggaggtcaaccccgtagaaacccactagtagagttagtaagattaactaactaagttataatttttggaggatttttataatgatgcattgagaattagatcttgtcataggcttaaagtccatagatctctttctcaactttccaacgcatttttcatcgtccaatgtcgacatatatcaagagagttatgtctaaaatactaagactgttgaattgtgacaactgagtgtgtgatctaatgtgccattgtgcaagcccatgagctattgtgcgagcccatgagacactgtatgagcccattagttgttggacaaaccaaggagtaattgggtgagtcatggttgcaagtggtggagcatctgagtcagccatggtgaagcttctgctcaagctgtagtggagcatcgatgcgagtcatggtaatgtctgtgcgaggggctcacatgtgaggctgcaaggctgtaagatagtgagatgggggctcgcatgcgagtgtgcatatgtgtgcgggtgcaatgatgcgagactgcaagaggatgagatgggggcttgaatgcgaggacatgagggactcgcatgtcaatgtgcatgtgtgtgctagtgcgatgatgcgaggctgaaagacggcaagattaggggctcgcatgcaaggccatgaggggctcgtagacgaatgtgtgcacgtgtgcatgtgtaacgttgcttgaggggctgcgaggcaacgacttgcatgtgagcatgcatgcgtacttgtgtgtgcatccgtgagcatacatgcaaccatacgtgcatgtgtgtgcatgcaagcccattagcatgaattcgttatgaagtgccgagtatgttgtttatgtaaagaggagtgaaggttaaattttaatgcatatcgacaagaatgacattggaggagaaataagaggacaaggtgtgcaacgaagatatgtacaaccatgccttcaacaaactctgaaagcaagggcatacgagtagtggagacaacgtacctgcaaggtctaaggacctgaccaagggtactctacaaccacactcctgcaactgggaaccacactattgtaattggggaccacagttggggaccacctgacaccagacaaaggtacaaggtgaaaggacatctcctgcacctgcaatgtgcaacaggaaagtgacacattgccccattgggaccaccatgtacctcaggccattaaagcttataaataccccttt

SEQ ID NO: 297417 - DNA, 1438 bp, Cannabis indica
ttctcgaataagtatattacaactttgttgtcacagtagagggtggttggttgggattgtgagatgcaaaagtctgagagaatattgtgaagccaaagtatttcacaagttgtactagctaagaagcgatattcagcttctgtagacgatttcaaaatagttgattgtttctttgatttccatgaaatgagggactgaccatgaaaaatacagaatccaataatagatcgcttgtatctggacatgtagcccaatctgcatcaacaaaagcttgaatgtggaaaatacaatttgcaggaagctgagatgaaacatcagaatggaatagaagtccttttccaagggtgtccttgaggtacttaacaatgtagtaagcagccttcagataaggttgtcgaggatcacttatgtactaacttaggcgattaactgaatatgatgtatcagctcaagtgattgtgaggaaagaagcttgccaatgagactacgatatgatgttgcatcatgcacaggaggtccaacatctttactaagagagaagttggcatccataggtgttgagacaactttggaactaaggagtctagtttcattgagcaattgaatggtaaaaggtctttgtaagactgaaatgtctgctttggatctggcgatgttgagcccaaggaagaaccttagtgtcccaagatcctttaattgaaacttggagttgaaaaaagttttcaaaactactacatcagagtcatttgtgcttgcaatgattatatcatcaatataaactaagagtgcaagaaaacctgtgtttgatgactttatgaataaagaatgatcatatgcagactgttgaaaactattctcaattagagttgtgcttaattttacaaactattatcgagaagcttgtttaaggtcataaaggcttttgtacaataggcaaacaaggttaggaggtaactccccctcatgtacatatcctttgggaagggtcatatagacttgttcttcgagttcaccataaaaaaagtattatcaatatccatttggtgtaaggaccaattgtgaatggcagctagtgctaaaaatagtttaagggtattacattttgcaataggtgcaaaggtctcaacatagtcaatgtcatgttgttgtgaataccttttagcaaccagacgtgccttatacctgtcatttgagttatatttgattttctacactcatttcttgtttgcggactaaggctggcatgtaaatgttgtaagttgtgagtacattatatattaatttttcatttagcacatacctcatggataatcactaatagtctatcaaaatgatttctcttttgaaattaccatgattcaaaatagagtacatgtattctggcaattgattttgtaaattttggtgccgtttggcaacacttatgttttttaatttt

SEQ ID NO: 297418 - DNA, 3033 bp, Cannabis indica
ttttaatttacggtttgggtttttaaagtggttgcagggctaattgcaataggagtttctatacgattttttattgcaatttaggttgcagcgctagttgcaataggggtttctatgtagaatttcgtaaaaatacaaaaaaaaaaaactattttaaagcgtaaaaatgaaaaaacctctattatgaacaaatatttaatattgttgtcgttaaaaaataaattcagtaattaagtgtaactattataaaatgagaaattgctttatatataactttttaatttcttttttctatttttatgattttttttggttttgtttttttcatttttagaatatgggttgctttcttggttgcgatctgagttactctgttggttgctccgtgaattgcactgcatatttcgtaaaaatataaaaaaaaaaaaatactttagaatgtataaataaaaaaactccttacaaaatttagtatttttgcgacaaataattattatttttttatataataatgaataataagttgtgatgtgttttaattttacaggacatctttgaagctggaagtgaaacatcagctgtaacagaggattgggctatggtagaattaatgagaaatccaataatgatgaaaaaggctcaagatgaagttagggaagtttttggaagaaaagggttatttgaaacatcaattcatgagatgaaatacttaaaattaattattaaagaaactctaaggttgcatcctcctgttccctttttacttccaagggaaagtagtgaaaaatgtgaaattaatggctatgagatacctaatggaacaagagtattggtaaatgtttggggaattggaagagatccaaagtattggaatgaacctcaaagttttatgccagaacggtttgatgatagctctattgacttcaaaggtaataattttgagtatattctatttgttgctggaaggagaatatgtcctggcataacatttggtgttgttagtcttgagtattctcttgctttaatattataccactttgattggaaacttcctaatggaatgaaacctcaagatttagacatgagtgagttatttggcattgcagtaaggagaaaagatgatttgtacttaattcctacaatttatcatcagtcacctcttgcaaattaaatcgtatattatgagcaaataataatatttatttatgttggcttggcttgattaccttttaactttcatttgaaggttaatttgaataaagagaaatgtattagtgagatcatttttattttattttattgtcaagcacttaattttcaatttctttttcacttgtacatatgttagcaaattatttgtagtattatcttttatttgcatcaactgcctatataaatacataaaagtttgagaaaactttatcactctgcactctaaaagttcttggaaaattttattgttccaatatacttattaaaattaaacactttatttgaaaagcctataattatgcacttcatgtttcttccaacctccatgctaggtattttattccaaatccagtttgcaacagatgtagagttttaattaaaatattgactcatgttttgctaaattgttctcgaataaaggaaggttggaaaaattcattttgaaaaattgtactttcgtaaatgctaaaatatttattaaattctaataattaaaaacacaattataacgatctgcagtaacagattgaaaatctactacaacggaacacaaatttgcaataacgaaataaaaataattgtgcatgatgtaaaaacttaacacaagagaattatacatggtatcagtattcttttgaacactactagtttacgggatcacgtccaaaaaatgaaatcaattaataaaatctcaaaaaaaattaaaaacataattgacttaaactagtttagactccctctaaagctttgtagcaattctttgtaattcacattgccaatctaattttttaacaccacctatcatcaaacttctttcgtctttgatgtgtgtgtgcttacttcgtcttaaagtaaggcttgaacaagttttctcccgaaaacccttcttcattcaagttcttcaactaattctatgaacagttaaagaacaatgaaataaacactaaaacctagctaaacactctagatttttacaaaagaaactctttcctcattagaaagaaaatatgaaaaatgaatctagaagatgtgaatttatttggatattctctaggtcctatttataacatataaaaatcctagaaataagcacaacacgttttcacaaccatacaaaagctttctaaaaaaatccctaatttggagtgacaagttcgcaatctacaatgccacataggccaaaacaataaacttttcaaataagtcaaagttcacgatttgtactttatttccttacatgaaagggttaaaaaatctgctgtattcatagcaaaaccgaacagatcaattattacaaatttagtgacaattattctaaaaatagactaattaggtaatctttcaattccttctcttttatgaaaagttccctaacaaaaattgataactatatgattaaggctcaatttgtacattttagatctttatttatgcatattaaattaatataaattaaatatttcatattattaatggtaagtttagcttagttgaaaatatataatttatttttaattttgtgttatttttcagatttattagtaaaatatgggtatgtttggggctaagcaatagcccaaaatcccaatttgatcactccatgtcatcaattataattcccactccaagttttgaaactattgtccaaaccgtaggtgtttttctcaacattgcatttgaagtgggccaaatgaagaccaagcccaagtagtgcccaagtaatttgccaaattaatgagaaacttacaaaaatattagaatttgggttaacttttataaagatactgtcacacggaaatcttttcaaaaatactgtgtttt

SEQ ID NO: 297419 - DNA, 3263 bp, Cannabis indica
attagttagttgtcctaactgtaaaagcgacttctgtcttgtacctttcttgagcctgagctatataaagctcactcattgtgcttgtaattaactgttcagataataagaattctctctcttcttcttctccttctttcattttatctttctgttttgtaatataccattaatatttttttaatatttaattcattgatagttattaatgacattttgtcttttagatggatttatttttgtgcattggagcataattataaatgttctcctaaatatagtatttgttcattttttgtaccaatttagtacaatatattagtgttggataagtttagtcaacatgtcaatacgaaggacaagcatgacaaattaggttagagttgagatttctctcatactaaaattaaagaagttgagttaaggttcattaattaaatacaccaatgtatctcacacggacacaaattgccatcctatttgtttcaactctaattggaactgtaccattcctctatacatacattaaataattaagaaagagcctaatgaatataaatatcaaacgacatcaaggctctgatgatcgtttaggaagaattgatcatttgtaggtttggtaatgagtggatcctctaaatcatttattggatgttcaatttgcatggatgatgaattgggcctccagtacattgcatacagaatcagctgaatacttcccagcacaaatccactaacatttggtatctacaacattaaccaatgaattcataattataaacataatcaaggacaccatatgcataagggtggccatggccaccaaatcttggtatttcgttttatttatttatttattcaaaatttgtagtttggccctttttcttccttttctcaactaataatagtatgcattatgacttatatacttaccccaacaaagtaatctttcagaagataagcataaacagtccaaactacactgttcaaaaataggataagagagagtaggaaaggcatgtattctacgctctttgtcaaaatgactgttttctgtataccacaccacaacacacaaatcaacaaaaaaaaaaaatagagagtaattgttataatttcatcaaataatataaataaaaaattatcaaataatagaaaaaaaaattaaaatgtatgttttaccatagatgaaagtggtgaagcataggcaatcatactgaagactgagcacaatgatccagcaaaatcgattcgagtatttccatgaagaaaaatttgcatgtacataattgctgctactggaaatatgacattaaaaactaccacaagaatcgcagtcctaatctgaaaacaggtcatcatatattataaaagataatggtactgaagataaagaaaagaaattaaaagaaggagaaaagaatattataccttcatttttggaggtgcaaaaagtaggaatatggtgagaaaaatgatctcaacaatagcaccatagacattcacagtgactattaaaaaaccatttgtcttaataattccatagtaaatccaaaagaatgcatttaataatttgctgatataagggatactctcaaattcctctgttgatctacgcttcaagattcgccaaaacacgtttctgtgaagaaatatatatatatattgagagattaatttagagaaattaactgattatttatttattcatttatttttttaaaaaaaaaatagaataagtgaggtttgaattcttacgcaggagaaatatagaccaggccagacataatattacctaacataaaaagaaaaaaggaaaatgattaacataatcaattcattgacagtacaaaaaagaaaaagtgtgaactttattattgtgtgtacctagcacaccaaataagatagttaatgaagaagttgtcattctcttgttcttgatcttccttctacttgagtttaataattatcacgcaattaatttctactggtggattgttaattattcccagacctagcctctactttaattactagctagcttagtaacacttcatatagatataggtttttaaatttacattgattactatctaaattaatgatgtgtttaactgtttaaacaaaaatatcgtaaattatccctatcctaattagaataggtatatcttttaaatattctgtaattattatttttttacaaaattttagcgtattttttatgagttttaattaactacttttgtgatttttttaaaagatgataagtgtcacatgaaaaaaatttatacagataggtaatcgtattatttaaaatcattttaatcttattatcttttctctctttatttctttttttttttaattttttatccagttaataataaattaaaaaaattaattttttatcttcattagtcattattatattaattttatatatgtaattcatagcaaatggaccaccaacttctctcaccgttttttttttaaattttatttctatatttcttttctattcttttttcaataggctatttttattttattattttttttcttgagaaatattctttctttttctaattagaaccatgtaaacttttgttcaaataacgttcggtaatttgttgaaaaaaaatattcaaccctcttttatttaatctttacaatctcacaatcgtgcgaaagaaagaattgggctgaaaaataattagttgatgacgggaaaagttttagggattgcaaaatcacagatagattttaatttttattttgttagctatgttaacaatactgtaaatttgtatatagccttaattaattcatgagaattaaacaataaaattatagattagcataagcgtaccggtgtccatagaatcgacatttcaatggtttgatctttaattggtatgatcttccaatttgcataaaaaatctttctctgaagtttttctcttggtgatggggatacatgagttgaaaggatacgatgcaaatggggaccattacctcttatattaccaacagacaaaactgttggtaatatttattgactatttttatttggcccctcatcaaaatagaaattgtccttatggtatccacatattaaaaacatgacaatcacgcccttaagtcacaaattttattccaaaatagaccacatataaatttgacttatttatttgatgacccaacacacattttatatatacaattgtgaccccaataaagttctaacaatctcccactgggtc

SEQ ID NO: 297420 - DNA, 6066 bp, Cannabis indica
aaaaaaatccttaaatccaataatctcaatagttcagggggcatttttaacgaccttaaaagttcagtaggcatgatttggtacatgtcaaaatttagaaggtaaaaaatcctaattagctttattataattgcaatttcgattaatcaattgttatctctaagaaaaatatttattatttgaaaatatataaaaatatgttattaaataaaaataataacatgtagttgctactaaggcacaatctttatgtttactttcaaatctaaaattattgctgaaaaattctttttcttttttaaaacaaaaaatggagagaaattcattaaaagaggcatgcaaatgaaaaattgagatgtgatgataggaatataatatttataaaaatacaaaaattaaattataatgacagcttgcatgggcattgctttagtaattattcattaactcttatttatatgtttgacttttggattcccttattaatttaattaaataaataaaaattcaaacatcacacgctttattttttacatccactccatcaatttcatagtcaactccttcaataaaggcataaatactatgatgaaagcacttattattattattaatttattattaagtaaccgcattttcttatattataataattattattgttattattattataagataattttacatataaagatgtacggatatatttttatttattttgatattcgaaataattttttagttaaatttttttatggtcagataagttatgattatttaagacatcttacaaaattttaagaaattcaaaaaaaagtaacatgtcgaaactaagatttgaatagtgtattacattcgtgattattttattttatacgcgtgtgaataaattgtttaaatattattttatatattgtaaattatttcgtattacaaatttttttataaaatatctttaataagagtattgctattgagtactggtgaccaacaccatttataaaattagttagtgatatatataagtttcgatacttaattacactaataacactagaaagaagttaagctaatattttttaacaattattttatataatgtatacgaatataaaagaaaaattggacttaaaaaccaaaacaaatagatgaccattattatatttttccaaaaaaagaatatttaacaacaaacacaaacatcttccaaaagtcaaaactctttgagatcaaatcaagttcaagtttttaagcactaatcatttccaccaacacaaaaagcttaaatcttttcttctttttctttataaaaattccattttttttcttttaaaaaaatttcaatgggtaacggaggaggaaagatcggacgttgtttcgccgacgccggagaaatttctctccggcacaatatcgccgtcgttatctcagacccacttaacgaaaaccacggccattccttctgttacatccgacccgacccgactcctctcccaccctcaaaaccccaaaacgaaaacaacaacaacagccccaaaacgacaacgtttcgatcaatctccggcgcttacgtcagcgccaacaccttcacacctctctcaacatctctcattgattcctacacagacatttcaggtagtaacttcgaaagctcaactcttttcgcttcgatccctttacaaccggtgccccgcctttcattccaaggcggtgcaccgggttattcgggcccgatcgagcgcggtttcatgtcgggcccgatcgaacgtgggttcacttctggcccgatcgatgaagaacaaattaaagaagaagaagatgataataaagttatgaaatttaaggtttcggaaaaacccgaaaagcagagctttatcaagattcttaagagagccatttccggtggcttagctcgtggtcgtgggaagaacaacaaatccattgttgctccgattaaaggaggagttgattctgatgagaagaagaagattgttgttgttgaagagaagaataatgtaggttcgattagtactaattcgagttcgaataaggttgttgttgttgttgatgatgatgatgaggatgataaggtgagaattattgagaatgatcttcaatgggcacaaggaaaagcaggtgaagatcgagttcatatagtaatatccgaagaacacggatgggtttttgtgggaatctatgatggtttcaacggtccagatgctcctgattatttactcagtaatctctaccctaatgttcataaagaacttaaagggttgttatggaatgaagaaaagtttcaatctttatcgaattcgaataattcggaattggacatgaaaaaacaggggaagagatggaaaggagaatggaacagagaaagattagaagttgataagaaaatgaaagagaatttcaatggtggagaaaaaaatgtattgaaagcactttcagaggctttgaaaaagacagaagattcttatttggatatagctgataaaatggttatggagaatcctgaattggctttaatgggttcttgtgttttggttatgttgatgaaaggtgaagatgtttatttgatgaatgttggtgatagtagagctgttttagctcagaaaatcatggatcataataataatcataatcatatcaatgaatatgagttttctaatttaacttctttacagttaacaatggatcatagcacttatgttaaagaggtaattagtgatttgattaataatttgttgtggtataattttatgggcatttttttgattttgacatgagttattgttgtttttttcaggaagtagagagaattaagaaagaacatcctgatgatgtttgtgctgtgatgaatgagagagttaaagggtatttgaaagttactagagcttttggtgcaggctttcttaaacaggtaaaaaaaatattagtattatttcggtatatccattatctgtttcggcatttaaaatagcattttagtttttttttctctaaatttttaaaaagttaacatttttttataatgtcgagaataaattttaaatatttacttactaagatagtcatgtatgcaataaaataataaaattttatttttagtattgtaaatctatttagaatcgtttcgaaatttcgcaaatagtgttaatactaaataactaaaatgtacataattatgaagaaaaagatgaatcaaaaaattctttttgataccaaaacagataaaatagtgtactatgaatttaacctaatcttgtttttgtttttttgtaatttgttttgatattcaggatagtgtcttagtttattttttctttcttttatgaacgtagacattataattatttataattacttataaattttcaaaaaagtatgataatttataatgtcgaaaaataagatttgaacatttatttaaatcttattttaaatattttaaataactacaacgtatacagtaaaattaaccaaaaagagaacaccgaaacagataaaagggcgacttaccctaatgttgttaatcattttgtgtattgaaattaatgtttgcttttgtttttgttgtttgtgtagccaaagtggaatgatgcattgcttgagatgttcagaattaactatgttggaagttgtccatacataacatgtttaccatcagtttatcatcacagattgagctcaagagacagatttttgatactgtcttctgatggattataccaatatttcaccaatgaagaagcagtttctgaagttgaatttttcattgcttcatttcctgatggtgatcctgctcaacatttgattcaagaggtcttgtttagggctgcaaggaaagctggtataatcatatcactctctttctctcttttcaattcaaaactatacataattttaatagttaatataaaaaaagctaactactataagtatttttttttcaaaaataaacaataataaattatgtaggttaattaggatttttgtcttctaaattttgacatgtacttaatcatgttccctgaacggctttaaatattcccctgaactattgatattgttgaatttagagacttttgtccaatttcattcaattttactaattcaattattgtttatgtactaaattagacaaaagtccttaaattcaacaatttcaatagttcatgatggatttttaccgatcttaaaaatttaaggagcatgatttgatacatgccaaagttcgagagtgtaggaataaaaatgagtaaatactattttagattttgtattttacaaaaattaccaattaaactatttattttattaaataacaaatttaatcctgtatttttcaaatagtatacttaagttcaattttcgctaatttctaacacaaatagatgtaaaaaaaaaaaatcagtctgatcataacatcttttggttatgttattattaaaatttattttgacgaaagttaacttaaaatattattctgtatcattttgaaaaaataaaatctaaatcgtcatattaataaaacaaaatatccatttagtaatttttacaaattacacggtccaaaatattttataacaatactcgaaagtatattcatatgtatttatgcttatacaaaatttggtgcaatgaatgtaggaatggattttcacgagttgctcgatatcccacaaggggaacgccggcgataccacgatgacatatccatcattgttatttctttggagggaagaatatggcgttcgtctgtgtaaataccaaaaaaaaaaattacaaacaaaaatatagtgtagatacaaagaaaagttgaacttttttttttgctagttcatctccaactcccttgttatttttttcccttggaagttctagcattgttcattttatacgaatacatctttgatcggtgtaaagagaaatcatagtatcgttttgttatatactcacattttcattgtttttttttggttgtacacatgaattttgtactaaaattttctcacaatcctaataaaaaatactatgaaaaaagtattttctcaactaatttttactgttgaaaatgtaccttttttcgttgtttgtaaataactaaaagattaggctaagagtttaagacactttctttgctaatactagcattgtgcatgtcgaaatataaagaggacgaacgattaatgatatatgcacacaaaatatatatcaaactggtttaaagtttttttaaattataagttttagctcaataggatgtgattggctaagtataaatgagtaaggttttcatttagagcattcaattaaaaggacttcaaaaatttgatttaaaaaaagcttaaaaatttaggtaggagaaatgttaaaatgtactattggtgtttagcacttttttaggtgtaatactattattggtacaactaaatatagaattttatataataacttttagagaatattactaactaattgtaagacgaaacttttagaagatagtaactatcactaattctcaataacaatattttttaggaagaatctttaaaatttagtcattttttgtaatatataattagaattaaaattgtaattagtgcaatagtatctgtgtaataattagacaaatagtataaatatgagaaatgctaaaaggtactaatagtgtttagcatccttttatatgtcaatatgaatattggttcaattacgtatcaggttccatttaatttaatgtaataactttaaaagagtatcgttagccaattacaatgcgacttatctagaggtctagacaccacttgtacccaataacaatactctataaatattttgtatcgagtctaaagctatgacaatggttcgagaaaaaaagtgaatgaggaggaaattgggagaaaaatataggcaaagtctcgaatagagtaatattattattaatgcattttctcaagggctccaaaaacttagcttaattggagactttttttttatggttccaaagggacggttgagaaagttgatttattatttatttattttatttttggg

SEQ ID NO: 297421 - DNA, 5775 bp, Cannabis indica
caatgtctaataaaccgccccaaactactaacatactaagttgtgattttattgagccaaacaccgagttccaagataccgggcaccggaaatgcaaaattatgaaaactactaaatgacataaaaatgcatctctgaattcaataataacagtataaataattatttaaatagctataaataatttttcataattaaacatgataaactgctaatttccaaattaaactaagcggtctttacattcaatatcgcaaaggaactcccgggcaagaattattctttcaaccagctcatccacatcctttctagctaaaagtttttgttgatgttgacgtctcggggtctttccttgacactagaagatctattccaggatattgtattttctttggcaactctctcatctcttagaagtctaagaagcaacaaattgtctctcgctcatcagctgaagttgagtatcacgctcttgctaatgccacgtgcaaaatagtttggctcactgccatcttaaaagacctccgaattgatcatcaccttacagctgccatgttttgtgacaacattattgcctttcacatatctaaaaatcttgtcttctatgaacgcaccaaatacatcgagattgattgtcacaaaggtaaagattaccaatggcctcatcaaattgatccacgtctcctccaaaaacaatcttgctgatgttctcacaaaaactctttttcctagtcatttttcaaatattgtcttcaatattggtttacaaaacttgtacactcctaagagggaatattaagcttaaaaatatactctattttatttttcattgttagagttaaattcctttatctatgtaaggccctgcatattgtaaaataaattaattttttattttatttcagatatataaaagaagtcttttcccctaatacttaatgaattttctctaatttattcaattctatttaattaatatcattattagcgacattttctaagatggatgatcacattttccataatattcataagtgtttaattgctatattctatttatttcttgccagacattaaaaataatgttatgaaagaattttgtagggataataaaatttaataatatacatgtgatggagtgatgaataatgacagagagagagggagtgagagagatactcataaacatttgttaatgcctttataggtggaaattcttaattaatttatatgtacaattacatattattgatcattatatagcttataagactttttagtgtttttttttttttttagatttagtggtactttgcatgagtggtaattaatatatatttgtagattattaaaagagatggagtatgataataaactgaataatatcaagtggacatattaatgagagcccacatggtgtgacaagcaagaaataagttaactaactctcttatcacaaaaaccactctgtctctcactctatatatcttatcttatgacacaaacacaacccaataaattgagtagtgtctttcatttttgattaagagaaaaacttggcagaaatgtatgttttgcagcctctttttcggcgtgcaaccaggcccaaatattgttcatcttatgtagttataataaaactcttcatctttctccccctctctctcactatatctaaaaatatggataatattattatatatatatatatatatatgtatatatgtatatatgtagtgtgtgttttcatgtgcaagtggcacttcacgcgctgcaagaccaatatgatttcacatgccaatgtatgcataaagctaggcatctgacaccttaacgctctattatttacattatacctttctctatttatataaccaaagaattatatatatcttatcttatttaattaatattattataccctttttctcttctcttctcttctattaatattgcttttctactatattattattattatatatactactactcattacaactactacttgtacaagagactatatagctatagcttgtcaaacaaaaaagtcaacctcttttttaggatttgagttgtgtatattttttcatgcacgttgtgttatatcctttttatgatcaagaagaaagtgcatattgcaatcgaagcttatatattttctttattagcacatggccacaatggattatatatattcatcaagaaaccaaacaacttttaatttctcgtgattactactcttaattgacttattactcattaattataagtacatgttactaaataattattaatatttatatatgcatgcttatttatttagattagcctaattgcgtttttgtcttataatagcatgaaatccatgcaaatttgcatcaaatgatatatacgtgactattgatactctgtatacgtacattagtagctataataagatttaactgagatatatatactatatatattagctagtagaaaatacatatatatatatagtactcgaaactcttaattaatcaatttgtttggccccgccggacccaccctcatcactatatatagaaaataacattcagcaaaaatttgaagtactctacctaatcacaatatctgtatatatatgtacataacatacatatatatcgtatatgtataattgagatattgttgagagaataatattagtaactttattaaatatttatgatgatatataatattgatgtgatacacctaccaatcaatagaagcgtacagccgtactactacatcaacatatatatatatatataatgatatatatatatatatatatttacataatttcttggttgttgattttatatgcctcctctcaattaagcaatttcacctttcatgccagctgcattctactatatatgtaactactacgaccaagctatatatattactatttttcaaaccccatatattgatcgaaacaaatatgagccatatatacacatatagatgagatgagatatggtatatacattatggtcataattaataacaataataattaagtccatacatatatgtatacattataggtccacagcagaggcactcaaattcagcattgagtttgagagggaccatgtctcgatcgatcagctgagagacaggattagcttccaccgccgattataacgtatccaaaacccaataatatatattatgactatatatttatatggtcctggaccccttgtaataattcaatccatttaatcaatatatatgtggaacacacattgttattcattatatatcactataaatatatatatatacatacatatgtatatataattggtgtgtgcgtacgttagattttggtggtggttcagagattgctatttgtccagcttgaactccgcgttgtgcccaaccccagtgcagattatggcccacaatttattatcataataaactcattcaaagtcagataataaccatatgagaaatgttaaagggtactcatggctagctccctcttatgtgttagtataactattagtttaacttagtatcgggtctcatatagtttaatataataacttttaagaagtatcgctagccaattacaacgcgacatgtcgagaaagtgctaagcaccactaatgcctaataacaatgctctaacaatatatatatgtatatttatatatttatagttttatacgtacgtatgtatgcttacatatatacatatatataaataataacaaatagagaaagtggccgggtaagagtgatagtgatatggaaaattggaaattatatcaataagacaaatttcgctatagctcattttctttttcaatcaatattaattgtagctattaatgtcatgtacctttgtttcaaaaaaaaaaaaatgtcatgtacctttttgcactcacaggccaattttatgttagtaaatttaagatttttggactatgttactctaatatgtgaaatatcaaattgtaagtatttgccctttaaaaaaaaaaaaaattgtaagtatttgtatttgtattagtatttatattattattaattaatattaattgatgaaagttacattatattttttagcttttaactataaaggtttttcgatgctaatagagatatgatatatgtttatatgttatgaacaagtattaatattgttgttggtaaatttaatatagtattttcacatattttattttaatataactaatattgatctaacactgtaaaaaaatttatttttggtcaccataaaacttgtaactaaaaataaaaaagttgtgactaatcataaaatattatttatatattgtgactaaaaaatttgtgactaaatgtattagtcacaaaaaattataatttattgtgactaaatgtgtttttgtttacaattcttgttatgactaaaactaaaatagtgacaacttgtatctaaatattatgttttagtcaaaaataaatttttattaattagtcactaaaagtggctattttcaataatgtaattaatcagtaacctattaaattattattcagattatacacagcattccaattattcatattgttggctagtattattagagagtaaaatattgataatgtgtaaaaaagataatactatatataaaatgtatgagttgattttctcgattagcaattgtctataatttttttacagagtcgagtataagtaatcaagaaatttttcagaattttcagtaagatgtttttttattattattattaaagaaaatgtgaaaatgatatttttaaggcaaaagccaataatgtactaataggaaaaatatcacttaatttgtccatacacaatatgaaaattaaactagaccaccattaatctttaacttgatccatagctagttttatacccaaaatttcactaacacatcagaggaaaacacgtgtcaagctgggaagaatacgaactaaggcacgtaattataataacatttgaggttgaataacttgttaaaagcataattgacagagtatatttacaactcgactgattgaatagtcttatgcgggataaaaatatacaatgttgccttgtgcatcaacgagaaaccatgtaactttagatgtacaagacgagggactaacatattgtatacaaactaagtataagagacgggtgaaccaaagcaaatgacgaggcatctacctcgccataggaagacatactcgcagtattctcacttttcaataagattcccaactccgacgagccagttctctcagataatagttgacatttaaatgatattaacagttgaagatcgcctcgtcaccaaaaactacaattgtcagatagggtgttatgtttttcagagtaaaagcgacgtgatttacattatcaaccttggaaagaaataggaaacgctccatctcgctatcaaggttaccgctgctctattcccagcaagacatcccagaacgatacggtttgcaatgtatttaatacacatttattttgacctagtaaaagcagactaatcacagttgtgtgatattcaaataataaccgcatttattttacgtgatatgtaatcatatcccatgatttcagggaataatcgttgtaaagatatcaatcaactcagtaattaactgtctactatgtaattataaatagaggcaagatagactgataaagggacaaaaaattcataagaaaaaaggccctagaacaatatcagaaatctaataagatt

SEQ ID NO: 297422 - DNA, 3553 bp, Cannabis indica
gtgactttttttaaataaaaaaaataacaaattattaggtgttgccacgtaaagggtcagcatccatatagttagttaaacctaaatataagctcttcaaagtgctgaacactcgtgtctgcagaattattcagggatgtaattttttcttgagaaagtttgattcttctaggcagatcaccaaatttgttgcaatgccactgctgaagattagtggcacaagaggtcagattttgttgtaattgagacataggatcagagttagaattttgccaagcttgagagataatttggaggcagttgtcttcattcaaccacagtttctcaaatttgaacctagacttaaacttaggaggggaatgtggtgagttcaagtgcgaaatggaaacttgtaatgctctttgatccaagccgaagaagtccaaatgagtgacagttggaatgttaaaagttgactcccaaggttgattaataaaaccataatccaatcattcttttacattagcactatgtctgttcttgttatgccgagtaaatctctctcccaaataattcaactcatgtaaaccacagtaatcaatggtgtttcgaaaggcatctatttgagtttctaggcgcaatgggccacccagtttgtcattatgaaaaaaaatctcattaaaatctcccaaaacaatcatcgggagcggaggagtagtgtctcttagttttttcaatagctaccatgtaacatgtctttgagaagcattaggggcaccatagaagccagagaagtgagttgtagggccatcggcaagagacaagtaacaatcaacaaagtttattccataattaaggatagttacatttacattagttttccacattaataaaagaccccaactaagacctaccctaggaacttcaagaccattaggaaaattaaaagcattgcgaaatctagtaatagagcctatactaagtttagattccattataaatattacattgggattatgagaagagatgagcagacgaagttgacagaatgctcatgggttgctcaagccccgagcattccaactaacaatattcatggtgattggcaaggctgaacatcagccttcgccaaagaagcatcccttctatcatccattcgagaatgttcatcctttttagcaaatgggtcgggaagttgatgcagcaagttgttagtgaagtcagataaaggagaacccctagttcgacatcgtttgagtacatttcggacattacctcccgttgtaagagaggacattctgttctcattagtaacctcggcaatattatgaacaatgttagaacagctagaagatgcaggggaatgtgcaacaatatccacactagaaactacagaagatactactatggcagcagccattttaacattgaattatggggcatgtgaacataagcagggggagttgcaattggcaaagcaaccgaatgcagcatagaagcaggagcagatgtactcgatgatggagaatcaatcaccactttgttagaagggcacacctctttgtatgaaccagtcggttgatcagcatgaaggtcttgacagatgaaagattaatggattttgttatggtggaatccatggtgaggtgtttatccatatctgaattgcttgatgaagatccaagttgataaaaatgcttaacggtggagccaagtttggtagcaggattcttatcattgggaacttccaaaacttctttacccttctcagaatttgtgatcagtgaaggtaatgcaggaaattggttcggatgttgaattattagggcaatagacttacgagcaagtctagtgatgaatggccaagggcctgctttggaaaaatcttgcctatagctatcataggaagatctcggcagtgaagatccttccatccacgggccataagggagttcatggctctatcccttcatcttatttttccaaaagttgaggacatctatcaaagacattccaattatgccgcactcatagcagaagtctggtaacctctcgtaacgatagtcaagccacagttcatctttcatccatggaaaagtaactaactgaccccaaagaagaggcttagaaacatcaatgccgactctcattcgaaggaagggaccccatccttcgttgagtgaatcttcatgaacttcaatgaaagtaccaataagattatcaagaagcttagtaagagcctctgatttgctaagaaacgggagacggtaaacttgaatccaaaatggtgtaatagtgtaagagtcaattggattattttgtagaacatttgggagacaaaggatcatgtgttgattatggaagtgccatggctctttggagagaacacgtcttaagtctccttcacatccaaaggttatagtgaaggaatcagtagccggatcatagtcggaaataatgacagcaaacctaccaacccattgagtagtgatgaagttcttgaaattttttggattgaagcctttttttgaataaattctgcaaaaaaccttatttacgacaggggggaggtggtgggatattaatgttggtaatatttatgacttctctttcgcttatagaaagggcattagagatgctaggaatgaagttatccataagaagatcaaagaaagagaggaggagatgaagatggaaggcggagcagggaggaagagaggaggcgggaacaataatattttaaaaaagaagaaaaaacgatagaacaaaggggaggttaagatcaaggaacagttaaaaagagaaaagggaaaacaaactgccacagagcaatgtgaagggcagacaaagctcagaacaacgtgagttaatatattttacatcaaattaaacatttttttaaatatattaatttttttttcttcttttgaatttattattttttgctttatttgttttaattttttgttgaaaacatgaaacaacaataatatattgtattttgttgttagttatgtgaagaaaaaaatatattttttaataaaatttaaataattattattaaaaagtaaccaatttaaaatttgtgaagtagatttgatttattatacgaatttaattggatccaaaatataaaatcttcatttagtgcgaatcaaatacattatgagtaaaatagtacggattaaattggatgaacattttaaaaaattatactgagacgatcttttatactacaaattttttaaaattgtataagttagatatttctggtataaattcttaaccacttaggagttatctaattcaaatatgatagtaaaactcttattagttattacaatgctaaaaagcaataatgaatgggaaatttgaaaaaatatgcataaaataccttaaaattttctccctaatctaatacattttaaaatttaaaaaatatgaccactttacaataaactcaaaaatacccctctcattttcaaacctcaactctctctcttcctctatctctctcggttgttctctcaccatttcaccctcaccaaccctttcctttttttttttatttttt

SEQ ID NO: 297423 - DNA, 3670 bp, Cannabis indica
tttctattggtgttgaataatgtgatatatatactaaatatgtttctaaatcaagcttggaaaacttagttttgattcataattaaaagatggtatggtgactcattctagtttggttgggataatcaggtaaagcaaaaaaatggaatgaagggagggaaggaaggaaggagaagaagagtaatatgtgtatttctgaaacgggagaaccacagaacaattttgtcattgtaccactttgaagataaaatcttggttggaaaagcaggaaagaaaataaattaaaaaaaacaaaacaatgagagcttgaactaaaagagttggaagaagaaaaaggaaaaaaatgcatctgctggttgtttttttatttcaggcatatgctcttagaagaaaagagtacttcacacactcatatatgcatgcagcttaataggtttgataatataatttatattattagagcttgaagaagtttgtacttgtagtcacctacttctgtatcttatatatcatcatcatcatcatcttcatctctctgtattgtgaatattgtaggcatgactatgctactttgcttatgtgatatatatataattataataataataataatataaattcccaggttttaaaccaggctcacaaatggtattactatctcttctcttctcttctgtcttcatttattactcttttgtcattgtgtaaagtttactctcctatatcaccatccataattgccctcttattatggtcaccacatgttattgcatctttgtcagtatcaccatctatgctattaaatatatatatacacacacattagaatgaaaaattttcaagagttttattatagtaaatttgagtggtgtgataaaaccacccaactcatcattcatactcaaatctcaattggggtcccctcttaaaaaaataatgatgggttttgaccactgtcttatttgagttttgaggtactatattcatacaatatatatttaatttttcatcaacttgattaggcataatactttcaagttggtgattatttaaagttgaattaggcataataacctaggctattatcatatatatatatatatgagcaattggaagacaccaatcatgactctgtacccccaatatagagcatcttatgtgtgtgaaaatcaaatgtttgtcttaaaatgaatggagggtagttgagttgtataaaataaaaaccaattcatgtgattgtgtttaacatttacaaaaagcatatgttcttttattttatgatgatgatgatgatttaggggtatggaccagcttggtttttagtaagcttttgtccactttaatttctggaacttactacctgttttgcaatgttcttagggtacccaaaataacccaaaaagtttgcttatttgcaattttatccgacacccaaaaatgtcacttgtttaatttattattattattattattattattaatttttgtttttcttttcatttaaaaaagttggaaccaagataagggtcggtgagaaactttattcccttagcccttgtaaacttttattattgtctcttataagagtagtagtatgtatgtatatatactacaaaacaagcatagtgattttatttatttggttgtagaaaaaagatggttttctttgttcaaacaatattattattattattattatttttcatgattcatatccagaaaacacaaacaatatatatatagttctagaagaaggtagtgagtgagtgagtgaggacagagtgtgagaagagatttgtttaattatttatttaataatggaagagagttcaagctggttccagatctcatttggtaattaatataaataaattaagtagaaaaagaaaaatagtgttgaaatatcttaattttgattgggagaattattattattattattattattattattattattattattattattattattataatatgagttaattagctgtgtctgcctatacctttatctgtttctcacatgagagagataccttagctttgcatgctcacaattcaaattctctaatgcacgtgaatttttaatgtgtacacactcacaagttcacaacatatttataaatatatatacatgtgtacttttaattgcttattaagaaaatttaagtttttaagttaattttttttttacctaactagaaaaatcttttagaattgttgtggaaaaaaaattatgaaaaaaaaatttcagcaaaaaaattataaacaaaatttgttggacttaaatattttgtatataaacatttttttaatataatataaaaagaaataatttttatttttttatttaagtagtaaaattaggtataaaaatttaaatttctcttttattattcgtcattttatcaaaatttaatagtttagtatttttaaaattaatatttatagttaaatttattttatatatatacacatacattactcattgtttaatctattattgacttttttttttattgtataaggcaatcctagatattgaaggctaatttattattgaggcaaatgaatatttcaattgaaacaatgaagcaaaatagttgattggttttatttatatatctaactttttttttacttagttttggaccattgataatttatggatctcacttttgttggaaatcagctaaacttatattttttttttcatagggttggtttgtggtccaaatttggtggtaaattaaatgcccttttcctcaacaaaatttaatgcaatttttcatttttgaataaatatttaatgcaattttgatcattcaccttacttttttttgaagtcaatgtctaaagcctaatcatttcaatcttattttcttagtgcctaaataagacatcaataataataataaccacctactgacagcttgggaatttttttttttttttttttatgttcaattattagttatacatatatatatatatactatttttcttacctctctttcattttactaaggaactcttcaagtcactttctttttttaagttttaggttaatctaatgactttattaccatataaaaaggttgtgtaactaagggtggatttcatttaatatagctttgaattgaagcctatttttttttcttttttcatatcattcattaaggcattatttagacaaacttttagaatcacccatcaaagtaaatttttactttttgatggtttctttatagaaaaagagagtgaatttacttttatagattgtagttctttttttttttttgaaagtactaccattaaatatgttatccactaaccattaggaaaacaatgtagtgaaaaagagtatcatcatctatgtttttgtatgagcttgttagctttacttaataaagaagagaaatgttaaaaggcaccagtggtgccaagcaccctcctacgtgttaatatcgatattggtgtaatttagtatcaggtcccatatagtttaatataataacttttaaggagtatcgctagcaaatcataagacgacacgtcttaagggtgctaggcactactggtgcccaatagcaatgctcaataaaaaaaatgctaaatgacactaatatgtgaataatactattagaggcgcgtttaaaagtaa

SEQ ID NO: 297424 - DNA, 1025 bp, Cannabis indica
aaaaataataaaaataaaataaacactatgcttttaattagaccaatgatttcttcttaaaacatcgctagtaattaataataaaagtaaagttattaattaatggacctagatataccttaccacgtaacttttaatggacacaaaaagcatgccactttaacactcaaaaaggattatatatttggttgtataataactactttaaaatcaataatagtatttactatattccttatatatatacatgtgtttattcgtaaattaataaatacaatataatcccaagtcagcataaaggaaaaacatgaattcggaaaaatagaaaacactaaatagaaagaagtcgtgaaaatgatttcatataatcatatgagctttttgtggtatagacgttctccgaataaaaaagtctctccaagcattattttttagaaaaattgttcactcgcggttgccaatcaacgaaaaagaattatgtggaatgatagttaagtccgaaaaagagagttgtgagatgactatcacatccactccgggtccagttttcaggatagttatcctttctctagaagaagttccaactggctagttgttactcttagaatggtagatccgaatagccgactatagcagactttatcctattcgaaagcgtcttcaacaagtatcctataacttggttcgtgagtccggaagcttatatatattcccagaggctctgatgcttaagctgacgtggagacctcactcaaagacgagttggttaagttagttatttctaactagcttaataatctcgtttcttgtagccaccgactttaggatcttgatcctaagcctatatataccaccttgacattgttatttcgaaaaaaaaaaaagaagtttaagaactcaaagagatgagaatgagagtttgagagagaaaaaattgagaggtagagagaggtgcatagaaagaaagagagattaggcttaagttttgtaagaagaatcttttatagatgaagaagattcttggg

SEQ ID NO: 297425 - DNA, 2569 bp, Cannabis indica
ttagaatttttaaattttattttgtataataattagtgtttaccgaaattttcaaaaactgattaatgagagcttaaggaaataaaaataaaaaaaataatagacaaatgaattttttacgtggttcggacgttaataatccctagtccacgagtccgttgtactagccttgccggcatgtgttaagtattacaagtgtttacagtatgagctctgtattcctcttgttcctcttgaagaagaagcttgtaggaattttggcagatgttttctaagaaaaaaattgttcaccccttacacatgaaaagtagaggtatttataggtacacatgtgggtaaaggcataccctttacccacctaccatttacccacctagggtttcttactcagcatgtaaaaaaagcaaataccacaacaggacaatcagactgctagtttggtaggtagcttttacatcatgtggtgcacgaccattgcaaggcatttcgtaagagcatcgacacatgttgtttaaaggtttctccttaaaagtggttgcctagacaagtcattggataataagcactatagaagcatgtatgcgcactaccacagtctgatgcaggggacaaaatctaatttggtgtcagaagataaacaagtttcgggtttaactctggattaggcattatggagttccagggaggtctggctaagaccttcctggactagctaattcgctaccatcctagaacgtgtgagactctcgttcacttccagtagcggtaggatcgatgagaattctagaatcacttctatctttgctcgagaggcattcttctggatattatagcaccttccataaccttgataagggataacaatatctaatctaatgtggtagcctccgtgattttcacgtaccattcattcggggatagggataacatttaccctctaagctcccatgacttaagagtgtcgggagcttgcagtcttctcccgaatgctaaaatcatgtctctaactcgctgactaagcatattgatatggaaggaatctttcatagcacattgggtacccgaaaggttaccatgctttgtgatatgactgatgacttgttgaagcgtggtgcttaatcagtggagtcgtgaaactcacactctgtattttaggtgcatttctcgagggaaacgagtgacagttgttttgaaaagacgtcaggccttaggtacattggggaggcttccacaaaatgatgattaataaacactttattctcttacttcagacgcattaaattccaacctttcatatccccaacctttggatggcgtagcccttgatcaattcaatctggaccgtatatttcaaaaatgtttgaaccgttgccgctcgtataaataggggtcttgacgattgaaaacattttcttttcctattttactagtaaccctttgcctagagaaaactcttctctgacgaacctcttgcccaaaaattttagccccttcacatctcactcaaccaaaacgaaaccccttctttctcaactttgtcgttgtatttctttgacgtccatcgtcttctcaaactatcttgttgtcggagctaggggaggcaccattgccaaataagcattgaaattataaaggaacaactatcgtcttcgctcctaaatcgtttcacaagtaagtattcctccaatttaaactgttttttcaggacttaattgaaaattttcccatatgtttgggttgagatgcatgcttgttatttgggattttttgatttagaggattaagccaaatatttttgagctagcagtattctcttgagtaattcctctttgatttattatgcgttcacattttgtcaggattattttaccaagatctaaatttactaacatgtatgttatttaacaccctaaatatgaaatctctaaaacaatggaattaaacacatataaagttgagaaaccttacattgattgcaatggaataatatgtctccttctactcttatctctaacccttgttcttttctgtcgcagagtattatcaagatctgagcctgattttccttcaagtgttagattcttcacagtcttacacacaatgattgagtacttgacttgttatgggtgggcatgtattctttcactataggactcgaaatttatgaagagaaagagaggaagattcgaattctattgaaggaggctctcaatttctagttatctgacaaagaatgaaaactaggttaacttaggttggatgagaatgagaaccatcttattccttatataggatttcttctagggttagatttaaattacatggcattaaaaatatgataaataaaatttcacccttaagtggtcggctacacaatgtaggccccactagttacaattttgtcattttattcaataatttaacttttctttcacaactgccatattttctaatttcaatcctttaaatgtcaaaactatatatatttaataattaaaattaattatcaaataaaattagcgtttaacttatttattaattagacataataagtctcttaattaacaaa

SEQ ID NO: 297426 - DNA, 1947 bp, Cannabis indica
tactagggtgacttttccttccctagacattaggctctggtacctgagcacggtgtctattatcctgcttgactctactttgcaaatagattagacgatctagccctggggcatggatgaccttttctttttgcaagagtgggatgcctgtatttttgttgttccatggagcattttgcacaggccttggtggatagtttttcttcaagggcttagccatttcgaccttccctttgttgtttgctagattagagggtccaaccctaggatcgttaaactttcctgctggtgggttttcggcgttgaggttcccctttgctaccattttttatagctgtaagagggtttcttttatttcgtaggtagcttcttgctgctccgccatttgccttgttgatcaaagactacttaccttaatctcaccacctataggtcctcatcgtagtattcctcttcatagttttttttcataatctttgccagagtcttcccgctggtcctcgccatagccttcctattcatctttgttgatgagagttatccacatttttatcctgttgctagtctttccaaggagttcaactacacacttctgacatctccacgtcccctacgatgctcgacttagcatctatcgaagggggtcagtttgactcgtcgttagtgacagcatcttcacggtcttaataacgcctggcttgacagttgtgtttctagttgcagccattattattgatttcaacaacggagaatactttccttaagtctcaataaaagtaccaaaaaatgtacagagatttttggacaataaattaattctaaattaagcaaaggaaaaatgatcaaatgtaaagaagaagaggatttttacgtggttgaggcattaataagcctccatcatcaagtcaaatattattaagccctttggctatggagtgttttacacaagattattcttgccaaatttttacagagtttctagccaaagttcgatattctttgcatgcagggataaagccatatttgtaggtaaacctggtttctcaggtgaacccggacatgtaagggttttgtacatgaaataagcccactgatggtgtaaaatacattataatattgactttgggatgggtaggggttggtgaggctcaattgagggataattgtcattcgtataacatagtatcgtctgatgttgacaggtgttcatgcatcgctgattctgtacaataaatatcagagtagtggagtcaaaaaaaaaaaggaaggtttctttttatgttgtgcgattttcctaggtctcacttaggggacaaactcctaactttttgggattctatgttagaggtgtgccacgccagatcgatcccagaggatcaacctccacaacacgccttagactacccttctgggataccatggggcattcgattatgctttttcaaacacttggtaatttggtcgagtcagaactttggattcatccatccggatctacccgtaactgagtcttgattgaatttagaccactcgtttgacttcattcttagactggtcttctatctatttgggccttaagaatgggcccataaattgatttgagacactagatgtacacgtgtcacctatttaaaaacgcggataacacttcctttacctctcaatttctactcctagtcgaaccccaaacccaagactcatcgcgacgaccaccactcagtcaaaacccacaacatgcataaccattattgagcaccgccaatgttgacccatgtagagtgtcgccaaagttaaacaccaccaactccaacttacgctggtagatagatgattagatattaaagaacatagagggaggaagcaagggatcttgagataaggagaagagagatttgttggaatttattttaccaggatcttagatctactcacaagtatgttgattaa

SEQ ID NO: 297427 - DNA, 3824 bp, Cannabis indica
ttaatctaaaattaatactaaaaataacttaacagaggcaaagttaactaatagcctatctagcctactcactctagtatctcaaaaggaatgataaatctagaattcaactttctttttattttttttctaaatctatgtatccctttcataggcaatagttagagaaatacatagtctcgcacttggaactcaatatccctacgcttcggatcaacatagcttttttgttaactttgtgaggtaagcgtacgagattgaatcttttcaatggcttcactggtcctctacaccaatttaggtccattgtatcatctctcaccagtttcatcctagtgaaaaggtgatcgaccttttataccgtagaacatctcataaggtgacataccaatggtactctggtaagtgttattatatgagaactcaaataagggtagaaatttattctcggaaccctcaaaatctatcacgcatgccagcaaaaggtctttcaatatctgaatagttctctcaaactgaccattcatctgaggatgaaaagctgtattgaatttcaacttggttcccatgtctttttgtaaaatttcccagaatttagaagtaaatttggaatcacaatctgaagcaatcaaattcggggcaccatggagtcaaactatttttttgatgtacaaatcgacatattgatccacaatataggttacccacataggcagaaagtgtgctgacttggtgaatacatccactatcaccgatatagaatcatatagttcggtggtcttaggtaaccctactacaaagtccatgattatgtcttgttgcttccattcaggcactctcaaaggctgaagctaacctgttggtctttggtgttctacttttacctgcggacaggtcaagcacttcgaaacatactcaacaatgtcacttttcattctcgtgcaccagtatagtgccttaacattatgatacatcttcgttgttctcaagtgtaaggaatatggggtggtataaaactcatcaaggattattcctctggatcagatcatctattagaacacaaaccctatctttataccttaataatccattcagtattatagtgaaatcctttataatacctacctcaactttcttcccgaggtcaatcaattctggatcactctggttggcaacctttatcctttttagcaaatcaaattgtaatgtattattagtcagtttcccgaccccaaactcaattcttgctctggttatatcttcaactaacttcggagagatttccttcagccataaacatgccgtggaccttttcgactaattgcatctgccaccacatttaccttgccgggatggtagaggattttatagtcatattctttggcaacctctaaccatcgttgatgcctcatgttcaggtccttctgagtgaagaagcatttcaaactcttatgattagtctaaatctcacactttttcgccatatagatagtgacaccaaactttcagggcaaaaactaccactaccaattctatatcatgattgaaatagcgtttttcatattccttcaattccctagaggcataggcaataaccttccctaactgcattaacacacagcccaatccattcttcgaggcatcagagtatatcatacacttcttatcactggttgtcaaactcaaaatcgatgcagtaattaatctctcttttaactcttggaagctgttttcacatttgtcaatccacacaaactaaaaatattttgggtcagctcagtaaaaggagtagaaatcttggcaaaaccttctacaaatctcctgtagtacccaaccaaccctaagaaacttttgacctcggctgctaatttaggtcgtggccaatcctaaacagcttcaatcttggctggatctaccagaatttcgtatttcgtaaacttagtgtaaagtttatgctcttagagatgttgtaataccatgcagatgtgttgtccatgggcttcctctaactctgaataaactaggatatcattaataaacacactcacaaaattgtcaagaaagtccttgaacactcaatacatcaagtccatgaattctgctggtgtattagtcataccgaaggacatcactagaaaatcattttgatcatatcgacagtgaaaagcagtcttgggaatattcttttcccaaatcctcaattggtggtaactagattgaagatcaatcttggagaagatgatgtttctgtgcaactgatcaaacaaattatctatccttagcaaaggatatttgttctttactgtcaagttgtttaagtcttgataatcaatgcatattcacagtgacccgcccttcctcttaacaaaaaaactagtgctccccaagaataagtactaggtctcgtaaactacagattgagcatatattgtaactggattttcaattcctttaattctatcaatgcccctagtatcagctcaattttgaaatcaacctatctctttggttgcaactttggtaactctttcggaaacacatctgggaattcacacactactcaaactttcttcggtcgcattagtatatccttcgtgctatttattacactagacaggtattacttacatctttcccaacaattcactagtcttgagtatagatataattggaatctaggatccctgaatcttttccataacaaagcagggtttcacgctctgattcaaatgtcagcatctttctcttacaaaccagcccatctttagaatcgcattgaagtcctctaagtctagttcaatcagatccactaacattcttttccttctaccattactggaagagatctaacccgcctcctggagattactacttctctagtaggcaacaaggtatcgaatcaactagatataacatcacacggtctacttaaattctcaatgactatactcaaaatatacagatgtgtagcatccaaatcaatcaatatggcaaacataataccaccaatagaaatctcacctgtaacagtagaatgaaaagcctctacatctgcctaggttaaagtaaatacccaagtaggaaccataggcctctctttcttgatttcagtcttttgtaactgcgggttgctatttcttaaatggcctactactccgcattagaagcaggctctagcccaatattcgcccaaatggtgtctcttacattttggacatttagggtaggatggccaactcttgttctgcctcgacggaaaccctagttaccctaaaatatttttttaaacccataactagtggttcatttggcttcctctttcgatcattggggttagggcccctaatcattctagtaccgagtggcttcttccacacatctcttctctgattgctccttttacaaatcaaaccttcaaccacctcagtagcgagagctaagtttacaatcttaggatacgtccttataaccgatggttgtttggctgccataataacatttctagaaatatattcttccaaacctctaatgaatttggcttttcgtgcagcttttgtggccacttcatcagaagcaaacttggccaacctgtcaaacttggtattataattagtcacagtcatgctaactaaccttacaaactcctctgctggggaggcactgatggactcattattatacttctcataaaatattgtttagaatatatcccaagtcatggtatttagatcatgagcctgggatacaatctccaaccatattcgggcatcatcacgcaacatgtatacaacagatcaaaccctgttactgttgggttttatgcc

SEQ ID NO: 297428 - DNA, 2968 bp, Cannabis indica
tacctgtatgcattgctagtatagtactcggtcacgaatccaatgataagtccagcccacaaaccaacacccacacacaaaaataattgcctgcaaaaccagaataatgtcaacaagtgaaagaaacactacactgtctacaaattgaaagaagccaaatcattaccagttctttactactttctgggttccaaaattgaaaattgtgaaggatgttggaagggcaatccaactaacaattgcaattgcaacagtcataagtacagtggagatgataagctgcttcttcaaagctggttcaatttcattgacagccttgatctcaaagaaatcagtcgcaaagagggttgtgatcaagcaaacaagaattcctgtagaactgattaggagagggtaagacattgcagtgaaatcgtgggtgataccgaaagatgagatggaagcaacaacaagagcagcacaagatgcttcagcatatgaaccgaaaagatcagaccccattccagcaatatctccaacattatcaccaacattgtcagcaattacctgaagagaaaaacaaaccaaaaagtataaggaaaaggaaccaggagaaattaattgaacattgaactcgaaagaaatatgatattgcttacagctgggtttcttgggtcatcctcaggaatgttcctctcaaccttccccactaaatcagcaccaacatcagcagccttggtgtagataccaccaccaactctaccaaacaaagccatggaagaaccaccaagaccataaccagtaatagcctcaaaaagaccttcccaatcatcaccatagtacaatctaaacagattgattgtaatgtaaagcaccaaaagaccattggcagcaagaagaaaacccatcactgcaccagacctaaatgcaacaataaaggcttttccaactccctttcttgcttccaatgttgtccttgcattggcataggttgcaatcttcatcccaaggaaaccagagaggactgaggtaacagcacccagcacgaaagacacagtactgaagagtgcagtggcaagtgctggcttgcaagtcttttccttatcataagtgcaagccttactcttagtgctgaagccctcaacagaaccaagaaagacgaagattaagattgcaaaagcaaccatgaaaaccccaacatactgatacatggtaaatagaaatgaagtggaacctgttacattcaatcagagcaaagttcatgagtaaacaattggaaaaagaagtgacaatgccataatatcactaccactatatgaacaatcatacaatgtccaagacagtaaattaggaaataggtaatgcaaagaagtaggcactgcaaaacaagttgtttatacagctgggagaatatacagctgggagatttcaacttcctctccatttcaatagtacttaaaagacaagttgtttatcatcatgaaaaaagaaaaactatgcttgagaatagccaaatttaaaaatgtcaaccacatgtaaaagctaaagttattactcaatactacatgcagaagtagatttttattttatttatttttttaaaaaaaaaaacatagtttttctttatcaaacttttagaagttaatgaaaaagaattattaacaacacattgtgtttctgtttattgaaaattccacagaattattacaccatattcctacaaaagtgcaaattcagagcagcaagaaaaagaaataaagatataatttaatcagcagatcactgaaaaagctacttccaaaacaaatgaaacactacccaaaaaaaatatataaaaatatcatagcaatactctcaaatcaatagtacacatgccagctgccacccatataagatgacatctcgcacgtgtactgaacactcaccaatactcacagacagtagccatattctaaattatatcataaattgaacaccagaaagtgaaaataccaatttgcataagacgaaaacattaactgcgttaataataccaacaacaacatcacgataaagattaaatttttaattcgctgagactgaaaagcgctcccttttttgttcttgacaaaggctagatccacataaagtaaacagaagaaactctataataataaaataaacatataaacaaatcagaaccctgtcttctgctcagattaaaccctagaacctttgtaataaaaactattctcctatgctattggaccgacaaatgcctccaagagtaaaggtgcagagagaaaaggctaccgctactgggactttcaccccctaaaaccagcttaagaggttagatttaggtttcaaaactttcgcactggcaaatcaactgaacataaaaagggaaaactaaagattcaaactttcgttttgttttcccttaaaccaaacaaatcatatgtctccaatatttttggagaaacaaatatcaaaaaaaatgaaaaggtaaaaagaaaaaacaaaactttcagatctaaaaaaaattgaagcttacgatctaaaactcaaatctctaccttcagaaatggcattctgtatttcggcacacttaaggacgacgttgtggtcgttgagaccttcttcctcttcaatgaggtaatcattgtagccattcttgttactgttaggacccgatgacgacgggttgcgctccggcgtaaccttcacgcgagaaacgaggaaccactgcgcgagcgagaatacgatcccaatgacagcgcaaatcgggatcacgatctccgtcccaagttcagaaagaaccgtactccccatcctcgccggaaccctagctcgaccggtaatccgtcgccgggaaatacagagagagcttcaaacgcttatagaagagagaaaagagtgtgaagtgagtagaaaatctgcaaggcctatcgctcgatttatattctaaaactcttattataattattattctatttatttattttat

SEQ ID NO: 297429 - DNA, 1486 bp, Cannabis indica
acgatcgggaaggagtttccctttgtccttgctgagtttaaggttaggttccattggagcggaagctggtttagctccaaggtaacccgtgtcagcaaggagttgtagagtgaaaggtctttgggaaattgatataccttgctttgttcttcctatttctaatgcgaggaagaaacgaagtgatccaatatctttaagtgtaaaattttgtccagaaattgtttgaagtgagtgatggcttccttgttattgctagccacaataatgtcatcgacatatattagtacagcaagtaagaatgtagatgttttttttttgatgaatagggaattatctgaaagggattggtgaaatccaacagatttgagtgtggtacttaatttttagtaccattgtctagaagcttgtttaaggtcgtatatgctcttgttgagtttacaaacagagtttggggggccttgtaacccaaagggattttcatgtagacctcttcaaggagatcaccatgtaggaaagcgttgttgatgtcaatttggtgaacatcccaattgtacattgcagctagtgcaagaaatattttaagggtattgaatttagccatgggggcatatgtttgatcatagtctataccttgttttttattgaatcctttagctacaagatgagctttgaatctaacaacttcaccttattcattgtacttgattttgtagacccatttgcatccaatggctttgtgaccaggaggcaatttggtgacagtccaagctttgtttttttcaagtgcttcagtttcactatccatggccttaagccaatgtgtgaattgtgaagcttctgaataagaatgaggttcaatttgagagtaagctgccaaaacagcagctctaaattgagggcttagtttggcataggatatgaattgttcaataggatagactgtagatgttctgtgacaggcatagtctgttaaaagtttgagttttgtgatatgtctaccaactctggattgaggaggtgatgtgttagctgaagtggcaggtatggcttcagtaacctgtggagtttcagcagaaagagttgggatttgttctgtacaaatggtgtctggtgtgggacaaacatcagaactgctatcaatcgagttgtgcacatcagaattctctttgcgtgcttgatcattaacatgataagatattgtggaattatttaagggtgagtgattgtcaccaggggttgttgctggtgtgagagaagcactaaaatcatctataatcaattggttaatgccaagataagtatgtggtgtgggaaaggcgccaggttttttgttggatgtgttggcccgagtgagtggctcaaacataggtgtttatgagggaatgaaaaaactggttaatgtcagtagcagattgctgaccagttttggggaagatgttctcataaaaaattacatctcgagattgatatatttgttggaaattat

SEQ ID NO: 297430 - DNA, 4108 bp, Cannabis indica
aaaaagcccctaaatataacttatttgcataattaaaatataaatataaaattgcaaatttaaaacaaatttattataatttatcactacaaaaattaagattttttttttgagagaataaaataaaaatataagaaatatttaactagaaaaactaataaatacttttttagaataaaataaaaaaacaattaaataattaaagaaaacaaactaccggtacctaaaataaaaaaagcatgtgaatgttgatcttatgtgccccttgtgtaatatggacgttgagacgatttttcatgtcctcttgggctgccaattttcgatctcttgctggttttttttctgcagtaacacatccagctggtgtgtttactgattttgcctgctggttttttgatctgcttgagagcagttcggtggaggttgttgtcgaggctgccatgctcagttggagcatatggaaaactcgaaatgaagtgcaatggcagcggaaaaccaaatttgttttggaggttgttcagtcagcaaaacaggtccttaaccatcggaaaattgctaaatttcagtcgcctactgctatgtatgctactggtgactcttcaatcagcaatagatggcgtaaaccagatgctactacggttaaggtaaatgtcgatggggccatttttgaaactcaacaaaaatttgggtttggttgtattgctcgtgacaaccatggtaaactaatggaagctatttctgaaagtagatggggttatgttcttcctgaaatagcgaaggttattgggatcaaggaggctttgagttggataaagacgaaaggttgggacaaggtggttgtcgaatctgatgctttagttgtggttcaagcaattaatagctcagttcatatgccatcccaatttggattattggtggaggaccgtcgttctattttattatctttgaataatgtccttgtttcttttgttaatcgacctgcaaatagggctgcccatagtattgatagggagtcttgtttctcgtcaggttgtacttataatgagctaaatgctctgtcttttttgtgtgacattgttatgactgatgctagctcttaatgaaatcattcattttcaaaaaaataaataataaataagtaaattatttttttgcatttccaaagtagtgataattaacaatttcaaaactaacagaatttctgtagttaacttgaaataaataaaatggacaaatgtcaaatttttattgttggaacaacaatgagatagggagtttgagacatgtgatttttatccctaatatatcttaactacttattaagaatttttttaggattataatgattccttctatagttgtttaggagttgaaattaaattcttttgtaaaaatggtttgtatatacgttatgatacgataagagaggtgttttgcaaaagcaatggaaagttaagttctttaaaaggaaaaaaagaagtgaaaatgcgaatgattgtaacaggaaacacagtacgcagcaattagagattgaatgctgaaagcgaacgcaaaacagtatctaacaacacaaaattaaacacttagcgtaattagtctcactggtcaattggttgctgagaagtcataggaaaacgacttgggattaccaaaatcaccacaaataatccaataccacctttattgggtgactcatctttgcctatgctttcttccctcttattctatcgccggttttagtgttaatttttaaacaacacactcttgctatcccaagaaatcacttagcgtataagcttcatctaattgttttttctttgaataacaaacagccactacctcccactttcagccattcattaatattaaattacatatttcaaaagacaatattgttctttaatttggacctacttttcttcctaattagcttttcacgattttcggaaaatttgactgaacaacttttcaattgtatgaacttagaaaataagcactgaatggaaaaccttacctaagaaggttacagctgaaatgggatgtatattgtcaattgtaaacaagcttggtgtttttggtgaaccttaccaaagccaattcatagtccaaacgatactaatattggatgttctttatgattctcccattgatgatatcatatgatcctacatgtttaacaacagtgtcacaggactctgtatgtaccataatcaattgtcagaaacctatttgccaataacatagaaaatggagggtgaaatgcaactgtctttacattttaagttttgctttaaatatgtatactaaaaacgaaataaatttccaccccaattgaaaaatataataaattaaaaaataccaaaacaaataaactgaggaaagaaagtcctccaacgacaaaacagttgttgtcgtcggggcattacaacattaatggaatagctaataatttcctttccaacatcatcaatggttgggattttttatgatcctttgtagaaccacagtcctggctcgccggatgtctctactgcaaacatcagcctgaactcccaactcctcaacagtcttcataaaccctccaagcttcttcttaatctcttcaattcccactctcaaagcatcttcttcaatggtgaattcggcgtttcgcaagagagactcaatctccatctccaaacgatcaattaggactcggatattgtccaggtccttaatggcaacataagtcccaacctgcattgcactgatcacctctttctgacccttcaatgcatcttcatacttcttccaaagggagtcaatccatttccccattgaaccaatgggaatagaagtagccgcagccaaagccgccgcaacaggtggagctgccatggcagctgccaccacagagcagatcagtacggcagcaaaagtggcgacaaatatcatactcgacaccttcctccaagcatggatacatttaagcttcttgtcaagcttgtttttccggagctgcaatttctcaagcattaaagtctgttgcttataaacctcttggaatagctgaaagaactcagcagtaaaagggtctcccgcagctttgaaattcttcagctcctcaagtgttctcacatagcgactccctccttccactgtttcctcctcgaactgttggagggcaacgagaattagcaactgggtgtcacgagcacgcttcaggcacttctccaatgcagtacagaaatcaagtgtcttcaagctattctcgaagtactcctctactagctcgaacagctcttggtttttccatatgtctttcttgcattccaagataaccttgacaacttcctggttcatctccaacaggcattcggtgacctcttttagggaatcaaatgaaagggatcggacttcgactccaacggctagagtattgattacctggttggtccgagcttgaagggccgagtcaaaagtccgcaagtccgagtcaagcttgcaagctgcctcgtaggagttcaactcggttgtgtagtgaatatttgtgtggacattcatgtttgtagtggacgaagacgacgatgatgatccaggggggcccttgttcttgctcatatggcctcccatggaagcttattcggtatgcagatctattcaggaacaacagaagcagaaggtgaaatacagaaaaccagaatcaatcttcgacactagaattttgagcttgattttcctgcttatcaaccccaaagaagaggccccaaaggaaaataaagtaaaatgataccttccaagtctatacaaaaaccatcaacttcgatatcggccttgttcgccaagccagaattttcctcacagatcttagcgcaaaaagagtatattttaagaatgaaaaaagtcccacttcgccaaagctattaaatccaagcttcttcagagaaatgacttttttttttcttccttagaaatcaaagtgaaacgaatgagacccagataccaaaacgtagaaacccagctagagattaagatgagtggtaattccaagtcaaataagaagaaatgcaaaggaaattagttaagataatttagtgggtattgtttaaatatgagagagagagagaga

SEQ ID NO: 297431 - DNA, 7232 bp, Cannabis indica
gtgtaactaattgggcgacatcaccctcctttctcaagcatgcatgccattgaaattttggtgtgatgctttccttactgctgtttatctcataaacaggttgcctacaccagttttaggcaacatctcactaatcgaaactttattttctagaaaacctgactacaaacatctcaaaacctttggtgttgcatgctatccttgcctaagaccttgctaaaaacacgaatttcagtatcactctaccaaatgtacgtaaacttagggtacaatgagattttcaaaggatacaatatctgagcactgcagggatagtttacatatctaaaaatgttgtcttcaatgaaattgagtttcccttcaaacatgactttctcaataactttcatacagagaaaccagttcatgttcaacatccttgtgtcgctcaatattccagccaccacttcttagtctctaactcatcacaacaatccttctcaaacagatagagcttctaattttgacaccaatgaagcactttcaggtactgataattctaaatagggtgttcacaatgatcatgacagtaactatgtttttaaaaatattgaaattcaaagtgaaaactctggcactcatacagaagtacaagacgagtagtgtgacaatcagcgaagtcaagactaaagtattgaacatcctactactcccttagcttcagttcatcctatgatgacaaaggctaatgctagaattttcaagcctaaaacctacatgggaaaagttgcaacagttaatgaccatgaattgtctaattctctagtagaagctctggctcatgcaggctggaatagtgtaatgggagaagaggtctatgctttgaaaaagaacaaaacttgggtgttggttccaaggttgcctaatacgaacattctggggaacaaatgggtgtatagaatcaagctgaactcttgtggatcacttcaaaggttcaaagcaagattagttgctaaaagcttcaatcaaagacctggtatagactatggggaaacattcagtctagttgtaaaagcttgaaccatcagaatcattctgactatagctgttgcaaaatcttgggaagttagacaactaaattggagcacttcaatacctcacacacaccagacctggcattagtttctctgtaaataacttaagtcattctcaaagctccaactaatgtctgctggtctgcagtaaagaaaatcttaagatatttgaaggacactcaagatcatggcttgcatatcaaatataatgacacattgactcatatagaattttctgatgtagattcggcctgctatcccgatgatagaaaatcagtagctggttactgtgtctattttggaggctctttagtttcatggtcatcaaagaaacaagcttttatcttcaagtcgagcactgaatccgaatatagagctcttgcttaagtagctgctgaaattttttggattcaatctctgcttcaagaagtgcaatttcctcttcaacacactccaattatctggtgtgataatatgagagctagtgcattggcttcaaatccagtctatcacactagaacaaagcacattgatttagatgtgcactttgttagagacaaagttcttgctaaagctcttgacatcagatacattcattctcacgaccaagttacagattgcttaacaaagagtttgtccaattctagatttcattttttagttgacaaactatgtgtggtttgcaccccacttaatttgagaggaggtgttagaaaatgataccattactagtaccttttgtcaattatttgtacaatcattatttgcatgatttgctaatcattgccaactatattttctttcttttcggttataggtgtcaaagtatattctttttgctttttgtgtattccaacctttttggggtgaggtctcttttctaaattgtaccattttgttgccctagtggctatttaatgaaagatagaggataattaaggctatttctgtggctttatattggtgtaaacatctcctcctacttatcatctcagattgtaacagacacaatcgtcaagaaatacacatcatccttgtttaattgatgcacttgatattacgttttcactttcttctttccctctcgatcaactactttgtagagaaagtaaattggtgtggaatggttctgcagttccatacctcttaaattcttgtactatatatataaataatatatgtaaactaaagtaagattgttttctttattttttttcgccatgtttctggactatggcgcttactcacattggcctttttattatcacaaattaatattgtccaagctatatatatttgcaaatcgaatttgtaagtttcgtgggagcatgcttttgttgtagtgatgaattatatagtaccaaatccattagtataaattctttaaaataataacaattaataccaaatttatggtagatacaatagatatgtttggtaaatataagttatatatataaaaatagctgagaaataactggggaatctaaacttaataataaaatattttagtgttcacattagcagctttactcgccaacatgtagaaagagatcaattgaggaatctaaaggttgttccaaagtaattgtttatgtttgttttataatattttatgtactgaaattggatagggtcaacaaaaagaatgtgaagagttcatatattatattgagaaagagcataaagaaaagagtgttcatggcacacgaagctgaagttttccacacgcacgttggacctaaactcataatggccacgtgttttcgagggtcaccacgggcaaactcaatttccaagctttttgtagatgagttctgtctacatagcacactcattattgataaacaagtttattagttaaaataatataagaagaaacatgacatcaactttctttggataatgactcatttcactaatttattaatagtgacgattagtttattatttagttcagaaagagacatcttcagttacagtggtcgattaaatcctacgttctttaaatagttatttgacttaatattattaagcggtaattaattaactatacagattgaattgtttataaggttctagtatatacagttttacatatatagattttaataatgattgttcatcttctgttttgtggctgagactggagagaacataattttatatattatatataggtctgtcttttacgtggtacaaaatcgatgctgggttcttataagtcaactttatttgtttttgatcttatataataattaattaatggcgctgagtccctttacaattaaactaatataataccaagttttatctgttcttagatttggaataagttcttcggtgtatagattagtgaaaactatgaaattaatatatataacatcattttcaatccttatggttaatatagtaaaatagctagctgctccgacttgttcatagaaaattaattaattaatatataattttgcgtataaaatataacaaaataaaacccccaaaattatatttatagaattaagtatagagatgattaggtaactggtgacgatttcaatcatgttcatacatatatatacatacagatgtatgcatcgatcacttatttcattgaaagtattagtcaataagtgatatcaaattaagtaacccaaccaggcagatcgaccatattacaatttataacaatacaatgttggctttttctcctcctcctccacctttgttttcaaccaataagcccaataacattgtgggatggcctttcgatgatctaacacgctttgaagaccaaaactacttgttttcagactatgatcaataccccctcttatttctcaatacttataacctccacactttaccaccaccgtccgatcaacataataatcacaatcatcaacggttcgaagttgatcgctccgctacgccatcctcatccacggccaccgccattaacagtgatctgactatggtggagaagaagcttaatcataatgctagtgagcgtgatcgaagaaagaaagtcaaccatatgtattctgctcttcgttccctacttccaccttcagatcatacggtatatatattcatttcaattacaacttttcatgtccctctaaattaatcattacttatttcaacgtttttctttttttttttttggaattagaaaaaattgagcattccggccacagtgtctcgtgtgctaaaatacgttccagagctacaggaagaagtggagagtctagttcttaaaaaggaagagctattgtcaaaaatgaattcaatgcagcaagggaaaacaattactgctactactactgctaatcaagagattaagaaagtaaaaagcatagctccaaactcattatcctctatttctgcaactcaactcagtgagaaagaaattgctgttcaaatattgtcttataaagccgacaacgacctcttgtctgaaatgttgcataattatgaaaatgaaggcctttcattactccatgcctcttcatttgagtccattggaggaaggctcttccataatttacatcttcaggtatattatatatccctctttctatatggtatacatataataattttttcgattatggaatatcgattgattagtctagatatgattgatgtatcaaaattttactttatttccttttatttatatacactctgtgtatgtattctaaataaatatgttctcatatacgttttaatttcaaaatatatacaggctgaggtatcatattgtatggaaagtgggactaccatagatgccaatcttttatcccttcatggaaataaggagaagttattggttgtgcaataactcttctagactttggatgagtatgtaaactgaaggggatctctgtatcatatgtagtcttttagtttgttaagttttgttaattagaagctgttaaaaattaaagtggttgttttagttatctaactatatatatacccgtgtattgatcttctcctatataaataacaggagtgttaatcactctattttacactcgctttaacactatacattcttgcactctttatatattctaatgacaagtttaattttttaagcaatatgcttatttataccaaataattagcataattttataattttattacatttgtaccatttaaattaaatatgttttttatcttttaattttttatcagttaaacaaaataatcattatatatttttgttcaatacaacaataaattattatttctataaaagtttacttcaaaaaccctagtttgttgagaagaccaacaagaacttgactcgtattaaagtacacaaggaagctaagagttgaacatagggtcaagattgcacaagaactctctctcaaatggcataggccactagtaccatctttttgtacaaaaatatagcactcctcacccctttagaatggaaaagggggtcttgtccaaatgtgtttctccaacaccaagtaacataaaacctttgaaagaagcaactcccaaggtgaatctcaagcaatgcgactagtgccgtcattttgcacaaaaagatggcactactcgcccaaagaaatagaggaggagaaacatggcaaaatatgtctttcaacattaagtctcataaaacaagtgaaaaaagccaccaaaagtggtggagaataccaaaacgcaatcagcagtattatctttgtgacccaaaagatggcactgctctcctatatgaaaaccattggacactttgtcaaatgtgtctttccattatcaagacaaataaagcaaatgagaaaagccaccaagttgtggtgggtggctatctgcaaccagtgccatctttgtgacctaagaaaattgctcttcctatgatgattggccattgaaaacttggtcaaatgtatcttttcaatgtcaagacatataaatcaagttagaaaggacactaaatggtcttttatgagtatatgcgaccaatgctatatttttggccaaagaaatggcactacttgcatgctagggttttgggatcccaaaataaaaaaatatatgaatcattataagaaaaaaaattaatacacactcctaagtgttaaagaacatgtatgggtaagcagggccatcttttggccaaaaagatgacactacttgcatggagcaggaatcctcaaactctgctcccaacccttcagtaaaatggctataactcactcaattcttatccaaataatgtgatgaagttacattagaaatatcttaagggagatctatgattgtctcatggtcatacaacaattcttatgttttcacttttaaaattgggtcaaaagacagattacctgatttttcttgggaattgatgagtttagtcatgtgggggccacttggaggccaatgcatgggtttttccactctccttatggcaagactctcccaaggagacccacatacgagtttttagcattttcagtggtcattgcttttcaattccattattttctaacaaacaaagttatttcagtgcatttaaaacttgcaattgaaaagaaaattttggaagacttttgaaatgtaaatatctcttaaaattatgggatattcttatatatctattttaaatgtaattattatttatggtttgtaatatattacatgatattctgaaaaatgatctcaggaacgacaattttgttcctgataacaaaacaatcgttcttgttactgtgtgaaaactaaactgctcacttcattttttagagtgactttcacatttcaggaacaactatttttcattctagatttttagcatcaagcatgttgctatattttgttcctgatattaatttttaggcatgagttatcaggaataaaacatcaggaatgactagtcgcgccaaataatctcctggaacaaattaagagattttttggaacgaaaaaagtcactcctaatgacagtttttgttgtagtgcatatcatggggatgaaccattgtaaaaatcatgtctctcattctatttcttattaacaaagttacaatttaacaatcgatataaatttgagtataatctgctcatttaacatatacttacactacaagaatgattagttttacaggcgctttacaattgatgcgcctg

SEQ ID NO: 297432 - DNA, 1874 bp, Cannabis indica
ccaaccaaacgcctcctaagggtctagaatttcctatggtttctatctaatggaacagtaaaaaggtagaataaaaatggagagaaagataggactactattcaattcaactataagtgacaacccgagcattcgagagactcagaactgtcccaagagcaatctctcaaatcaatacagttttcatgagtcccaatctcagctatgcattctcccgtataccccagatagtaaactactaactaattccatcaaaaaaaaatcgttccaacaaattatggggtctaaaaatccaatacccttctgtcatgtacccaatgcacccttcaaggtgtcattttttccttcatggacagagtattctgagttatatatcaatatgaccaaattctgcttatgtaagttcaaaattcaaacctagttgcatatttttgtattctggtaccttataaataaaactaaatgcagtagttatcctattatcttcacagaaagaacttgttaagctcatccaattatgccatagtaaaatggcagaagttctacctgaggatactttggtaaggtactcactactcaaaacttctacatgcttgtcttactattcaacatttagaagcaaagttgcaatttgatacacatctattatagtattatacttccctttcttattttatttttccaattgtcacttttgtgtaatattctaagcaagttgaacccacaacatcattaagagtgttgaatccatacttcaagccgtggcaggacactacatctagtattctgccgagtgctaataagtaaaaactaaggaattcggaaagtgaattttccaataccttgagagaggggtaactcaaagtggcagtcaaggaagtaattgatagtggtattttgaacactttgtggaaatcacatattacttttttcttagtggctttgcacatgattcaactactttattattaggagaataaattgctgaaacatgggggtgtacactctgatttcttgtaagttttcaggcttattgctttcaacttaggctatcttcctggaggtgacaaaacgctaattactgaaccacaaacaacactagaagcactgagtgttgcaaaagatattttagctcctggaggactaatcagcttagtggtctatgttggccatcctggtggctggtaataattttctctctatttgttttcatttactggattggatttatttggctcatgcatcattcatcgccattctatcaaaagctttatactttgggttgcagaatacttctagataaacaattgtttcgctttgtttttgttagggagttgttgactcaatatgcctcactcatgcttcatgttttttctgttcctcaggcaagaatgggaaactgtccaagagtttgcttctaagttatcagttgaaaattggaattgttgcaagttgcagatgctgaaccgtccaatgtctccaattgttattttgttgttcaagaaatgttgaattgttaaattcaatattgttcattgaattcaataaggttgtttcaatagcagcttttaaaatacctatacgaattcaattcattatttcaggattagatgtagaaccaagttcataattctttgtctatttctatttttttttttttgataaagaaattcaagcttatgtataatgtggctccattcatatcaatacttacactgaagagataaattataaaaaagacaaatacttacactaagtagtttacttatatattctagacatatagcacctaatctccaaataaatatttgctactaagtaattacaaagaaagttatttattagtttaccaagaaaaaactaattaagcaatt

SEQ ID NO: 297433 - DNA, 5402 bp, Cannabis indica
aaaattagacaaaagtcttcaatctcaataattcggggagaatttttagcggctaaaaaaatttaagagacacgatttagtacatgtcaaaattttggaaaaaaaattactaattagcctttaaaaaaagcttttctttttgaattccaattgtgcaaaaggcaaaaagcaacgcatagtcctgattcagctcaatgagtaacacacctgacatatacgtatatagtcaatctacctaaactaaaacttgcccaaatccgatccgtgtgcacaagggattgggctcatatactatttttaggctatgttggtagatggatagaaagagtaagaaagatgagaaagagattagtaatcatttcaagttatttggtgagagggataaatctagttgtgaaagaattgataagtatttatttattaataaaattattatgctatcgttatagtaataattttcttttgatgttatatttaatatatatttgataaccaagggttattagtttagttagttggctttagtgtgtagttagttagttaggtgatgtttggttggagataatgaaatgaaatggaatggaaaggaaacaattttcattccattcctttatttgattgcattttaaagtattagaatgatattctaatgctttttccaccattttggtaaaatgactattccatttttttttttaaaaaaaaaagtaaaaaaccaattctaatgtaacaagaaaaaatttaaatagattttttattcaatttttttttattgtattttaaattttaattccattccattcttattcttatattttctattcttcccaactcaaacgcaaccttagttcagttcttttagttaacttattttgttgcttaacagttctcttgccttataattaaacattttctaaggccataaataaagtcttaagcctctaattgaggtaagtttggccaagtttttcctgttgttctcttttctattctcctttttttcatctttttcatcgtattagagctattggcctttgtcatggcttcttatggcaacaactcgtcttcagctagtgtttctgatcctattgctcttccgcaagctatggtagctcaatattggaatcctttctcttactctctagcttcttctctcacgatcaagcttgatcatactaatttcttagcttagaaatctcaagtgcttccaacagttattggtcatgatcttgatgagatcttgctcactaatttgtctccacctcgatctctagtcaatggtgctccgaatctagttttccaataatggcgcaagaaagatcaacttcttctttcttagctttgatcctccatgatagaaggtcttcctggaacgatggctagctacaccaactcgaatgttatttcaaaagccttggaacataaattttctagtcaatcaaaggctcagttgttgcaactcaagagtcaactgtcaaacatgcacaaaggtaatcaatcgatctctaacgatgttgataagatcaaagttctcttttattctcttattgttgttggtcatctaatttctaatttcgttttgattcttcatcttttgaatggtcttggacccgagtttgattcagttgtatctggtatcatatctcgaagtgataatttgtctcttgaggaggtccaagccttgttgatgtcttatgaaactagactcgaacaacacacaaccatgatggatctttctactaagatggcaaccaatctcacttttggattaagaaatggtggatttaggccttacaacaatgctggcagaggaaaagcgaccgaatcttcatcgcaagattccctactcgaggcaataatccatcttaatccattgatctttcaatcctaacagacctttgtgtcaagtttgtatgcgatatggtcacactgctcctacttgtccctttagattcgataagaattgagtaacccctaaatccgttgttggaaatcctcaacctcaagctaatcttactgaacagtttcttgactatgagtctactacttttatagctcataatgtgcttgactttggtgatgatcaaggttggtatgttgataccggtgttactcatcacatctcttacagtaaggctcctcttgacaacatagttccttactatagtcaagaaacagtggttgttggtgatggtaagaagcttgtcatttatcatattggtaaaacttttattccttctaaaagttcctttcctctacatttaaaatttgtcttacaagttccttctatcactaaaaacatctcattagtgtttccaagcttactgatgacaatcatgtctttcttgaattttacaaaacttattgttttgttaaggacaaacaaacaggagcaattttggtcaaagggaaacttcaatatggtctccatcttcttcgtgatgatggctcaagtttgtcaaacacttatattcaatttcatttggctgagtctaattgttctttaatgtcacaacattgtaatttttgttcctgtaataaacattataatcaatgatcttgtaattccaccaatatgaacaaaacgctgctgtcttctcatatttctaatctcaatgttgttgcttataactatactctctctaatgacattaagttgtggcactgcaaatttggtcaccctgcacatgctatactctttaaaatcttaactcaatctaagattcatcattctcttaaaaacttacatttctgcaatgcttgtcaaaaagagaaaagtcacaggcttccattttccttgtctaatacttgaggtaatcaacctctataactcattcatactgatgtatgggggcaccacacattacttcaaaagaaaattacaaatactacattgtttttgttgatgatttcagtagtttttcttggatctttccaatgacagtcaagtctcaggtctttgaactttttattcaattcaaaagcttggttgaataacaattcaatttgcccataaagagttcaagctgattgtgggggtgagtataaagtttttgacaagtttctgaaagatcgaggcatatggtttcaacactcttgtcctcacactcatgaacaaaatgggagagttgaaaggaaatataggcatatcactgaaacaggtttaacccttcttgctcagtttggccttgatatgaactattggtggcatgcttttcaatgtgcaacttattcttgatggaacttattttaccaggatctagatttactaacatgtatgttgattataattctatagtctaacatcctaaatatgaatttcctaaaacagtgaaataaatacataagaaattaagaaatccttacattgatggtagcggagtaataatgactcattctattcagatctctagcccttgattcctatctgtagtaaagccttatcaatatctgacttggatcatctctccttcagtttggttagacacaatcttcttcactatgctaggtattactttgacatgagtaggcatactctcagtcaccatggacttcgaattatttagtagataagaagaataattttgaaattggaagaagaaaaagaagctctctctttattttctagttgtctgacaaaagaaactgaagtcttaagaaaataagagctatacttttctatttataggaattcattaggtttagagttagagctaaatgagctgattagaaagatccaatgacttaaaattcatgtaaagatcacttaattttaatatgaaaattagcagataattagggtttaatttggaattagacttttaattatgatttatgaatttatggagatgtatttgaattctaggtgtgttatttatgttatatataaaatttcatgttttttatattttatgctcggtaatagtggaacgcgatgtttgaccgatttagtcaaattttcttatggtttagtattttagtaatagtgagccaatttagatagacattagtaatgtcaaaaatatgggcagttttagatttgaccaaaatttcctttggtgggaaggttgcttcttgctgagacaaggggcaaaatagtcgttttgtcctttagtggaattataatgtgttttataatctgaaggttttttttattaaagttagataaacacttaattatttcatttattctaagctagaaaaataagacaagtagaaccttctctttcttcaactctctcttcctctcgatctctttggaactagcaaggaaattgaatttttcagctccatttttgattttctagcaagatcttagttaatccaatccaaggaaaaactttctagctctcttttctttgtttcttgagttttacattggagttctatgtttaattttctagttaaggttctgtagatttttgagatgtttggttttgtattcagaggatattttgagttatttgagctggttttgatctgttttgagtgttattgttgtgtttgagaaaattttgaactttaaagctcacactttgctctctcatggtgattcttgcttatggggtttttgttagttattttgcttggtttatgctctttgaggcttgaatgggtactctggaaggtttggattgatttggggtcgaattaagttgtttagaagatttttggggattcttgtaataaactggtccaccgattcagtagggcctgtaggagccgaaattctggttcgtccccaggcagaccccatgaaactggtattctggttgggaaccggtctaccagttggcgcattttagagcaccctagtttttcccattttgacgatgtttggggtattgccatgttatccatcgatatggaaacttttaattttgattttaagtccccaaaaagtgatttagtgtgtcactcactagttttacaaatattatgacttaggggcctgtaaatcgtcgagtagcagttcttctcaggttgattggcacacctgaattcagaaacgaggtaagattagtataatgatatgcatatgtgattacatgtttagcgtgcatatttattaagcatgttagattacattgatagctgtatcaatatacgtagagttgtattggatagcaatagatatatatttggctcaaatactgattgacgctatcacatcgatacgactagagtatgattagagtatcgagtatatgctgatattatggtcaatagtactgtcgcatgaacgttctagactcgataccgcctagggtgcggggataggattacagttgggtgtatgggcgcttaattgtattcagaatgcttgggccgatttaaaggctctcttgtattcagaatgatattaattcaatgaagttgctatttcaatttcaaaaaaaaaa

SEQ ID NO: 297434 - DNA, 2964 bp, Cannabis indica
tatttgatttgaaattctactaagattgaaaaatgcttttcttttagttttactggtttgaagagtataatttattttgagacataatttcattctgggtggtttgttttggggacaacaggttctcaaggaacacaaggaattgactccttatctatcagaacaaggtggttttacatttgtatttcattgaagctttctccacttgtggtattataatctgcctactacttagaagcatgctgatttttccatgttttgtgcacagggccatggcacagtttttaaagagacaatcaccaacttccccaatttcagaaggtctatttggagatctcagtttgaacaaactgctagaagggaagacaagaaggctatgtgctcgaatgttctcggaaacactggtaattctccaagtcatttattaagagaaagacttgtaccttatctgtaaagttcttccaattgaaagtgaagtagcttcttgtttgattggtttgcaattttgtatacaaacccaatacttattgggtgatagtgcaagtctcttctactataataacaaactactctctgctttttcttggcaaatccattgatattgttgatcctttttttcaggtgctgaagagcagtggtctagtagatgtacaacaagaagtaccttatggtgatatcactataaagttgacagcagaactttcaaaggctcaaatctaacatgactcttgtgcttgcccggcgctaagttaggtaacgttccttttcgacttttccccatcacttgtcacaatttcattcacaagctatttgtagactctgcttggtttggtttggttcacttccttttatcattttacctgctatcatggtcactttatatgatcaagtctttgacctatttagtacaactcaaacagaaaatggtgaatgatgtatttatttctgtgtttaattaaattccttggagtagcaaatcaaaatgcaaattggactgatatttagttttgtagtttgttttgaaatcagaataatcatttttcaatgtcccttattagtagtgtttggattattttctttggtacaagactgagtttattcagatcagtgtagtatgttctaatctgaagcattttcaattttcgtttttcaggtcattttgatatttttctcataacattggcagatggatgggacaaggttttgtacagaaatcaaattttgacataaaacagccataggttgtaattatttgtgggttatttatgtgtttggtgaagtttagttaagagccatagtttgtaattagtggggttaattattgtttgttgttagagtttctgtttataagagtactaattcattgtttgatattttttaatacattgggaaaagggggaattaccgtgtgtaacaccttttctaattcttttttactgtacttttgtttctatattttgtttttatttttttttattttttatattcgatcagattgaattgattctataaaaataaataaaatatagtttgaaggttgccctgagattttgattgtgatattatcaacattagttgtgccttatttgtttatcattcatggattttggtaataatgagctttctaaaattcaaataagcaaattaatacaagtaaatcaatttaaaatttataacttgattttgcaaccaaataagtaagtcaatacaatttgcaacttatttaaaaaataataaaaaaaaaacaatttgcaactaaaacaagaaaatcaattcaattatattattaatataatttagaataatgcttaggtagagttaaaatatttcaaatatttttttattattaaggattactctattattttatactaataattaattatttttttatattattttttttttgaataatttggtgacatctaataaagaaagctattaatatttaacattgtggaccgttaagtctcatttattataaaatcttcaaatgaggtcaagatcggttgtccacggctttaacaccactggttttttttatcaaaatgaataactcctgcttcaagaatgaggtcacgagttgcttcatcccgaaaattgaccagggtgccaccagattgcattctaactactttctctatgcctaaatttccccaaatcctcttgataaatccctcaaacactttgaacggagggttggcacccaatacaaagcagacaatagcatttttccagtaagaagcttctaccgctatctcctctaggtctagtttagccacaaattggtcaccaaccttaaccggctcaataaagctaattttagtagagggagatggtacctgatttgttttgaacttgctccataaatctctagcatcagcttggaaatctgcctgttcgacttcatcagcccaattacctggtttcggagaaccacgatcgacctctgattcaacaacctcagtcccaatctctgttatcatgttctcaatcgtatcatgaaattcttctatcgcctcaggttccgccacctcctcctggatagaagggagatcttgatcagttccgatgacctccgtggctgcaatggcaggcttccggctaaccctcttcttcttcaccatgggagaagcagcgggagacacttacgcctaatatttgttttacagagaatgatcttgtcaaaacctgaaatgataactttaatgtcaagtatcacatcattataactaaagagtattactattgggcactaatagtgcccaacacctttcataggtagcactgtacaattagttaacgatattctctaaattttatttttttgaagttatatgagacctgctacttaattacaccaatagtggtatgatgccagcaaggagggttgccttttagcatttctttaaaatatattaattaataataacagaacaaaatttttctttaatgtcttaaaaa

SEQ ID NO: 297435 - DNA, 2863 bp, Cannabis indica
gcttttctggtgtgagcccttgctgatgctgcagaaatcttcctattcactcctcccgccattatcaccgaaacaaaaacaagcccagaaatacagaagctttgatacaaaatggggtcttgaattgagagaatatactacaattttagagagagaaaagagatcgcactagtgcagcgacagagaaaaagtctctgttttctttttttttttacaaaagccaaacctttcttactgaaagcatcaaataattaaaaattaattaatcatgtcatttttgtcaaagatcaaattttgagtttttgaccattccttcgatttgtaaaattaattttaatttaccaaaatttggtttagtaatattttgaaatagcttgtcccaaatgattttaataaggttctttctttagtcctaaacaatgaagattatcatactcaaactattaccaaccacataatgtaactataaattcacattacctttgaaggaataaaaattcttcattttcatttcaattccaagttggactcggaattcatgttactatattcatattttttttatataaggctaaacaaagttgtaaaagcccaactcataatgcttatcatatctgatctgttctaattaagattcaaaattaagctaagctcatttcttttgcaatagaagttccttaaggatagtatcagcaactccttcagcttcatgtaacaaatggccatcaccaggcatttcatggtagtgaatccatgggagttgttggacaatgtagcgttgaggcaaaacaggcacaagctggtcatcatctccatgccatagatggacagatccttcattgtttggaaatggattagccaaatcaagaggactaaactcccacttcccgaatcccaaaatcatgtcccggttgagactctcctgcacaccctgctgtcttatgtatgcctgcagaaatgagtgtgtgttcaacatgttcagatggtaacttaagaaacaagattaatcagagaacatgtttagtaagttagttactgctcaccgcgtattccattctcgattgccaatgtggtttcatgacaagttccatgtccttggttgagaaaacagcaggattgtgagcaatggcactagaagaggggaaccatttttgagaattccaccagtaaacgagccacggtgcatggtgagccacacttactgcccactgatcattcagaagttgaagatcataagcttgtttcgatatattagaaggaaaaccagtccaccaatagtttgcaacaggagctataagtgctgctcctgccaacctgtttatcacaacatattttcctcagaacataaagatctacaaaactgttataacagatttcaagattagagcaaatcatacctatgaggaatgtatttaaggacactccacacagcctgtccacccattgagaatcccacaacatagaatttggatcctagccccaattgatcagcaagctcttctatatccaaagctatgcacttcaccgtacgcttcgggtgaggatcgctctctccataaccaggcttatcgaaagacacaacatacacacctagctcttgaacaagatcctgaaaaatcatatgcagagtttggtaacatgtaagtactagtttatagaggcaaagaaagagtaagaggcgagcgaataccggggacaagaatttggcgaaattgtcatgcctgcaagaatcaaaaccatgaataaagacaatcttatacttggcagattcttttggcacaccaagctctttataggccaaatgtcttccatctctgagttttattcttggtgctgtaataggaggacctcctggtgagccacatagctttggtggaggtggttggattgcttggtatgcatatgaaagaattcccacaaagaacaaacctattaatttcctcaacattcctgaaaatttaaagcatttgataaataatatgcagtaatatataacattatcatcatcaacagcaacagcaattttgattggaaaattgtagtttaaagtaaattgtcacactaattcatgtatgctataatatttttataatcaactcatcttgaaaaactaaatagctttgtcaaagtttctctttcttgagccatgtaataatgtgcagaacaaaaggaaaggaaaaaaaataaagtaaaatactctgtgataagactgatcttctcttctaatgaaatcaagaaaaatgatatatttatttatgtgaaatgtattgagaagctatatttatggtatgaattatcacaataaattggtataacgattattagatcttttcattgttatgggcaaatatttgttacttatctatttttgtagttgatatgccgatttgtcagaatatgctattaaactattcaggtaaaatttcctttctttgtttaataattgaaaaatctcagaatagcagagaattataaatattaaattaaattgcattaatgagaaataaataaaaattaatatatgtatttactaaaagaagaagaagaaaaaagaaagaagaagaagatgggcaggcattaatgatgatgaaatattggtatggcctatcatttacatattaattttctttttttcttttcttgatttgctaaaaaattgagattgattaaccctatccaaagtttcctttttcttttttttttttttaatttttcttctttcatatttggtagtagttcattcctgcctcaaatctatttctcactggattcagttctatcaaaacataaactaaacacaaaaaatcatcttttggctacaaaatactttttaatcagaaaatatagtttccctaaaaaaaaa

SEQ ID NO: 297436 - DNA, 1801 bp, Cannabis indica
tttaaattttatcatatattttttgtaaaaaaatgtaacaatattaaatttaaccactaactttaacaaagtaatttcaaaaaaatatcgaatcaacaattttcgttagataacatattttatatatacaaagaaatatgaacttgtcatatcccttctcaaaaattggtaaagatattactttgttaaaaactttttttttagaaatgattatgttaaatgttctataaatatatataagtaaatgaaaaattttatgtatttattgctatgaaaattttatgtttaactataagtgcatctccaatttagtgctataaaagtgatgtatttgttaaaagtaagttaaattttaactcccaataaataataaattttttaattactactttgttacccattaatacatttattaataaaaaagattttttaattttaatctcaaaatttgcaataataaacaaaaaagattagtcataaagaaaataaaataaattaagtgtattgtacattttcaataaatattaattacttattaaatttttttagctatttttgttccttgtgtattggagcatatttacaaaaagtgaggtaaatatagttttgatttatattttaggataaatttaacaaaaattatatatcttgtattggagattggttaaataacctagagtatttcctcctaaaaaccaacttaggatattaatttgtgttacattttataaattttgtggtaaatatatatttttaatttatattaatattatttgtgaagaatttgttttgtagagaaaagtgtatgagggagttgagggcattgttggttagacgtggggaaccgatacaattatgtgtctttatcaacaatgataaaggaccccacaattagttgggtcagttcaccacttccactctcctatttaactttctctaattaaattccatccttaattaaactgtatcatcactgatttacatctcaacaaaatcaataaaaacttatttcatttctgtaatttagtgatcatatatattattcactttattctgttatatatgtttttttttgaaaaaaaaaaaacggaaaaatcatgtttttatttatgtctcctttccccatatagtagcaacttttcttttttttttcttttcaatatattataattgaatcacaatatattttagtagatcatttctttctcttcatattattgcaccccatctttacaaattaccatgttgcattaaataaaaattattttatataattaaattgtattaatcgctttatcatatgtcttcataactaaaactaagttagaagaacgaaatataattcaatgcttccttactcttgaaatatttaaaacatacatagtacattacaaggttcactacattattaattattgttttatcaacaacataataataataataataaaaactaattggaatttagttaattactagttaaagagttgccatgttggcattgtggggaccatatgatgacacatgagtcatgttagagactttggctttacttctctactttggttactaaattaaacaatcaaatcaacttaaaccatcttacatttaacatttatttataatagggaaattttatttacaccccaaaaatttataagtacaccccattttaataatttttattttatataaaatttatatctttaattttactaagtatttctaacttttttctttcaatttatattcttaaaaaatatacctatcaaacaaaattaaattacattttaaaaattat

SEQ ID NO: 297437 - DNA, 3501 bp, Cannabis indica
cagttctgaatgactagcaatcagcagatttctacagtcatcaaagctccttttaatgctcttccatactttgacactgttttccactgctgccaatctcctaaacatctggaaccactttgcagatcattaagctatcgataatacttgcggtccattctaacaaagtgagaatgcaatgtctctttgaaggaatttgcaaaaccattcaacctgtaggatagtgataggagcaaagatcttaaaatggatattcagcctccttcattgaaaaatccaatccaagacaataagagaaatgaaatatagaatttcgaggaaccatatactaaagagtacctaatcccctttaattcccgtctccctactacatcttattctaatacaattctagtttacccttttgtggatttctatcagaaagcaaaatatcaataattttcttaaataaaatggaactaaaaaaggtcctaaataaaacagaataaaaaggtccaacaatgacagcataatcacaaccaatggtgttttcatgtacagtgatacttgaaaataagaaaaaaggcaatggtacctcagttttgttggccgtgcaatcccatctgcttcatccacaaggaccacttaacagcctcgagaaacttatcattccgtcgcagtgcagtaatcagattaagatatgttactttatcaggttctatgccattttctctcatttccttgatcaaaccaactgcctcttccaccatttgagcaatcccatacgccttaattaaagtgttataactataaagatcaggtttaagcccacattcattcaatgctgttaacacttcagcaacttcatctatccatctttgctctccatatatattgatcatgatgttgtatgtgtaatgatctgaatcacagtttgattccttcattttctgtagtacattttggaaattctccatttgtttttcttttccataagcatccaacatacaattatatgcctcaagggaaactgaaaatcctcgaaattgcatcgatttaactgttgactccattttagtaaaatctttacttttcccataagctgctatcaaagtattgtaggaaatcacatctactaaaccccacttttgggccatccagaacaacttccttgccttcctgaaaagctttgattttccataaagatgaagcacaacattcaaagtaatggtattaggaatgaacccgcgttgaagcatctcttcaaagagccgggaaatctcatcaactggcaaggcgcgagcacagcaatttatgacacaattatacatttcctgatcccaaggcacttcactcttcaagattttatagtacaaacttgctaacttatcctgcttctcacatcgctgataaagacggagcatatctcgggttagatggatatcaggattaaaatccttctgtttgtcaatttcatctagaacagaacaagcatcagtcaaagaaccagcttttacatacatccttaggactatagtaaagccaatagtgtccaattcaatttctgaagatttcaacttcaaataaagcttctcagcttcagaaaataagcccatgacactataaatatcaatcattgtgcatgtgatatgcatatttggcttgtcctcatttttaggcatatgactgtatattttaacagcattatcaaaatgacccaactccttacaagagcatattaacaaatgatacaagttatcttcaaaacttgggtccttccaaactttgtccctcaacacattgatagcttcctccaccaaattttgtttcacataagccatgacaagaatggagcaagaagtctgattaacaagaacatgttgataaaaaggacctttcaaaagtaaaggcactttatctattctcccagctctctcatatgcctgcagaagaataccaatgattgaggaatactggcatccaatcttcatcatatcatcaagagttcttacagcatcttcttctttcccatatttcgcttgcaagtttattagtgtgtaaaggttagatgagttaggcttgaatccaaactctttaagcttctgatagtaccatatagcctccttatagttgtctacccgaccccaaccctcgatcattgaacggtaagttgtttcatcaggctctaatccaattttctttatgtacacgaatagtcgttgagcagcatccattttcgatgctctaccatacccagttatcaatgtgttgtaagcaacaatgttagggggaaagccagccttttgcattgagaccaaaaccagttcagcatcctctaactttccttgttgactataagcattaagcattaccaaccaattatccaaattaggcatcaatttatcttctctcataaaaccaataacctcttcagctttttcatacaagttcaaacgagtataaattgtgattaatgatgagtatgcagatggacatacaactcccaaatttctcattagggaaaatgtaaactctgcctcctcaacaatccaacttttctggtatagcttcatgagcataccaaaagtagcaacatttggctgaaccccatgttcaagcatcattctcaaccacttacctcctaacccaacacgcccaagtttacaacaaccataaataagtgtattgaaaatttgataatcatcacaacccaaatcattttcaattccaaaatcattttttcagctgtatcccaatcttctcttctacccaaaaccctaaaaaccaaattataagcacttacattaccatctaacttcccattaattctcatccactcaaagaatctcaaagttttgctatcattacacccctctagccttctcaaaacagcattacactgctctaagctcatatcagacttaataacagagtaattaacatctatttcaccatcattaacaaacaaattctctagttccctttcccacctattccttctcacaccaacttttgaacccatctcccttttactctctttcttattagcaccactgtaattggatttttgctcaacaatgctctccttaactaaatcactgtgcaaatattctttagacttaatgttaatgaccctattcagagaactgagtgtataagctctaccaacatgaaaattgcttgaggttagagaggaattcaactttttggaatcaaatccatccaaagaaactgaaaatctaagagaacccatcacttaataaagcaatatcaatggaagagtgaaaagtactaaccaattaaagagagagagatgggtctgagtgtgagtttgagtttgagtgaggtgggttgggtgtagcttttgaggatttggggtaagataatggaagttggaagaagtggacgaaagtaacggctctccggagccttgtacgatttgctataattgtaaacgactcgtcgttttagttccaatttttttaacttgttttttgttttatttattttagggtaaatacc

SEQ ID NO: 297438 - DNA, 5897 bp, Cannabis indica
tcataaatatagtgactcgtggagtaaggtttattaatacccccaaccacgtaaaaaccttctcttctaacttccattaaatctttcatataggtctaatcattggcttccaaaaatctcgctcaatatcttggtgctttcattgagggatgtagtaagcctacccaaaaagaggaagtcttaagtaacctcgtagcataatggtaaaaataaggaacacctcacgtccacaacatttaaaggacccaaaggacccagaagtggaagaagcaacctcgagggtggatgctaaaggaaaaggggataccaatgacccgaaatattataatcaagaaaaatatgaagactatgatgaagataattatatagacctagttgcgctaagacaaaaggttgttgaccattaggttgagttggcagaacaaaaacagtaaaacaacaggatgcaatagatattaattgccatgaagaaggctatgaaaaatgcaggcatccaagtaaatccaaccacagtctcgtctatacaagacaggactgagggagaactttctcagcccaagaagggtcaaaaacaaaagaataaggagcctaatcccattaggtaccctctaaaaagcctaccacaaagggaaatcccacgaatatgcttaaggctgacgatccacagaaagtctattctgatctccctaaaggaaaaggtctgcagggatagatttcctaaagggagaactagcccctaggattggggagactgaagagggatgtccatgcatcaagggccaggaaaaaaaaaaggtccgccttagaaagatccctcagttgatttacaataaaaactcaatagccaaacatggggacttgagggcacacctaccttcagaggaattctagatgagggaatcctagctgaacttgctatcctccaaaaggacatagcgagggtcttccagaggcagaagggagatgactctaaattttattgtgaggactgggagccttatgcaagaaacatattagaagctgaacttcaaaagaactttaatatgcctgaaattactctgtacacaggcaacacagatccaagtgatcacctatcaaggttcaatagagttatgatagtcatgaggattaacaatgatgccaaatgtttatgtttcccgttgatgttggatgactcagtagaggaacggttcagaaagtagaaccaagatctgtagattgctagaataagtaacaagttagctttagaagacaatttgttgcagccacaatgataaatcttgaagttagtgctttgacaattgccaatggaaaccctaaaaaacttcatcaagaggttcaaggaggaggcttccaaaactaaaaaagcagacaacatacaataattggctttcttgcaagctagaatctggacagggtctccattttagaatgagttgcaacaagaaggcgcacctagtcttcaagatttccagaatagagctcaaaaatatataacctggaagaagcccaaataaatgctttcggaggatattatccaactggaggcccaggatatactcttagagtacagtacccagggactacggttcctgtttctccccaaacgagtggcatgccaagtgtacaattctaaacaatactcggatactcaccaaattctatcatgacatcggctcactctgattatgggttgtgagcaagtggtctagcccctggggtgtgcacgcagtatcctactcagtctgcctcactagaagtaagtgtaattgtagctcctaaaggttttatggagtaagcggtcatccaagggaagcactcagagtgatagcaaaaaatcgaaaaaggctaggtataactctcagtacacctagtatactgacctagtggacacaaaaaattgtgtgacttggccacaaggcaaaatgttcactaccggagacccctcctatgtaccatgatagttcccagagagaacccaataaaaggtgtgagtaccataataacattgggcacacaaccaatgaatgcaagaacttaaaagatgatattaaaaccttgatacagctcgaccacttatatgaatggataaggaatcacttgcctcgcatgagggaaggacaagctagagctcaattacctctcagaggtgtaacacatgtcctggaagtataatcccctctgtgagctcttccccaaaattaaggggtcttgctagggcagccacctagaccaaatgggagagtggctatgaattcttgagaacctcatgttgggggttcaactcgtaataagttaaaatggtatgccagagccttagatcatgatgaagaagtatgcaaagtaggatagctaccagctcagaggcctcgtctcatggattaactaataactttcacaaagaaagatgctcgaatggtgcattttccgcatcacaacccattggtcatcgaactcccatcactaacaggatagtagcttgaattttggtggacaatgggagttcagtatatatcttgttcaaagaagctttcctcaccattggccttacggaataggatttatctccaagtggctcgcagctcactgggttcaacgaaaattccctcatccacatggggaatattaggctccccatgaccttgtgtccaaacactcctcaaagcacgttcaaatattgcacctttttaatggtttgaggttagtagtttagtttatagtgactaaatctatttttaattttattattatcgacaattagtacccatattggtattggtaggtgcggttaagcagtatcgaatcttatcttttatattttaaattaaaatattatatgtataatcccatgttaaacactttctttttaatgcttgtgtacagtgcattctgaagcattacttagttttctttatgtgtaatggacaactacttatgcttcaacttctgtcttaccacaatttacagcctacaatccataatgggatgtccgacattggtagactttggggttgtcattttaattagacacatgtaccttaagttccctactcattcagtgagagtgggaagtgtttgaggaaatcaaggagaagcaaaaaagtgctacaatgtagcctccaaataagttgtgctcaaggtctagcctaagggaaaacacccagcaaaaatacacgatgaattggatccccaaatgggagatgaggcaacccttgaacctatgaaagaggtggaggaaatttaaatctgtgattaggatccaactaaagtagttcaagttgggaaaggcctcaaccctaaagaaaaaagtgaaactatggagaccatcaaatagtaagcggatgactttgcatggaatcacggagacatgaccggcatcccaaacataattacccatgttttgaatgtcaacaaaaatatgcccgtcgtgcagtggaaaagacgtccccttgacctaatcaagtctgaagctttaaagcaagaggtggataaaatgatgtccaatatctgtctctaggatgtctactatccggagtggttggcaaatctggtactagtaccaaagcctaatgggacatggtgagtgtgcatagacttcaccgacctaaacaaggcctgctccaaggattgctttcaactcccaagaatcaatcaaatggtagacgccacatcagcttatgaattgctggcctttatggatgcctattcaggctacaaccaaatcaagatgcatgtggttgaccgaaagtgcactagttttcgtactgataaaggattatactgttaccttgtcatgccctttgagctcaaaaatgtaggagaaacttaccaacgattagtcaaccgaatatttaaaaactttctaggcaaaacatggaagtttatgtggaagatatgctagtcaaatccaaaataagtaagaatcactctgatgacctctgagaatgctttagggtagtaagagagtataggatgaagctcaatctaaaaaatgcacttttggagttaagtgagggaatttcttaggattcatagtaagtcaacaaggaatagaagccaaccctaaaaagatgcaaaccttgcttgagatgccatcccctaggaagcacaaggatgtgcaaagccagatggggaaaatagtagctttgagtcgcttcatctcccattccactaacaaatgtatcccattcttcaatattttgaagaaaagtcaaaaatttgaatggaccgatgagtgcgaagaagcatccaaaaattaaagagcatatgtttaagcctccagttttgaccaagccagtccaaggagaagatctttacctatatacttggcagtttctaaattgcaatcagtgcagtagttcgggaagaagaaaaagtccagcaccctttctattacgtaagtaaaaggatgatatgggtggaggtccagtatcctttaatagaaaaattggccttgtgcctgctaatagcttcttgaaagctacggcctattccaagcacatttcatcaaggtcttgaccaaccatccactgtgacaagtcttgaaaaatccagaagcctcaaggagaatgctcaagtgggccatggatctcagacattttgacgtcttatatgtcacatgcatctctattaagggtcaaaccttggtagaatttattgtggagtgaaacgatactgaagcaactgctcacaaactggaagtaagtgcccccacttggaaagtttatgtagatggggactcaaacgagaatagatcgggagtaaggataacagtggtgtcactcaaaggtttgagacttcaaattgccttacgattcaaattcctagcctccaacaacgaggtagagtatgaagccttatccacatgggttgaggtagaaatttttagtgactcccagctagttgcaaccaagtgcttggagaataccaaacttgtggtgtaagaatggctttttatgttgtcactacaagagaaatattccaagagttcaaaagttacaaaattgagaaaatcccaatggagaagaaagcccacgtagactacttagcaaaattggctttaaataaataagtggaaagactggggtggtgcccattgagtaccttctggatcctagcatcctggctgaggtagagcttgcagtcacaaaccatgagcctgcctggatggatcctattatcagttatttaactaggggcgagttgcctcaagacagggccacctctcaaaaggtccaataccaagctcctagatacctaacgattgatggaattttataccgaagaggtctaagcatgccatacctgaagtggatctctaaccccgaagctaataaaataatggaagagattcatgaagggttttgtggggaccacactaggggtcccaacctatccaagaagatcctaagacaaggataattttgacccaccatgaaaaagggttgcattgactacgtccaaaagtatgacccatgccaaagatttgcaaaacatcctaagagcccctctaaaatgaaatctcattgatgacaagcccatggtcatttgtagtctggggtattgacttaattgggttcctttcagcgggaaaaggcagagtcaaacatgtcatagtcatggtggattattttacaaagaagacagaagcagaaccaatgaattcaatcactgcaaagacgtgtgtggactttgtggtaaagtaatattgtctgtagatacaggctacctcacaagatagtctctagataatagaaaaacttttttgatagtgactatattcactaggaagttttgtggaaaaatatgcagtcataaaaagtttgtcggcagttgcaagccaaatagaaaaatggtcaagtggaaagtcgtagaataagatattaaaaagtgacact

SEQ ID NO: 297439 - DNA, 6014 bp, Cannabis indica
atatatatatagatgagtatatagtagtggtgttataccagccatgaattataggtcaatgaatcagttgatgaaattggattgatcataattgatgatggaggtgtgatattgagatttgaagcaacgaagcaatcgacactaccatcgttctcatcgttcttattagggtttgtgattggttgagttttttgtttattcgaaggtggtggtttctgtagacccatttcctgcttcactgtttcaaagttttccattagtcaaaaccttaaaatatattccttacaaaaaacaaacagaatcgacactacaatctatatatctctctagctacccacgttacgaggatttgaccacaaatgatacgtatttatactcaggtgaaaccaaacaaaacttaaccctaatcctattacctaggattcgttgttgggcccttgggcccaatcaggttgggcttaactacaatccaataaagatcataataaagagagataagagtagtagtagtacctgaatttttcttaatttttgagattttataagctaattagtggagttacctgcaaaagaaaaaggaaataaagattttcaaaagttgataaaaatcaaaagaagatttttataaatatttctcttgttgatttggaacccataaaaattgtatgatatgatgattaatatatgtaaataaatataaatatataggactcccaaacagtatacgtgaatattttgtaatttgttaaggaacaaagtgaaagcgtgcacgaattaccattatttggttgttgttgtactatagggattaaattactcttatagtcaacttgaaaattttgagaatatttccattggtcataaggaggttttcactacgcaacgaaatctatctaattatctaataattaatgaattcttttttgttaaattttatcatatttttaaaatatctaaaattttaatttaaatttatacaaaaaaaaaaaattatctacctaattatattaacatttttaataaataataaagacgtatgaaatagtgaaggtacccctttgtttaattaataatccctttgttttttcttaattatataaataaaaatgattatggtgattcgtacatgatctaaaaggattttgtcaatgaatgtattaatgggtatgtcggcgaagagatataagtacacttgtagttataagaaacaatataaaaaagaagaaataatcaatgtcaagtacaaattttaataagagaatttgaggaactcatagtgagaggtctatatcagctttagttagatgtgtaattatcaatctatatttaatttaataactttctttataacataaattattatcattattattaccctattcaaccatgatcggacaagtgtttaaaactaattttagttggttccctagctagtccctcaatatcacatatttaattaggaaatatataattaagtcactttctgaaggttattaaacacagttatagtagagaagtagtatatatataaatatagaaacaagaagaaaaaccatgggtgggaatatatttagtgaataatctagatttagtgagtcaaaattacatggccgattatgaaagggttttttgtcttgttattagggtctcaatcgggctgactcagaggacactataataaaattagctttcttatttaaattataaatatatgcataaatatatacacaacattatatatggttaattagttagtatataagggctccactccaccaccttaaataattccctcaaattccaactgaaattcgattataaatatcacgctggtattaattaattaaatacgctagctgctataaatatatgtttataattacacggaatccaattctaaattattgctattattactattaatttcacatgtaaatttatcaatatatatcttgggattcaataaaaatatgaaagtaggtatataactaagaataattaattaagtattgttattgagtattaatggtgcttaacatattttattaatgatattctaagatacgaggaaaattattttttgtagcaaactaatgacaaggttaaaagttgtgcatggaatataaggttcatataaataagtgggttttaaatgtatctaagcaatttaatcaaactaaaagttttttttaacataaaagtagacgtaagttttagaccaaacaaatttgaaaacatgtcaaaagttaaaactaataaaggcaaactaactatagtgtagtctataatatataggtaggaaaaggaatattatatatatgattgtgactttcaccatcactacttcctcataatttcacaacacaaaactacaaaaagtgtttcacaatgaaaataaataaataaataaataaaaagcccccataaaacacgtgtcatgaaactataggaacagaaacaaagtaattataaaagtgattgatgaaaaagtgaaaacacataactaacatttcacagttccccaactttcgttttcctttgactatacaaaatatggaaacaaatgactccaaacaaaaccatatacaaattactattgtttatttttgtaaacagaccaaccaaaatagaagctttaataatatttcaaggaaaagaaagtattaacttctcatataacaggtaaacacgtgtgcccgaccaattaattgacctattgtattctactgtattgattttattattttttattaaaaaataaaaataaaaggagaatgacttttttaaccgaaagtgtgaacagaggaaaaggggagtttgataattttaataaatcaaataattttttggtacaagaaaatgaaaatgacagatatcacgtgtcaagggataaggtggttgatcttagaagcttttaatttgggtacttggattttgtaaagatgacagtagcagaagaaatagctgtgagaaaaaaaatgccccaaaacaaagattacatatatatatataatatatttaatatatatgtatacaactaagtgactaactcctatgaaactaccttgagttgaagtaataaattaattaatcataaataaaattacagattatattaataatgatgagttctgaggtggccaatgactttagaatgaaaatgtttaaccgagatataacatatatacaatataataattaatctaatgtatatggcaatacataattaattgtcaaagcatgaaacagtaaatgtagatggaagaaagtgaaggcttataattaataatataaagggttgaaaatgaattaatcaatgttatacatgtttcaacctttgtgatcatttgtcaaatgtctcaaacattatttaaaaggaacaaataaaattaagaggtagtacaattaacctattttttttacatataattatgtaagttgttaaaaaaataaaatagttcataagagtattgctattagtcacttaacacacaatgtacacatttttttgagaagttagcaatcttttattatttaatttattaaattaaaatatataaaatctaatatttatatgtgattagtaattttttgagtagtatgttacattttatggcgcttaatgctttaaatacaccttatcattattcaatttaaaatgcttaaaataaagtaaaaactggccacacatctaaaattctcatggataccaaaataaataagacaacctttttagaagatataccatataattacccaaaaattaatataaaaattaaaaaaattggttataattaggatccttcactaaagaattgtttatgtagaattcttattatattagatgtattatttgtgtttattaactagagaaagaggatggaataaagtaatggaacatccattaatttgggttgaagctatataaaatataaatattttttttttcaaaaaagtagaagaatataataacgatgaatagcatttaatagtgaaaagaagttataaaaagtaggtagagtgcatgcatacaataataggatacaataatagggagaatggagttgttaccaaaactagatgcaaccgtttttttattaaaaatatatatttttatttgtttttcttaaaatataagaaaaaaaatagcctcattcatcaacttcttcccaatcactcactaccaatcaaatctccaccttacacgtggcatttccaccgacttatcttggtgtgtcagttgttagaggatccgattttattaacaacatagttgaacacctcttttgtaaataaaaataaaaagtagtactacttaaatattcctagaacaaatactatgtagctatacacatcaacatcatcataacttgtggaaattaccttatgttttacattaattataatataatctatcagagtgtgtgtgcacgtacgtgtaagtaatttaagtaggtatgtattatttttaagaaattattttatatattatgtttttttatactactatttaagatttaagttgttctagtaattgttacttgttgttccttgagttgttatgtgaatttatgtaaattcacttttaaatgtaaaaagaaaaaaactctggctaattaagatttttgttccttgtaccaaatcatgttgaactttgaagacaactaaaaattctcttttaggagcacgattttatacatgttaaagtttgaggagcatgatttagtaggtatcaaagttcggagagcataatttagtacatggacaatgaccgaattaataaaattgaatgaaattagacaactgcctttcaatcttaaagaaatttttttatctatagtacatgtgagtacaggataaaaatcttaattagcttgtttttttatataattttataaatcctttaatttacaaatttttcttgctaatagacataggaatttattttgaaacaaaaacaaattaagagagctgagaacaattttccaaaaataaataaataaataaaaatgttaaaaaccaaaataataattttaacaaaaatatattgtggagctagattttaacacttttatgtatggtcaagtgggacctggcccagtcaaaccgtggagcccaccgattctaaggaaaagaaaaatcaaaatacacgtgtacggtcaaaacaaaagatcctatataaaagcgggaacaagactaagaccaagagtaaccagaaatggcgcgtgaaagtaacgcgcaccgtatagtctcctagaaaagactaaagcgggggaagaaaatagtcacgcgcgcccttgaaaaatggtgattggaaaagctctaaaccttatattttttctagctcgaaacaatcttaaccgctttttctagttagaaattagcatatatttctgctaatatgtcgaactgatagttttgaataaatcaaaccaaattaaaaaataaaataaaataaacagaaaattcaaaaccaaaaattaagaatgaaaaatgaaataattaagctaaatgaataaacaaaattgaacaaatttgaatagaaatgattgacatgcaaagtgatcaagatagttaaaaaatcatgataatggaatagaaaaattaattaagaagctctaaccttggaatgaagggcttgcttggaaatcgagaaaatgaggtagaaaatggcagaagaagaaagggaaaataatattgtgagaaaaagagagaaaagggagagggaaaaattagaagggtgagtgggatttatttatagggaaaagttggggggttttgggaagttggagaggttgtacagatgccaaacatccaagtccatcacattataacttcctccaaaatttgcctcactttagagttaacgactaaatatatgggaccccatcttagatagggacaactctgtctttttattagaataaatatatatataatataggagagttatatttgcaccccataaaattataaatacacctcaatattaaaaaaaaatataaacttaaata

SEQ ID NO: 297440 - DNA, 3787 bp, Cannabis indica
aaaaaaaaaaattgaaaaatcctgcataaaactatgaaattttatcgagaattaaacagaagaatgaatggatgaggaaagaggaccaaaaagtagaacataaccgaataatcaaacataatacatagctgagcaagcatagaccatttttatgttatactaattcataacctactttctaatctggaacagacgcaatgggacaaaagctttaggaatttcttcacatacttgaattaaattgggaagagataactcaatttatcaatcgcattctaaatagtgaattacctcagataacattcgctgtttgttaagatgttgagtccttgctttgttgagaactgaatttggtgacttgtacatcctctgtagtaaacaagaaaaatgcaaccatcagaagcatacaagtaagaccaataaacaaacagaagaatatgtaagctaggagatgtcatcttgtggtgtaacagcaagaactgaccttttcactgcttgataaacgatgttcatggtccgtgacatattttttaggtgtaaacccaaaaacatcatggaggagttcattttcctgtttcagcaatcaacattagcagtgacaaaaatatttaagcatctttaatagaagacagcagaaggtgaaaaaaggtacgagataatggaagaaccaacctgcatgtgtttcacaaatcctcctccaaggaaatgctttacaaagttcagctattaaaataaaatagaaaacatcaactcaacagattattctcacaaagaaaggttccgagagatgaatgaaagaggactgaaatagggacaaggagcaaaacctgtattagttgagaccatgtagatgtctgcagagaatcaccaccaatcttaacagaaacttcagggcaataaccatcctaacaaaatagtcagaccattgtgagaatgcataggcacatgcaggcatccaaagagcacgaaaaaaggaaagggggagagagagagagagagaggtgtacctcaaaatattccagtatttcacgaaacaaattcctctgattgttaagatctttcttagcagaacctttaccccctgcctctgctgaaaggcttcttacttgatttatgacttttgccttcaatccttgtatgtgtatatattgccgaggtttactttcttcttgacttgatccatcacttgaactttttgcctcaatagagaatttgtctaaacttccaatctcaaaaattaaagccagtgcttcacccgcagcaattcgaacagccctatcttccttgtcaaggagactggataaataagttagtgacctgcagttttagccaaagaaattattggctacgctaatgtgtaaaatcttagtcaaatgccaagttttgtggcccaatttgcagttcttttggatacaaatggaaaatactggaaacgaagtaatgaatatgaagaatatatttactcttgccaatctctaggattaagtttccatccatccatggttgtaagaagaaatgaccatgcagatatcattgcacttattgtagctccagaggttttggcagcaactacctgcaaaagggaacattaatgggagtacacaaaaggatcaatatttcagttccagaatccaaggctctagacatcattaaaagataaatgagaaacatggatcaagtatgatcaaacacctcccgaataaaaggagataaacatacattggccttcagttttggatgaaccacttgccacataatttgcattgaccgctctgtctgctctgggtcacttccaccaacaaaagtgatgacagccaaacattccagtaactacaatcaatgaccatgttttttagaaaaatcagattaaacaccatagcatatgaaggagataaagaaatataaagagtcatgataaactaccgctatcttggcagtttcagaggcagacttgagagcctgtgtcaatggaagcactgattcctccaatatttcacgtgcattatctccacaaccaacagtcaaagccagcaaccctaataaaaaagttgaagaaaagctgggagatttgagtacatactagagaatatggaacagaacaagcctgtagacaaaaataaggattgcaaaacaaaccaatgacatgtgacgccaaacatatctccttggcagatcctcgtttaaaggaattcagacactgatgtaataaagtcgcaaatctggaaaacgccccattaacacaagaatttaaaatacaaacaaagaaatgactaactatcatgtactcttaacaggcggagaacataaagaaaataaaaaatcaacatgcccatatccgcataacttaaaaaacacaatcaaatatcaaaataaaacttcctacttcttttcggcgaactgatgctgcagactgttattgaaagctgcaataatggatgacaacgcattttctctcgtggaactccttatgaacataaaagcaataaatgagttagaaaaggcaatccttaattaaactaatataaatctcctgtactctattacaattaaattcttagcaataaatgaatgaaaaagatcgatagagataaaaactcttacctcttctcgtacaaagcatcaagagcttggtcgagtaaagtatctttatcaagttgcatttcttcagtctccatcaccgagaaacgatcagaacgaatagttgacgaagaacttacactgctattgtcgtcgtccgtatccagcatcgctgcatttttgcgctgagaattgcctgcttttttcaattcagccatatagtaacataaacaacaaaattaactagtaagaaaaaacaaatttaattcctttcagagtttcaatcgcaaataaatcgaaccaatatcaagaaaccctaataattaactcaatcaaccaacccaattaggtcaaacaaaatccaaagcacaaaaagaaaaaagattacgctttcccattgttgagggctcgtagaatatttcttgcgtcagaaaaatctacaagactgactgttggcggtggtgattgtagtggtgctgatactctggaattgaaagcgtgttgagaatatgagatcgctaaaaacgagtccaacgaaaatatcagaagtttcgtgagaatatttagccattaaacttagattaatatcagttttcagagggtaagatgtgagaaagaagagtttctcagttacaaattggggattttatagaagaaaccacatccgaagaccgaagagagggaagaaagggactttctttattattattttctcaattctcaattaagacaaggaaaccttcttgttttgttttgtgataaatcgttctttctaagtaattaatttttgaaattgggtggtatctagcgtatggaatattcggtggatgtagtagagcaattacgtggcggcttttcaatggtgcgcaagatgaatatgtcgacgccacgagccattttaaaggtggagttacggacacgtcgtgtttcgaaatgccaaggctgctggttttactaaacgacgtgtagttctactaatgaaaactcgacatgttcaccgttttctagtcgagctgtaaattctttatttctactttttgtttttgcctagtgagggggccttcacaaaacgacgtgtagttctactaataaaaactcgacatgttgaccgttttctaggcaagctttgactttttttaggggcttttctatttttacacttcaaaacagtttttttttttttgcatttttacggaattaggcatagaaa

SEQ ID NO: 297441 - DNA, 3463 bp, Cannabis indica
atgctggagatcaaatttctggatttttcgttacatgtatcgttccaattgtatgagatttttccgttacatattttcttgtggtattgacaaattttctttgtttatcactttctctgtttctgcagttttttttagctttacttttctcttattacttgtttaacactcatatagtcaagggattaaattatgcgtaaactcgtagcaaaagcaaaagaaaacaaatacgtaaagctttgagtcagtatctagccatggggacagtttcactctctatcgaatttcaacactgcacgattggtatctctttctcataggcaagtcacaaatctcgtgattccattaaatctcgttatatatatctttggtgggttttatctttttaatggaccttttctaacacaacaatggcggttgtttttcaatacccatctcaggaactgtttccttcttctgaagcttcaatctttttatcatttttgagctcttttctcatctgggtactggtcaaatatggaattggagcttgtttggttgcttagagcggcttggattgccggtactttgcctatactggttgcttcaatacctagttcaaggctttcttcggttcatggacttttattggattttgctaagagagggaagattatgagttcttcttcaaaagtaagtgaatgaaacgtttttatagtgattgtgctttatatttattttgcttatgtttgtatttggtttgagaaaatgggaaaatggctcaactgatttttttggatgtgatctttgatgatgaaaaatttgagttttttttcagagataaagtacaaacttaggatcagagtcagccaatacagcataatcaaatacaattggatacccaagcaacaaaactttggtactttactttctaagggtagaggacctagagttgtataatgtatacaactaataacatttgcatcattacaagctattattgatcatgttaaaaacattgaggcaatccattctaccaaacaatcatatcccaaatgtaaccaagcatgatccctttaagaatgacaataaccaaaaaaatctttgatagtgaatctcagtagcagcattaacattgattatttttctcatgcccttcactttgtgcttatattatttgtctaggttatatacaaaccataaatcatctatgttttagtttgttttgggtacttgagttgtcaaagtaatgttctttctttcatatatttttgaatctctgtagtcaagcttcactaattttactctcttcttcatatgaagagattcacacttcctcaaaaatacttcggccatttctatgcggtagcttcggtgtggacaacatttctgctcgttgcaacttggatgtatgcatacaaaacagtgccaatagtttccaagccttttcattattctacgtttgccagccaaatagcagggggttctcaaatcttttcatggctccaaagtcatacagctccggtggagtataaatatagcgtttggagatctgtgtttctgcttttgttgatggatgttcaagtcttgagacgcctttatgagacaatatatgtgttcaattatagttcctcagctcggatgcacattttgggttatttgactggcttcttgtaagttctctgaaaatacaacacatttaatattaattttcctgtcatatatatatatatatgttttttttttgtttcttttgcgttagctgttaattatctcgggggtgtggttttttatacacacgcacacgcgcacacacatttaaatatgcacctgttcatgcttatcatctctatgtagtctcttctggtgaacctgtaaaattagtgaattggacagtgatgagagatattaggtaccacgcgttgaaaatatagttacccattatgcttttctttcctttccaaaatatagttacctactatgctttcttttctttctttcttgagcatccttttaagtgtactctgttctataacttttgttattttcttagctagtttctacacagcaggaccactgtcactttgttgcaactgcattccggaggtgtacaaatttgtgttgaatggagttgctgaattcattgttataggcaagaaccgcatgccagccttcgaattggactggtgggaatttgtgattccccttgtaaagcttggctggctacagtggattggtgcagcaatatttttctggggttggattcatcagcttcgttgccatgctattcttgtatgccccacaactcaatatatcctatattttcgctttagtttcagcatttgtttcatgcttacttactgtccactaaacttcaatttgctatccaatcaaattatctggctcatatgagataaaatttgcatcagggctcgcttcgagaaaacaaagcacaagcagatgaatatgtaattccgcacggtgactggttcaaaattgtgtcatctcctcactatctggctgagattgtaattgctcatcctctttctttcatgtttcttattgtagtgaattcttcaaatttacatgcatttgttactgtcttgctctcatttgctttctctgacgaaaatgaaggttttatacttcggtgttttgattgctagtggaggaagggaccttacaatctggttactctttatatttgtggtaagcatagttatatcctgaaatacatatttcactactcataatgacacccttatcaccaaagtcacaaaattttgctgcatgatactttcttgtaatttttcgatacttattggaagttacttttgttttatgtcatttgcaggtggcgaatttagtgtttgcagcagcggaaacccatagatggtaccttcgaaaatttgagaactaccccagaaatcggcttgcgattattccatttgtttactaagagtagaggtggacatggattctttaagttagtaactttatgggatgttcttaactaaatctttgaacataatctgttttaccttaaacaagtaacaaggatcatcactaaagagtcatattaattgttttgagtctttgtaaaggaaagatgttttgctccctcatattgggaggagcaacttttttaataaagtgaagaaggtttgttcaaatttaactataccatattaattttggctgtttagttaccaaagtttaagcattttaaacttaagaaaaatgtcatgattggaagatgtaattgtaagctaaaccaaggcaatacaagtattttgtccttttttttttctatctttaagatgacaaatgaatggattttagaatgtgtgaagatatggataaacaaaagaaataagtacgagaaaaatcatacttaagactaagtactctattttactctcttaaggtcatttctaaccgaattttaaaacaccaaatatagtgtagtttcacactatattta

SEQ ID NO: 297442 - DNA, 2509 bp, Cannabis indica
attggatctgtcaacaagttaatcatagcaatttaaattaaataaataataagtttgtttcaaaaaaggtttgaatacataattaaacaaacattcaaaatatgtaacatatatttggaacgtaggttaagatatttttattttaaaataaaatatttttaaaatatcttcactagaattcaaatttaggttgttcgaatatattcgaaatatatttaaaatctaaaccctatacactttagccttgtcttgttcagaagatattatctaaagttcatagcaggtgaaaccaacctcccaggtttgtaaaaagccttcattgctttagagttttatggataaggtttagatgaaaaatatgcttaaacgctagtaagatttcagcccaattcccaagcaatgaatgatgcctgaaacctgcactgtgtctaaccatttttcctaaatcatatatccacagaaataaaagtcagggatacccgattagcttaagtttgttggcttcataaagggtggagaccaagacaaccctacttgaaaatgggaaagcaagtgttttacaaaacatttcctaaatcagtagaggggttaagcgtcgaataaaatctaagatttaaaatagtggctgttggaacaacttatttccaaacaacttgagataatcagcccttaaaatgatccaacaagctaacgcaagaaaatcaaagctagaagttagaattaaataaagcatgaaggattaaaagccattacaatgcctcacggaccaagcagataaaattgtcttggcaaaaggaaaaaaagagttataatcttgaagattctaaacaaaggccctgcagactgggcttatgaaaacagctatgcaaatagtgaaataggaagagtataaaaaataataataataagaggagtaaattatggatttcttcaaggagggacatctgattgagtggttggatctataagcaacactccaggagcatctttagaaagagaattgtcatcttcaaagagaatgtccacaacctctgaagtttggttgtcaccagcctgtgaattttctgcctcctcaacaattgttttagtcccgtcatcgacaatggctgcttccccatcgtaagtctcgaggtactcatccacaaaacagtcaaaagctttgactctcttggcaaagttatctacatcctcacgtaggtgattgaagatgtgagggatagtctccttgaggcgggccaaagttggggacccttgctcctctcggcgctcttcccttttagcatccagctctttgggcggaagagaaatctccttcaaggtgttatcgtgaccttgttgatggtagagcttgatgtcttgtagctctttgatggtgttagtttgtgtctcaattcattggtgcttttcctcaatacaacccttgagagctgtgactttgtcttctgcaatcttttgaaaaccatgagcagtttcaactcgagcctcccaaccgttgatgacattcgttttgttttgaagctcaagaattcttgacactacttgattctcaaggtttgtcttggctttcaaggcattatcacgcttagtggtaagggttgcattggtagccttaaggtcctcgagatgggccttgtattttgcttgtattttagacataaaggacgtcttataatcattatacatttttaatgtaagtatcttttattggccacctcatccatctccttgcggtgagctttagcttctttcttaacattttcaatttggagctgtaaagccttctgggtggttagagaaaggtctagctggactaccattatttgcacctccctgcaagtgcattacacaaagaaggacatctggaacaagttggaaaactttcaaggatggaaatggcatttagtgtaaaaagaaaaaggaaaaagaataaagattgaaatgaccaataccctggctacttgttgtctttaagcattggctaagaacacgggatcaaaaatactcccaatagcccacttctccatagttagctccatcaagctaattgtgatgtcttcgatagcttcagcattgaaaggttccaaatctctgcctaggcaaggaaataactgcttgcttacaactgcgaggtctgtgataggagcagtgtaccctgggctacgaatatctttggtaatctcagccctcttcatcgcagacaatcggtcggtctgagactggactacactttgttcctccaccaacatttgctttttgtaggcatccaccttcttcagctggatcaaaagctcggcccgattcttagtgggcttcatataaattttgaagcgctgagatgggatgttaggcaggttagtctaatggccttggaccaacttggtgttaactcaaacttttagatctccttgttttgatgattaactaatatttgattattatttgttactaatgatttgttgattttgtagcaaaattaaaagagaaaataaatctttcatgataaattggt

SEQ ID NO: 297443 - DNA, 2325 bp, Cannabis indica
acaaatacatatttaaaagttttaattaatatatatcattatttagttttttgctaaagtattatttaattattaaaaattaaaaaaaaaaatagtgtggtttacagtgtccactaaatttagtgggacactgtagacaaatccatttatagctttaattatagtgtcccattaaaatatttatagtgtgaaatcacactatatttagagactagttggaaatggccttagctctatttctaaggagtggtaaagtgtggtggcctagtctctctacttatgtttgacactagcttgtactttgtttgaaattcttcttttttacaataaaagtcccttttagtaaaaaaaaaatattgtctccaacatagttttgatcatttttagagcatctccaatacaagcaaagtaactctaaaaattaccacaaaattctatatcattctaaaatatgatattttattttttctctcatccatatcatttttggttacttactactaaaaaatactttttttttcaaaggatactaaaaattactataataatctcacacactataatttaatatatcattcattttaataataaaaactatcacaataatatattaaaattcatatattagtaaaaataaatattacataaaatttaaattacaccaaattcaaaattagctcacaaaataacataatactaattaaccaattcaacataatttaaaaaaaaaatactaattaaaattattttcaaatatagatcatatatgttccactaaatctgcctgaagattacggtgaataattctgtcatgaattttaatatttctttgaagcatagtcaggaagtcataaatagatccatggcatacttcaaccgttgaagtattgatggagccttcatcgtaattaaatcaaataactcatatgtctctctttcatcctcaacagtcatgttgtgcaatatgatacatgcgtacataatatctttaagagaatctctttgtcagaatcgagtcgggcctcgtataatggtataacaagattgaagtactctaaatgcccgtgctcaacatctttgtgtacaacttcttgacattgggcgaatacttttctcttctctctttgaggcaataggatagttttaacaaatgtaccccattttgagtagataccatctgctagataataccacttgttgtattgtgtcatttatcataaactcaactcttagagcttgcctctataagatgtcattgaataatggtgattgatttaaaatattgagatcattatttgatcacagaacatctaaaaaatgcatgtaaaatccaaagatcttatgacgcaactacttcaagcatgattgtcggtgcactgtgatcacctcgtgtgaattggcctttccatgtaactgagcaattttttcattcccagtgggtacaatcaatgcttctcaacatgcttcgaaaaccacacctttctgccaagcggcaaatgtcatcgacattggatcgtctcagatattctgccctaaaatctcattcactccatgaacaaaattgactaaacatttgatagtagtggtttcaccaattcaaacacactcatcaacgtaatcggctagtgcactgtatgctaacattcgcatagcggtggtacacttctatagtggtgaaagccattttctaccgatttcatcaaatcttatctataaatactatgaatgatgctctagagcttgcactattcataggaaaacatgtctacgcgttttaaatcttctttgaaaatgatattatgtccttctacacaaactctgtcaatatgggctcttttttttcctcaccttcttgagctacccacagctaagtattcatttaaaaatttctcttggaatcatcagtacatttccaaattatgatatcagtaatactcattgttgagattttttgccctaaataaaacctatttcaatataatattactttttatcaataaaagattagaagttatttatgtttacatgtattttttatgattatggtttgatatacaaattctattaaattcagaacatattgtaatttcatattatagtgatgtcaacacagtggaaggtaattgtgattatatgcttgaaaagtttatgtcccatgattcatcagtgtactggatttacactgatgtgatagtcagcgataaagtttacttacaccttagataagtgttatgtcattttcagggtattggtaaagtatgctagtatcgaatgtatggagtatacattagactggatcgatattgatcttggtaaagatattat

SEQ ID NO: 297444 - DNA, 3555 bp, Cannabis indica
aaaaaaaagagatagcatcaatgccatatagtggcattaacaatcacataattttttatgatagcaccaatttatctttaatggtataacatgcttgtgttttgccaaattaacattccatataagcaacctccaaaatttataatttcaactcattatctataatttcttttttttttttttttttgagtggtccaatacatttagctacactgatgagagtgctcctacgctttcatacatgaagaacaaaatatttttaagatgtgtttggaaacaaatgttaaaaggtattattattgttttaactgttaacaccatatatcatattattattacttattagtcccatataatttaatttcatatagattatgaaatattgtagtcattctcaagtcaccccttgtggtgataatagggactagtgttttataacaatactcatttggaaagtgaatttttatttgaatttacgtgtaatttgaattaattatttaattggtgtgtttgcgtaattacaccattgaaggtctcaatcatactcttcaataactctcatgctcattcatgagaattaggtataagtactaaaaattttctatcttaaatatttacaacaataaaaatattgttattctcgtgtaattaattactaattatcaatagtaaaccatatacaaattcttttactaaaatgacttgaaaaatatttatttagattttatcatttgataattagatctaaaaaaatataatttgatatatattattttttttatttgtaccataatggtaattttataaaacaaaaattattttaaaagagtaaaggacattttggtcaaaataataaaaattccattttattctatataccaatcatcacaattcttattcagttattgattctatagtctttatcaaacaaaagaatagaaatttcattctatttctattaccattctcatttctattctatttttagtttgtaaccaaacgtgatcacctaagtgtttttacatttcttaattctcacaaaaatgatatctcaagttcgaatcgctcgatctctaatattaaaaaaaaaaatcacattgagaaattaaaaaaactaagcttacaatattgaggagtgatcgatcattacgaaacaaataaatgtggatcgatgcattatcatttgttaattaagatctaaaatattctttttctattctgaatttttatttttattagttttttttattaaaaagaattttcatttgtttgattgcgcgatattataaaataatatttcctactttgcagtgacataagttatttattttagtttttttctttgaaaagataaagaaaaaaaaagtagaagtaataatgctcacacaccagaactactggatgtatccatacattaattcatacgtaactttttcatatgctttgaataataatgtatcaagacatatacacaagaggccaaacataaaacgacaacaaacaagatcatagattatttaaaagcacttggagaatgatcagttggaaatattttattttggtaaaaatatttggaaaatatctttacaaataatttggaaatatatttatatatagatatacattataaatgcacaaaacaaatgattgagcttcaatgatagactatatatatggaccccaaatatcatttccccaaaaccaaatgatttacaatgagtactggaaccctatatatatcatctatatgagctttaactaactaagtgacggtacaaaaatttttagtaaatgtgcaatgaagacaagcaagcaatcaataagttgggatatatgcacttatgacttgcttccaaatccattctccttaatatcatccatatatacatataatttacttaataagtttttagtcattaccaacatagcattaaaaccctccaaaaattatatccacaaaaatatatatgataatatataagatataatattgtaaattgactaaaaacgtttcaatatcatatcattctatttatagaaactttaggaaaaatccactagctaggaagctagctatttcattcccccaagcttcttagctttgaccttccatgattagaggatatctatagacttatagggtactcaaattgaaatccggttattaagaataatggtagatgatgacccaaaaatttcatgaacctaataatatgccgaagaaatatttcatctttgttgaatattattttttgtttggtggtcaagaaaatattgcccatttagagagatggtcaatcaagaaatcaaaagctttttttgcactatatgaaaaatgagagtttattagagcatgcgcttgcgcatgtccttttagcttacctttaattacttcaaaaaagaaaataagttttttgttagactttttgtgtgacagatattgttattaaatattaatgtcattctctttcttttctaaccgatgacttaatggaatatataatttatatgatgtaactcttaatttagttgctttctcattcaaaaacttcaaagtaattttagtttcatctcaattaatatatagtaaataaatacaccctaaaatacgagctctctccctttctcatagaaaataaaggcttcttacatatatcgttcccatgatgatttttgagaggaaaaaaaaaagtagacaaaaatagaagataaagtagatctgttttccttttgacattttgtacaatatatattatgatattctctcttcaatgcatgtatagttacatcaacctttccttcctttttaatttttagttttttggattgaaacatcaaacttttgtttagtcgatctttgaaaagtgcaaaaaatttgtaaattgctttcatgtaaaagtatatatatatatatatatatagcacatcaaggaagaataataatgtgctaggtaattttgttatattatatatgtgacagagaataacattaataacatctctaaccagttctatcgtccacgcaatcaacttgtgtgacgggtccttgcatttcacagctgcttctcactgtcttctttcctctttctctttataaataattttttttttattttattatgtattattattataaccagaaccatgtcaaatcactgtttgccacgtgtcagccaatcatttacgtttcctttcatttttgttttatacagaagcctttcgttacatcaactcaaaaggtcctttggcaattggcaatttggcaggatccaatcacttttatttgttagcttaaccttataattaccaaattaccctctttatgtattctcacttgcacatacaaaaataaaaatgtattcaaaaaatttctaaactaaaatgaaatcattatcataaaaatgtatttaggtaatatttgtaatttttttattataaaaaagaaaacgtgtatagtaacttttatttttatttttagtgagaaagaagaaagtaaggagagaaaatgaaataaatattgataaggccacctccaatgggcctgcaaaacctcaa

SEQ ID NO: 297445 - DNA, 8072 bp, Cannabis indica
ttatattatttctgatataaagcagtatatataacatgtacaataagtctataaagagaaacatatcaaataataaagatacaatgaatccctaaactaattccctaaaaatatggtacaataaaaacagcattattattatacagctatactgaataataataataatttaggaaagctgattttccaacaaatttacacacaaacatgacacacacccatgtggcaagttacttttgataagtggaacccatcttaaataaaaataattggttgaagttacttgccacataagtgtgtgtactctttgtgtgaattatgtgtgtacataccattcctcttttattattattattgttattatttatttatttatttatttattttttcatttttgcttttgataaacactgcctagggcttcacacatctgattctttttaatatgtatttaattgatttattttctggtgatctctctatcctctttatttatttatttattgtaggtattcaggcataactaccatttcgaatgggttacaagcattttggactgattgtccggaacaacacaattttgattaataatatataattctataaatatatttatacactccaaaaatattgtaagaatcataatgattagaatctaatcacatctattcaacactacttgtaggaatcttgatggaatttctggatgcagtgtgctgacttttaatgaggaaaagtacttgtttaatcactttataaagtttgtatgtttgcttgacccggatattttaatggggtgggatgttcaaggtggttcaattggatttttagcagaacgagcttcacaccttggtataggtttacttaacagcatatctcggataccatctaaaagtaagatggctgctggagatttagggatttttgaggaaaaatcacttgagaactttaatcatgagtcagctctttctgattctgctgtactggaagatgctataattgaggatgaatggggacggactcatgctagtggtgttcatattggtggcagaattgtccttaatgtttggcgattgatgcgtggtgaagttaagcttaatatgtacacaatcgaagctgttgttgatgctgtgttgagacgaaagatcccatatattaattataatgtgctgacaaaatggttttccagtggtcctggccgagcaagatatcgctgtattgaatatgtgaaagacagagcaaagttaaaccttgagataatgagtcaacttgatatggtatgatagtattattgattggtgatgtctacagattttctattacgttgtgaaatgctttgccagttgtttagaggggagtaacaactgtgtgaagtgacttgtgattgtatataacgagacctagaaagggtacttcttcatagatgaagctttaggtctgaattaattgatggaagaagactaatggtggtttgctgggaaaaatggctttatcttagttttatttatttggatttattttgaattacttctgtcgtaccttgtgagaggcttgataagtaagttaccatggctatgtttttttcctttaaaaaaggaaaaattgatactttatacctgttttggtttgacataattgtattttagggatgaatgtattgcgtcttgcattttgattagatatgtactgtgctgttgcagataaatagaacgtcagagctcgctcgtgtatttggcattgactttttctcagttttatctcgtggttcgcaatatcgtgttgagtcaatgtatttgagattggcacatacacaaaattatcttgctatttctcctgggagtcatcaggtttgtactgcatcatctttcatcgtcttctgaaagtggcagattgtacattttctctcgatattttattgaaccatgagttttgacttttgtgagatgatatgagctatttgatatgctgactgaatgaacaatgtctgacacctcaaacttgtcttgtctaggttgcctcccaacctgcaatggagtgccttcctcttgtaatggaaccagaatctggtttttatgcagatcctgtagttgttttggattttcaatctctttatccatcaatgattattgcatacaacctgtgctattctacatgccttggaaacattgcgccatcaaaggcaaatacacttggtgtcagtccgtttttgccagatccacatattctacaagatttaaaaaatcagatactgcttactccaaatggtgttatgtatgtaccaacaaaggttgtttttccaatatctgtcttaaatgattcttgcatatgtttacttaataataggtaattaggtaatgaagggatatattttttttggctccagaggatctgcatactagagattatgcgggaaaacctcatcagggttgattttatgcacttgaccatttctttccttctacttttgcatgcacttgtgtatgtttatggaagttgttttgttgcatcatacatattttgtagttcacccataaattaagaagataaaaattaatggtgcattctcatgctatagctataataaaaaactgtacgagttcttccaattaagaacacaaacacaaagcccatgatgagagaggagcgagggagattgcattaagtacatttattgatgtatacagatatgtaaaggtacattcttgatgtattcagattcgtaaaggtgtgctaccccgcttgctggaggaaatattgtccactagaattatggtgaaacaagcaatgaaaaagctgtctccttcacaacaagttcttcaaagggtatgttttttattttttcaatcaaatttggtctgctatcatgtgtgtttacattcgcttcactgctggtcttcaattcttaatatcagtccgtcatactgcttttgtagtattatgattatctgaatcatccttggctttttaaattgaacaaaaatgtttagtgaggaatcatgaaatcttgaattcatgtttattttattgtttctgtttcacgttaacatctaggtctgatttgcctgtatcccaatttgttttatgagatacgaattcctttatgatgggactgttgttctacaaaggctcagattgtgctctttgagataaacaagcatgattgttaaattgaccagttggtgctttttcttttcttcctagatatttaattcaagacaactggcattgaaactaatagcaaatgtaacatatgggtatactgctgccggatttagtggccgaatgccttgtgcagagcttgcagacagcattgttcagtgtggtcgaagtaccttagaaaaggctatatcctatgtaaatgcacaggaaaaatggaaggctgaagtcatttatggtgacactgacaggtaaccccttttctagtttacaaatggggtaaagacaagagccattctcaaggattttcctttggaatttcctcttgtttctttattctgtgggctgtggcaggtcatcattgggaatagtttgtagaatggagagctaaagggttttaggatttggcatattgtctatcatggtcaccgatcagaacctttctcattctttcctatttgtttgagaactctttaggttgactggtttccttttgtgcagtttgtttgtcctcctaaaagggcgatctgttgaagatgcccatcgaattgggaatgagatcgcctcagaagtcactgctatgaatccaaatccagttactctgaaaatggaaaaggtttatcatccatgcttccttcttacgaagaagcgatatgttggttacagttatgaaagtcctaagaatgttgaacccgtgtttgatgctaaaggtattgagacagttcgcagggatacttgtgtggctgtttccaaaatgatggagcagtctctgaggctgttctttgaacatcaggacatttctgaggtaaccgtgctttggaaaatttcactgttgcctacttattttcttgaaaccaaagcttgtactggggtaatggctttgggaattttcttcggggagatgtgttaatcatgaccatcttacaagttgattgatttttttttttaacaattttggcttctctctgtagctgtgacctttacataatgccctcaaatgttgctaaactgtattttacaggatcattataggttccatggtcttgcttttcatcttcttctactgatcacaggttaaagtatatttgctgcgtcaatggaggcggatcttatcaggaagggtgtctcttcaagattttgtttttgcaaaggaagttcgtttaggctcctacagttcaagggattcttcatcactcccaccatcagcaatagtggccactaaagcaatgagaactgatccaagggcagagccacgttatggagacagaattccttatgttgtgatacatggagagcctggggctcgcctggttgacatggtagtggatccattggaacttttggctgtcgattctccctatcgattaaatgatctgtattacattaagaaacaaataatcccagctctgcagcgggtgtttggacttgttggagcagacttgaacaagtggttcttggaaatgccccgtccagttagggaagcagtttctaaacgtccccttcatgctccaaatccccagagaaccagaatcgattattactatctctcaaaacactgtgtattgtgtggtgagttggtagaggcatcgacccatctttgccttcaatgctcccaaaatggaagtgctgcagtgacagctgtggttggaagaacttcaaaattggagagagagatgcaacaccttgctgctgtaagttttttgaccaacttaatcaattactagagatctccaactaaagcagttgcattaaattgtcatccaagcaaagagatgtaaattgtttgggactaacaccatgattaatgctgaagaatttcaacattttttttttcttctccttttctgagaaaaaaaaaaaccgactggagtatttggggaccacggtctctagctttctagctttcttttgcatatatctcttatgattatatttgttataatctaatctgtatctgttttgagtaaatgcagatatgtcgacactgtggaggtggggactggcttttggaaagcggtgttaagtgcacttcgcttgcttgctcggtgttttacgagagatctaaagtccagaaggaacttcaaggccttgcggccgttgctgctgataaaggtctctacccaaaatgtatggtcgagtggttttaattgccacaactcagcttgccgcagtccaatggtaccgtaccagtggttaccaaccatatgttcttcaatgattatattttgttgtatataatatacatgtaaatatcaaagggtctcatgttagacatacgtaatgtacgtttccattttttcttttcattatttgggtccaaatatgtaataataatcattaccttaataaaaaatgagaagtaaacgtatcacatttttgcttctagtctgattattttgattcggatttagaatctattcagacttttgctaataaactagtgtaaatataagcttgtttatttccttcctatttcttacattattaactaacataaataataatagtgtacttaaatcttaaactacgtggtactgatgaacatagttaattctttcaacatagtgcccgagtggggttttttttctctgtagcggttactctttttttttgggtttctcctgattttttgcttcatcttcctcttcgatcatggtcatgttcataggaaactgcccatcttcccactcttctttatgccggtcatccaccacaccccactccatgaactccattttgttctctagtatggtgtataaatatcatagcagcttttatgatttattcttgcgttttttgtaccctctttccctgctttgtatggaatccattattaaagatatgaattctacacttattctgtctgaaaatgagagaactgtccattctctctctgagtctgatctttctgatccgaaccaatcctccaaattcttctggtggcaagatgtctatctaacactgtcaatcctaatacttttatcaaaaagatgggagagttctggagtaacaaatgtcgttttgatgtacttgtttatgaattacactctgacttatttctcttaactatggcatgtgcaggtgaccaacacagaatccttggtgagccatggcattttttcaaccagcttattctcttgcattcccctgcctctctgcagaatgtgtctaaagatgacttgtgccatgctcaattctgggttcaaactcatcgcctccctttcttaagcagatccagtgccctggctaagaaagttggggaatgggttggagagtttattgatgtccatgaagattctttacatgaagggtggggcttttttcttcgtacgagggttcgtattgatgttactaaaccgctgatgagaggcaagatggtctctttgcctaaggtgaaggatgaatattgacttgagtttagatatgaaagtctccctattttttgttttcattgtggacttttgggacatccttttgataaatggttggctttcatggaattggttgataatggagttgaccctgaccttccttatgggctatccatgatgggggacaaactgccatcctctgtctatgaccgttatagaaatgatttctccaaagttaatgcctatcctctccttacccgtcttactagaaagactatatcctctgctatcccctctcttcaaacacatagaaatctggttgttggactatcaccaaatccttcccctttaaccacgactgaatcttccaaatctgcctccattacctctacttctaaggagaaatgtcctgaactcccactaccattcccctcttttaatcctacctccttttcatctgattttatccatcaaacaaacactgcttcgactccttttgtccatagttcccctcccaatgggcctgaaaactctcctaattataacaaactggccaacacctctgatgaagcggttgttgctgctaatcgaaaagggaaagttgtggttatttcggatggttgtgaggattttaatgacagtggtaagactttcaaacgacaggttgatcctgaaaatcttcggagtgtgctaaagaaatgtcgtggcaatgttcaaggaaagtcacatgttgatgtaccaccggatcagtatgtttctggtttgttcacggattctactgatgcgaacccttcagtttcagcggaggttgctgttaagcagcccatcgttcagcatgaaaatcataagttggaatgcaggggtttgggtaacccttcggcattcaagcatctgaagctgcttatcaaagagcagcaacctgatatgatttttattatggaaactaagttgaaatgtaattctgttgatcgttttcgttgttctttaaaattcagtaatggacttgaagtccctaggatgaggttaaagggtggtttgatgttgttatggaaggttcatgtggatgtaactcttaacactttttcaatgaattattttgatgttctggtctcgtcggataattgtcaccaatttcatttcaccggtttttatggtgctctggaatctcacttaaatatcaatacttaaaaccttttatgtagctttatttctactgattcccttccttggttggttcttggggattttaatgaacttttatgcaatgatgataaagatggggatcctcctcgtaatgatctgttaatggggaattttagagcagctgttgattattgtgctcttcatccgattcctttaatggtgataccttttggacaaataaaaatcatcatgggaacatcattagagaaagattggacagaggttttataaatgatagttggaatgattttttcaaggaaggcagagtgaagcatctcgatttctaccattcggatcatagagccattgaatatcaagtttctactcacagcatgaccgaga

SEQ ID NO: 297446 - DNA, 1797 bp, Cannabis indica
gatgggttcatgtcattgtatggtgtagaatattgattttttttaactaaaaaaaatctaaaaaaatatttcagcaagatgtactatgaagattaacttgattaaaacatatgacacgattgattgttgttttatagaggagctcctaaagcatctttactttcctccgagattcattggctggactctactttgtttaaaggggagaagctataatctccttatgaatgggaacaattagggtaattttaaaggggctaaaggtcttcatcaaggtgaccctatttctcctgttttatttattctgattatggagtaccttacaagattattcgcccgtgaagctagtaaaaaatggtttggcttccatcctttgtgcaaacagttgaagctaactagtctttgttttgttgatgatttagtcttgttcaacaccaaatcagtgcaaatcattcaggaagcttcaagtctttttgtgattcaactagccttcctgcaaataaatcaaaatccaacatctactttagaggcgttaaagatggcattaagtctcagattcttgaaatgatgcaaatggaagagggatcctttccattaaaatacttgggggttcatcttcgtccaactcaatggaaagcgtctgactgtggggttattatagataagctgaacaagaacttgaattgttgggctagccaaaacctttctttacgggtagagcgcaacttattcattcaattttgcttggaagtaggaacttttggatgagcattttcattcttccgtacaaggtaactgcaactattgataaaagttgtcgtgattttctttggggattgaatggaaatagaagcaaacttcatctcccttcttgggaaaaggtttgtcttccgaaaaagctaggtggtattagtttttgtgaaggtaggaagtggaatatggccttaatggcaaagtttctttaggctatttccaacaaacaagattgcctttgggtgagatggattaattccatctatctcaagggtgaacatttggaacctgcctataaagtaaaaaatggggtggtaattcaagaagcttttgagactaagacaagttgtcagtgaagtctccttgaagcaagctaaaaaaggagttaaacttaaagttaaacagttttaaaattctcttgttatggccaatacagttacttatgctgagacaattttgaataaactcattttcccgaagcatagatttatctactagcaagtgattaattctcaacttctaacaaaagataacttgagccagtttatgacattatcatccacacttttccctatttgtgaataaagaaaatgaagatcacagccatctatttttgaattgctttttctcgaagatggtctttaaagaaattagcaagtgactgggttttgttgactggctgaagatagtttaagagctacatcagtgctgttcttcagctatgaatgatcttaagagtcaaatttgtaatgttgttttctctgtagctttatattgtatttggaaaaatcaaaacacttgtttgtctaagtgtagcatggctatttgtattagctgggagataaagaaattgattgaaagtagagtgttgggtttgagaatccataagcttagcaaaatgaatgtgtacttgattcagtcatagagagttggtaggcattttttggttgtagttcctttgtttggggttgcttttgctccttgtggggtggctgctgccactgcctgtgtttgttccttatttggtttttgaataaagttatt

SEQ ID NO: 297447 - DNA, 1623 bp, Cannabis indica
gaaaaaaaaacaaagagaatttttgatgagttgaatattcagtttgtaagtacatgcgcattaacacgtggaaggcagggattgatcgtgttacatattaattacctctgtcactgctaaagacatgattataattcatgggaggttcaaacaaaaaaacaatataagcacgtgattgaaattttaaacaatgtgtttttttttccatataaattgaagaattagaatttattatatttatattataatatggccaacctcattaagccaacagaacatttcatcaccctttgttgttgcatcactcattttcattcttggtatcctacctaattctcatcataagtgacttgtgccaatctttgtcttaataatttgtcttcttctaaattaattgtagactactttttatataaatatatatatttatatatatatatatatataaatagaaaaagagacagaaaaaagatcgtttaggggggactagggttttcattccaagatcatgaccatccaaattgatcagccctatacttaattaatttgatgtaattatattttaatgtataaacatatgtaaaatattaataatttaatactattagtttctgtgggttaattaatattgtaacgtgcaaaaccggattaatattcattataattaacattttatgacatcaacattagaaatgtggttaaatggaacgcaaaaataaaaattaaaaataaatattggatcgatgacctcaatgtgagatcataattattagtgactgggaaaatataattgaaaaatagtgtattatttaatggtggtaaatgttagtttgaataatcatcaaactgtatggcatttagtgaccatgattaaccctaaggttcaagttaattacaatattaataggataaataagtatgataagaaattaggtatagtactcgaattaaaccaagcttgcgcccattaattttgcaagcaaaaaattagcaataattaaaagttttgtatttatggatacatatatatagactccccattgtataaggtcctacacacatcacccccaatatctcaatatttatttattcatgtctatgtttctagaaataatgatttattcggatagaataaacaaaaacccacctgacctttaaatattttattcaggaaaaataaaaggctttattattattattattacttggatgttgacttgaaatgtcaactgttatatatggcacagaattttatgcattagggtttgtttgttggtcatgactaattataattacaatttgagatgtcattgaatgtgtctatggctctttatacttatagaagtgttgattgctaagttaggaatgaaataatatacaataaattaatggtagcaacaaaatataacatgattgccttttggtttatatgtccccttcaaaataataatactaattataccaataataagattaagaaatcagaacaaataaagggtaagaaagtggagtttggaatcattacccatcacatttatttttacccggacaaatttcataataatgagccacaatttcacagctttatatatatatatatatatatatatatatatagtagga

SEQ ID NO: 297448 - DNA, 3396 bp, Cannabis indica
aaaaatctttgattaggaaagatagcactgtaattgcaaaagcactataccgtgccttagcattagggcgttacacgaaagataacatgtcaacaatgggccttatggactatttgaatgcgagaaaaaaaaaagagcaaagggcaagaaagcaaggcctcacataagcgatttgagaaacaatatcaacaatggaatccgtggacatgagctctcgaatgatcataccaggtagctagatgatcaaatagttgcattaacaaaagtcacgaaccatttggctcggaaacaaagtggttttgtatccaactcggaagatgaggatcaagagccatgagtaaagagaatcatcaaagcacaactgccaaagaatttctaaataccgcaaatggagctttacaaaggaaaaaggaccctaggacccacttatccatgtacaataggttgatgcaagcggcaagtcaatgaagatggaaaatgtttgagcttctcattgaccttgtccaaatcacacaaatactagtggaaaaggttacagtccaactctatccacaactggaaggatctacaatctatgtttcggaagtagttgtagccacgaaggactttgacatggaggtcaatttgctaacaaacatcaagcaacaatttagggagagcctcaaagcttatatccagcggattatggaagcaacaacaaggatgaaagtcaatgatgacatgaagctagtggccttgcagtcaggaatttcagcaggatccctattttggaatgaaatgcaaagacaaagttctgacacttagtcagactttttgacaagggcccaaggttttattaatcttgaagaggcatacactcaacaatttggagtgactttagcactttcaatgaacgtcagtagttctacactgtagctctcgattccgtctattctacctagcagaacctagtacatagcaccaaccgtttataagcctgctacctctgggtatgcaccccaatagaaaagtttctctggttttagagtaacacagacggaatgcagtgtcgctcccgagcagcttcagacgaaccaacaagtggaagttccagaattaggcgtaagccagtcccaaaacaaaagaagcagaaaaactcaaagtcgaagtgaagctctgaaaaaaaaatgatatgaggcccagtattgagtatactaatttgatcaacactcaagagaatgtctacagggcaacatgcaacatagttcattaaaaaaaaagccccctctgatgtaaaagggaggtaggcataaaagagatcctagtaagaggtgcgagtaccatggtgatgtcgggcacactacgaatgagtgggattacttgaagaatgagattaagaatctcataaagaatggccatctccacgagtgggttagaatcccaatcatatattcagacaaagggtagcccaaggaaaattggtcattcctggatagcataaagccataaaccctcctcagcgagagctttaccaacaagctctaggaatccaggccccttagggggtcataaatgtctaggcgttaggaaatgtccaagctcctggaccagggaaccactaccctccaagtgctgctccacccccgatggacggtcatgtcgcaatgattttcggaggcccatccatcaaaagaagtatcaaaatttcctgtaagatgtatcttaatgaactcaaataggacaggcaagtgtgtgctctagtgcaaacactagcacagaggccgcgaatattgagtatgctaatcacagaagaagatgtcatgcatgttcatttctccctcaatgacccattggtgatcgaggctccgatcaccaaaaaaagtgtgtccaagatcctggtggataatggaaatttgattaacatcctatctaaagtcactttccaagtcattgtgttgactaaagaaaacctcgtgccttccccgatctaacttcaaggtttcaatggagactctctattgcttgtagggaagacttagctcccaattatgataaatgagattatagtctaaagaaatactttctctacttttaagtactacacgattgttgtggaggactgtccaactgcgtataataccattctgggacaacctgtcctggtggattttggtgctgtaacctccatctgacacatatggatgaagttcccctgtgacaacgaaagtatgggaacggtgaagggttaccaaaacagcacatgaaagtgccataatgtctcacccaaatcagtctccgtggtccatgaagagaccaaggaacaaattcctagagcacatacccagctagcatagggggtaccctgagaagaagatgagtgagggtagaaataatggttgaaccgctagaggatgtagaaaaagtctgcataagcaaaacagatcccacaaaagccattaaagtgggacagaccctgcctccaacaataaaagaacaaattgtgtctaaagtaaatcaaaactaagacattcttgcatgaagccacgaagatatgatggggatcagtccctatgcaattttccacaccttgaacataaaccaagatgtcgacccatttaggtagaagcggagatcgcttgatctgctacccttagaggttgtgaaggtggaagtcaaaaagttaacctcaatagagttcctcagggaagctttatatccagtttggcttgtcaatttggttctagtccataacccaaatgggaccttgagaatgtgcatcgaattcacaaacctaaataggtcatgtatgaaggattgcttcccgtttcttcgaatagtctagatagtacattcgagtacaaacttttgagctttatggatgcgtactttggctacaatcagatcaaaatgcatgtagcatatcaagaatacactagcttctaaactaataaggtactactactactacctcgtaatgccttttgggcttaagaatgtcggaactgcctatcagcgcttggtgaacagaatgttcaaagatatctgtaatatcccgataagcctaatggtaaataattcgagtttatatttatactatgggttcattaggtaattagtgggattatgatcttactaatctatttcagtataaaatttaaattttgctaaaagtaagtaaataatcgcaatttgttaattacggagatttatatagcatgtgtgaatgtaatatgagctatatgtggaataaaaatatttttaggttgggcgaccctggagacttaataagtggatacataagcgtaatttgttaattacggggatttatttgaaatatgtggatataatatgagttatttgtgaaatgaaaatattttcaagtttggcgaccctggagacccgattggaggccaaaaa

SEQ ID NO: 297449 - DNA, 5742 bp, Cannabis indica
tttgagcagttctgtattaatttcacaaatgaaaagttacagcaacatttcaatcaggtaatttgtcagtttctttttgctgcttattcagctagttatttttctttgactgttatctagattaaagtagtgtcttgtgatgactttagcacgttttcaaaatggaacaagaagagtacaccaaagaggaaattgattggagttacattgaatttgtggacaatcaagatgttttggatcttattgaaaaggttaaattctttttctttcaccaggtcattatactttcttttggaataaaatcttttactaatttttttttcttaacagaaacctggtggaattgttgctcttcttgatgaagcatggtaaaatagtttcttccattttcacaattgaattttcccattgctttcttatgtttatggaaaatgatcatgttcttcctctctggtggaaggtttaaaaaatgtccaagtaaagctgagttttattcaattttcttgctttagtgtttccccctaaatcttcttaattgttattctttttccatatttcagcatgtttccaaagtcaacacatgaaacctttgcaaacaagctttatcaaacattcaaaaatcacaaacgtttcataaaaccgaaactttctcgaaccgattttaccataggccactatgctggcgaggtatgattcatacactcttggtaccaatactggttctagtttaatcattctttgaattcattttttctttatcttatcaacacaacacttcatttcaggtcctctatcaatctgaccaatttttggacaaaaacaaggactatgtggtccctgagcatcaagacttgttaggtgtttccaaatgttcttttgtagcaggccttttccccccattaaaagaagagacagctaaatcttccaagttttcttcaattggttctcgttttaaggtatatatagatacatttcatttcgaatatgttgatgtttctgctgctacaagttaactgacatttatttttcatgtcttaaactgtgcagttgcaacttcagcaactaatggagacactaaattccacagagcctcactacatcagatgtgtaaagccaaacaaccttctaaaacctgccatatttgagaatgtcaacattatgcaacaactgcggtgtggtgtaagtaaagtcatactcaaaagaaattctaagtcccttattttttctttttcttttattctttcacatagcattgtataatatcaatgtagggtgttctagaggcaatcagaatcagctgtgctggatatcctactcgcaaacctttctttgaattcattaaccgatttggactcctcgcccctgaagccttggaaggaaggtaagtatactctctcaacacatcttggctattggttcactttgtcaaatatgtacttttaaggcagaactagtttctaactcgtttggtaatgtactcacaagcagctacgatgaaaaagttgcttgcaaaaagattctagaaaagaaggcacttaaagggtttcaggtatatgaagagtagtttttctatttacatttgactctcatgttttacttagctttgaaatggtgtcatgcagataggtaaaacaaaggtattcttaagggccggtcagatggcggaattggatgcaagaagagcagaggtactcagtagtgcagcaaagactattcagagacgcataaggacgcaccaggctcgaaagcagttcattgcattgcgaaaggctactatagttgtgcaatcaatatggagaggttagacattttacaagtatatcaatattacatatcagtattcatggacaagactgggatatacaatgagtatgttgtttggtgtattgtgtaggaagactggcttgcaagattttcgagaacatgaggagggaggcagctgctgttaaaattcagaaaaacttacgcagataccatgctaggaaatcatacaagtcgcttcatgtctcagtgcttgtcttgcagacaggtttaagagcaatggctgctcgaaaagaatttagattcaggaagcaaaccaaagcagccatacttattcaggtaatacaccataatatttagcaatgcagaggatcttcactctaaactgtcatcccaagacacaaaagctaaacttaaggtgtatgcagacacggtggcgctgtcacaaatccgctgcatactataagaagctcaagaagagctcaattctaacacaatgcagatggagaggaagagttgcaagaagggaacttagaaagctcaaaatggtcagtactaagtcagttagtctcatgtataaagatttttactgagagtgagcatacactatggtgattataataaaggaactatacaaactaagtttgtttacactagcaatttgatgaatagaattgaatattatgttgctatgtttttattcaagcactttcttactttctttatcactctttaattttctacaggaggctagagaaacaggtgcgcttaaagaagcaaaggataagcttgaaaaaaccgtggaggaacttacttggcgtctacaattggagaaacgtttaagggtaatgttcatggcttgtagaagaatattgataagtgctaagaaatcctaatctatgaacctttttttagactatactcataaaaaaggaatgaaacaatgcttgcagactgacttagaagaagcaaaagcccaggaggttacaaagttgcagaactctttacaagaaatgcagagcaaggttgatgaaacaaatgcattacttgtcaaggaacgagaagctgcaaagaaggccatagaagaagcacctcctgtgatacaagaaactcaagtacttgttgaagataccgaaaagattgattctttaaaagcagaagtagatggcttaaaggtaaagctctttatatcaattaacaaaaaggatagtcacatgttataacaaatattctcttgatgagaatgtcactaaaagaatgtcagttttaattgttaatatggggaacatggtttcattttcaggattcattgaagtcagagaaggataaagctgaagacttcgagagaaagtacaatgaatctcaagaatctaatgaacaaagacgtaaaaagctagaagatacagagaaaaaaactcaactgcttcaagaatcattgaccaggtaacataatctctaacatttagttgaattacagcatgttactgctattttgtcctagttttcttttgtattatccatgttcattgaaatacttaaaacttccttgattaggcttgaagagaagctcaccaatttggaatcagaaaatcaagttctacgccaacaagctgtgtcaatggcaccaaataagttcctttccgggcgttctagatcaattcttcaggtattacacaaacagacatcaaatcttagatttggctatattaacactgcagctaagcttacaatttttactgttatatgttaattgacagagaggtggtgaaagtggtcattttggtgtggatgtgaagccaactgtggtaaggaaagaaactaagctatttgatgtaatagtttaagggaaatttttgaatagtattgaaccaaattttcattcttaagttttacttttttcggttaatgacattgctcaggacctgcatagctcttcactgaaccatagggaatcatctgaagtagaggacaagcctcagaaatcacttaatgaaaaacaacaagagaatcaagagcttctcattagatgtattgcacagcaccttggattctctgcaaacagacctattgctgcttgtataatatacaaatgccttttgcagtggagatcttttgaagttgagagaacaagtgtctttgacaggatcatccaaactataggccatgccattgaggttccgaaatctcccaaactcatcatgttcttttatgactttcactcttttctaacacactcaagttacttattcaatcctacaactgggattttcagactcaagacaacaatgacgttttggcctattggctatccaatgcctcaacactcctcttacttctccagaggacactcaaagcaagtggggctgccggaatgactcctcaacgccgccgttcatcatcagccactctcttcggaagaatgacacaggtaaacacaagtttttttgtccccaaaaacctttacattcattattaacactttttggtggtgtggctctagagtttccgtggaaccccacaaggagtcaatctttcattgatcaatggtggtatgaatggtggagtggacagtttgagacaagttgaagctaagtacccagctctgcttttcaaacagcaactcactgcatatgtagaaaagatatatggaatgattagagataatttgaagaaagaaatatctcctctgcttggcttatgcatacaggtttgttactatatttcattaaaaacttccttattattatctagtacttaatattcagtcatcttcttcaaacttaaatatgatttattctttaaatatgattaaggcaccaagaacatcaagagcaagcttggtaaagggatcatcaagatcagttgccaacactgaagcccagagagctcttattgctcactggcaagggattgttggtagtcttggaaacttcttaaacactttgaaagcaaatcatgttagtatagcaaaaaccctctttaaaattctagtccttgtatccaaaatcttctcttttttgtttaatcattatttattatttattttctaacaggtgcctccattcttggtccgtaaagtgtttacacagatattttctttcatcaacgttcaactattcaacaggtatatatatttatatatataaatatataattcagtactgaacggaacaagtatatatttgtttatacatattgacttgttcaattgtgtttgtgtttgcagccttctactaagacgagagtgttgttcgtttagtaatggtgagtatgttaaagctggattagctgaactagaacactggtgttacaaggcaactgatgaggtacttaatattgaacttaattactgtcattaaaattgaagaatatatctatcagtttcaatataacattaatattcatatatatatatatatataaacagtatgcaggttcagcctgggatgagctcaagcatataagacaagccattgggtttctggtaataattgatctataccctcgtcacttgaaatttatatacttggatgaaaaaaaaagtgcaataataagttgtacactaaaactttattttttcttctttttctttttcatattcaggttatacatcaaaagcccaagaaaacattagatgaaataagtcatgatttgtgcccggtatgtaaatgtatatgaatattattattgggaatggatcttatccaatattttttatagaaaataaaatgcatcccattcccatcccattatgtactgcatacattaattaaggtttatgcactatatacttagtttgatatacttttttttttctaataattgattaataatagtcttattaaccaactcttgatctaataattgtgaccttgaacacaatgaatgtgaatggaagtaattaattttggtctttgaataggtgcttagcatacaacagctgtaccggatcagtacaatgtactgggatgacaaatatgg

SEQ ID NO: 297450 - DNA, 1775 bp, Cannabis indica
agaattaaaaaaaaagaaaaaaaactaagctttcaatctaaggcaatgtattcattctaccaattatataaagtgattttacaccataccttttggggtccaataaaacaagttgagtgactatgaagatcatggattctcatcattcttaaaaagagagaatgtggacataaattaaataaaatttttgcaatccaattttaatatgtataaaattatattttttatacttttaaaattgttaaaaatctttttaaattattgaaattattaaatttaaaattttttaatcaattttaataaaaaaaatttcagatagatgaaaattaagagacataatttaatatgtattaaagttcgagaagcataatttagtaaatatcaaaatttaaaacataatttagtacataaataattactaaattaataaaattgaagacaattaaataaaatctttaaatccagaaaatttaaaccggaaaattttgcaaattgtagaaggtaaaaattctaattaaaattaaacaagatagaacaacagctaattaatattgatttatatattagataataacaataaggtagaatttttacaatgaaaaaacaattacatttatatactaattattataaaaaaaattctaatagaatgcctacccttttccatggcttgaaattttcacttttttccaaaagagtaagggaacaatagatcttgtgtagtaattatcaaaacaatcacacataacatataagaacaatctagctagttacattaacaaataacaataataataataaaattaaaaaaaaaaataaaaaaaaaaataaaataaaaaatcaatctttgatttgaatctcatcaaaacattattacaatttcttgtctttttcattaaaattcaggatctgggtattctccatttgatgaaactacaagtgggttctgttcccttgatcgaaattctttttgtaattgaatgaatcgtacttacaagtttgaggcaaacccactcgttctgatcccaaaagctttcttatctcagacctaactttataaaagacatgtcttaagcttcctctgttatgagacccaagtagcttagtctcttcctcgttcatttccagatcgctagcgaaagtgggctttcttgataaggcccaggcccaggcccaatcccaccatttcttaatagagctacctgcatattcacccatggaggagactgacttcgttctgcgcatagcccatgaagcagcttcagatgatgaaattgagggcttaatgttgagtgaaagagatgatagtcttcgtcggatctgaccttgctcttttgggtctgtagattgtgagaccggaaggaaattactacttcgcttttgaaacgtttcgactatagaactcatggtagagaaaatgctctcttttattttcttgggaaaaagagaaagagaaaatatgaagaagaaaggtttgaggtttgtgagttttaagagaagagaaggaaatgaaagtgtttggtttggtttggtttggggttcactcacagctctataacaggctggttttattcgttttttgtagtagttttttcttggggtgtggtgggctcctccatctttaacccccaacaaaatatatttatatttaggctaattagtgttttttccccgaactttgatatgtattaaatcatgtccttaaaattttttggctgttaaaaattccccataaattattgagattgttagatttaaggacttttatctgattt

SEQ ID NO: 297451 - DNA, 12804 bp, Cannabis indica
tgtcaattttgacatgaggtgtaaaaatctctttattttataagcgttgtttagtggtagaaatttttttattgacattcccttttctttatttaggtcaagtattcgaatttatcatagcctcttttcattaggatgaattatgtttaattttttgagaaactagcttgttataatgagatcatttttaatgggtcaggaactctctcaggatgcataccgatgatccaattaaagcagaataacctataaaatctctataactagtacgtagtttccaaaattatcaaaattaccaaagaaatagaaaataaatctattccacgtaattattttttttagttttatatatataaagattggtgtacttcttctaatctcataagtagctagtattattagtgattagtgggtaattaaaatatgcattccatacttcttaaagtttataaaatctttttgataaacatcaaacatcattcaatatctacttcaatatctttttcacaaacatattcctcatatttttgatttaataattattataaaaaatcactaattatttgtaaaatattatatagttgtattagataagaatgatgttactgttattaaatatcgatattaaattacaataataacattataacatctaaatctctttcactacaatattcatattaaaatagtttcgattcatattgtgagaaaattgatatgcaaatttagagtacccaaaattggtaagtgtatcaaaagtaagagatcaagaggggagggaccagagcttgggaatgacaatggtgaatgtgactttgaaaaaccatgcaaattctcataaacccaaatcacatttttagccctacactacactttctatcacctattataaaatgttcttgctttggtgggacacagttcactcttcttcttcttcttctttttcttattttaatgttattttgttttcttgttccactaagcacaaacacttaaattattgttatctttttgatagaagaatcatttgtgcacaatttatatgcaacaaaacattagggattaggcaagtactttaaaattaaatatagcaaagcttaaaaaaacttataatataccattgtattcatataaatttaaaatatcaagttttacttggtgaataatagtgtttaatctcaaactcaagtgttttaaaaatttgaaattaccccaaaaataaacttaaatataaaacccaataatcacaagcactctattaaaattatgccaattatacatttgattttacatttttaacctcgagaacctaaaccatagcaaacacacccttattaatatactatatcaatttattttgagaatagttaaatactagtggtgttcaatacaacttgtaatatcacctgtcattattaatataatttaacatcgacaataaagctttcactgtaaaagtagagaggtttctttcatttaaaatattttattatttataggcatatttaaacattcacaagtcacaatattagcgttacgactaacataataaagaaatactcctaaaaaactaaataataaaacttatattaaaataaataacccaaatttcagtatatcattctcacacattttaatttaataaatactataaaaattactaactcataaaacaccactagtattggagatgaatgattatttaatatgggatgagtggcaaacattacacaagtgtaaagctctttctaccactttctctccaattcatttcatttgttcccatattggacacactcaacccaactgcctctccactcactgtttcataacatttactaataatttatgtcacaaaaacccatttgagttatatatataaatttggaaaaaaggtaaaaacactagtggaatttgaaaaatgtaatctttacaaaggttgaacttgattatgctatatatcacaaacccaatgatatttatctacacagccactgtaaattgcttccaattttcaatatatgaataaaagaatgaccaatgaccaatatgctcatcctcattatatatgatgtcaatctatatttatatatgtaaatgtgatgacatacccctaaaaggtttaggggtaactctcatgtattgggagataaattcactctttcaatgggtaatgatgaattgggatgaatatatcattatctattttcttctccattcaagttttgggatactgtcattgagtcactagaattgctttcgatgcatcaagatgattaaggcgacaggttccaagaagatactcggggagctcctccgttgtgttagcctgagaaaggacgattcatcgacattattacatcaacatttcatattgtcatggtgaaaaaaaaaaggttgaagattgttctacctgtacaagaaatgccatctcaataactagattgtttaggtacccaagaacaagactaactacacccctggcaaccgtcgatgacccaatatcgatcccgagctggatgtagccatatggtttaggattagtaacatggataacaaaaccacaataattttcacaactcaattttatctctattattggcggcgaaatttccttatagttcatactcccaagggccgactttggaatttagtgggctataggaaaaatatatttttgggttttattgtgaaaaagaaaatataatatttttcaaaatccgtaaaaaaaaatatgtaattttacaagaaggattttttttgggacctctgggccctaggcacgggcctaacctgtctatagctaggaccgggcctaatactcccttatgtaaggaaacttgagcaaattcaaagtcttcgtccaatttagctgttatctgtcgaattcttctggccaaatgtacacattgccaaacaaataaaattatttggaccaataaaaacatgtcacatgcacacttgtcagaccaagctagcagagatcaatcaaattggacaaatatttgcttatgtttcctcacataggagagtttgacaaaaaaaaaaaagaattaactatacgaaaataaaaacataaggagattcagccgccaattactatagtatttatagacttaaatcacatgtgtttcctttagtcaattaaggacaacacaatgctcaaaactaatacttaaatccacatatcaatttaatgcttgttgatgattgtacaatgtacatcttgaacaaagcaatggaaaagtatgtgagctattatgaaatttcataatgatggaaaaagggttatctttttcagtacatacctccaagtagtttttcccatgaaaatagttcatttcaagagcttgaccaatgagacatgctttctttcccacactttgcttaacaatccatgaaccctgaaaaatgacaaaaaatcgagtttcattatcatgcacatagcatgacaaccagtttcaaacttgttaccacgcaacttgcatgacgaggcatagtttgcataccgagatttcacaaataagaaactaataaaatcacatttgacggtttgtttttgaaaaggacacttagcagttaagatgtgatatgattacattgcaatgcagcggtttcaaagaagacaaatctaaaagcaacttctcagctcttaaaatatgatcaattcctgactgaactttctataaagaaatctatttattttatgtttcttgttgaagaacattaaattaagttccttccaatttttgtggtaacatatgttttatgcttttctacatttgaccaatgcatataatggagtgtgaatatgttctgcctgatcagttgctaataaacaaatattaatttccttctaaaacaagaatggttcacccgaaactactaaaaaaaaacgatgtatccgatagaataatcctaaggtagaaatattctatcagatatttcccaaataaacactagtaatgaattcctcaagtgatctatattctgaaaaacagtgagaaagttacaatatcaagctttcgagaggctggtctctccaaattcccaatctttcgagaggattggtctcttcacaaagagcctactcttagtcttatctaactccaagctaatctaaatgaggttgctcactcgaaagacttaggctacctaagattataattggtctaatagaattaaaacgcttaagaaaactcaacctatgtacataagaagagactaaatatatcatttaatcattttgtgatatacatcataagttttaggcttatcaatatctctatgtgtgtgcatgtatgtgagatagagaggtccaaatattgttaatttctttttcaaaaataaaatcttaactcatcttgtttgtatatttaacaagaaatgggaacacaaaatcacaggcagctcacaagcatgataatttcatcaaactcagaattttcacttgaatctcgaactcgattgaccacaataagcattagatgtaccaaccttcgatatatacggtatgagcttaaacctcgaatttctatatgcatcatcccccttgacaaaactctctagcaacggtgaatcttctaacggagtattcatcatatagtaaagcgctaggctataagttgtcgagcccgggacctaatggaaacgaaataaattgtgagcatcactataatggaagaaaatcttcaaactacaaacacaaaaggaacatgattttacctgtatgttgacaatgaagaagaattcggatccaccttgtgctgcatatttctgcagaagaaaaaattgtaaaagttaaatgattatcgcgcctatgaaatccgtgaaacaattactacatgctatgaattacatcaacaataatcttaaaacttgcaactatatataacctgaacaatgctttcgggacgccctcctagatcgtcttcacgcttgtcagatcttaaccaatcggcagcaaccatttgcattaaggtgcccttcgccttaacctaaaagtaatgttatcattttctatcaacacacattgtgttcacattaaacgaaaattatcttgagactgcttggcttgatagattagttccaattaaacaatttcgattcttaccttctgacggtcttccaaataactctttccccgaattaggaaagtagagggatctgttgttgcccagctgcaaggcaaattacaagttggatctttcggaagagttgagccataacagcagggaatactgttactgtcttccattgtcatatcttgtaagtctacatagccccttttctgaactgtagcatgtgataacaatgaaaaagattatattaacaaacaatttatttgccaatgaatgctaataccgaaatagacagagaaacgaaccggcaagatcatgcaattttttcacaaaaccagcagcggttgataactttgggtggcgtgcatcctgaaaatcacaatgtcattaaagctcaacgagaaaaacataagagaaaccgatagagatcatgcccagcaaaaatatgtcatggaaaaaataatgcccagaggcaatctggccgaactaaaggtacattaaatcccgaacacattagagcctcatcgaaatttgatagtcaattataagtttagtccacaaataatcatttgaaatcatgtactcatacgcataatattatcatgtgaaaccaatttcaacatcactagaaccacaatcatgtcatttcggactttttttcttagaagactcggttcaactcatgcaagtttatggattgatgatccccttatatggccattcaagatccttcaaatgaaaatctaaaccccctttctaataatggtagtgaaagagtatatgtagctgctattacctgcgaatttgtctctggaacgaaatcaggcacccaatcattttctgactgatcataatccgaaggttctggaacatcaaaaaattcatcagcagcatcattcaggctaacaaggctagcatgttccgatggtgctttatctacttcttcggctatatttcccttattgcttccatctctagtcgttgtttgaacatcaaatctgttctccatctcattttgacatgacccgttattcattgtcaactctccagatgaaaattcagatgaagaatatccttgcttagctctaaataactcgcgcaacgctataatttgaaaagaaaaaaaaaaacaacaaactccataagatatgggacgtttgcagttacattggcgtgtaaaattctttaatagctgaaaactttaccggcaactctcccgagcatttggatggttatggatctagctgaagagctacgaatatacgatttccagaatttccaatcaatagcaagcatgtgttttacaactgattgtttcccttgattcaccggcgatataacatatcctccacctaaagaaagtgttaggcataaaattatgtcaatacaataacacttcgaatacaaacaacaattattgaaacaaaaatttgtgagaaatattatatagttataatttatagtttcaacttctaaagcgtacattacttttaaggcaggcacgaacgtagcctttctgaggcggacatttcttgtgatatacggaatgatagagaataactgtgacaagaataatcaaaatatgtaaaatttctgtatcgatacaataagattgatcaaaacgcgaatatttcctcaaacatgatattaccgtatgttccatcctcttcccttctccaataacgccgcaataatagatctctccgttgcattcccctgcaaaatttgagaaagtaatgaataacatgaaaagatacacttgctaaaaggagataaaacttagaaaattagatcatgtacaataaactgtgggacgggactgaccatggcaaccaatcactatacaactgcttgtgaataatatcggtatggccatcaaggtgttcaaccacactgcccttgtggaaacagaaatcccacctacaagtcgatatgaaaactttaacttttggcaagaatcgaatttgcaacttatatatgaataagattgaagcattaacaaagtactactcaaaaattgatacagaaattatcaagtagagctttccatacaatttatataataaacaaaagattggacctcaaatccctcaatcccgttccctccttcctagcgttgcaacccgattttccaacagatttatcaattttcttaatagttctggtttctaaatttaaatgtgcagagtcctagttagacattaaatacgaaattgcttccataggaaccttttttttaagttagattaggaactttggatacatatataaataactgaaagaaatatagtactaaatatctgtggacaaagcaatgtacaatatataaatcaaagtcatacaattttcattctctgtttaagtaccatgttcctcggtattttatcttcaaaactcatggttcattttagacaatttaatcacatcaaagagacataagtgtgctcatcaaacttactgtgatcttgagggaccaagagacataagtgtttgaaagatggcttctgaagttccatcaacaacacccaccgccattatagcaggatgatcgtcccactggccaagagagcaacatggataataaaaaggtcttttagaacccaattaatggggaataaacatttatttatattcaagacaaaaataccaagttatcaaccaacctttccatgagagtctctatcctttgcttctttaaacaatcgtaaacctgaaaatagaaaaacaaaagaagaagttcataaacctgcataaaccattgattttcgacaaagcttcaactaccccacaaaagctcattctcaccattttgacatccgaaaattgtccatggagaaggcgcgataacatctgatgtcataggatctgtatgtgtagaacaaatagtccaatctatcgcattaataggactagtcttgctcggtccacccaatctatgtgcagaaaaatgttgtttttagttatttatcgcaaaacaactatagaatttactatgcactgggtaataacacatcaacttcactgagaataatgtgaataaaaacatatcgggcacaaagggagatctagaagattggtgaaataagaaaaaggaatagtgagttacaggtgtgttaaaaaagaatagtggacaagaagctatacacctaaatgattgccatcttctctttgaacagttcaaaacatcatcaactagttctggaccaccctgcatatgtttcattgttaagcattagtgataagcttaatcaaatttccaataaactaacaaaactgataggtataaacctttaaagctgcttcttgaaatgaatgaatccatcttgctgcttcttcgggacaacttgctcccaactatgaaataaagtactcaaaatattaacaaaacttattgtcaagctaacacactttttctcaaacatgtaccttaagttggtcgttgtgattggaggtattgtacaaagtgaatatgaagaagacctgaaagttgtattaagaattggttcttaataagaaactagtgatactaactaaattaggaagcttaagcaaatagatgatacatcaccagtaaagaaatacattatatgaagtccatacttttcgatgaatgctttcccgaccattgtccatgacgcgaatacaagaatcaataatagcacttttaacaggttcctgaagatataaaacatattataagtttgtaaaccaaaaacattgtaagtcaaaaaaaaaagaagtaaacaatataatacataaaggctacaccttcattcaaagaacatattaatcaagatactaattgagcttccaaagtctcctcatgccataactttacttactccataaattgattttgaaagagtaattgtaataaaatgcaagatcttcctcaagatatactaagagatttttcagtacaattaagtatcgggtctcaaataagtatctggtcccaaataacttaatataataacttttatggaatattgctaaccattcttaaggtgtcacctcatagtggcattagatgagactgatacctaatagtaatgctccatagttggatgaatacttccaaacacctcaaatgataacatatggataactctcacataataatgcctattctatgtacatagtaacattagctaaatacatcatattttataaacatgggaaaacaatgacaaacaacacaaataccacaaatgtaaaactatttaaattgaaacaagcttggccttagtttaatcccaatcttgatcttccattaaaattgaactaatataataaatagaatcttcaaacacataagctaagaaagtgaaataaatacatcaatcatcagcacttcaagaagagaactccaccactcaataatgacatcttcagttctattatcctacaataccattttcaaattcaacaccataaatacaatcacacacaagcttagaatccaaaaattccaaagagctgaatgaacaacaccaactaatccaaacaaaactcaatgaattgaagcaaagaaaaacctcatcatttgaagaaggaactgacttaaaacttctgagatggtgatcttcaagaacaaaataccgtttccttgagtactgcaacccaaaccgattggacctaatgagatacaaccaaccctccattcttccatcaatttgagaagaacccatttcgaaaaatcccaacttttttaacaaatcaaagactaaaaattcgaattaaatattgtacatatatataaatgtataatactaaaaatccatgcaaaaaatacagaaaaatggttccttttctgggtaaagctgagcttttcacagaaaactgattccgaagaagatgaagacggtgaatctctgaaacctgttaaggaatacagagaatcactgctttcgttctcggaaatattgaattgttaatatatatattttttttctctctgttatttaaaaagaaaaaatgaagaaggaatagttgcttataagagacaaagattgcctggcaatacaatgcatgtgaaattactaatttacccctgtcttgctttaactcaatcactttatttttttgcccctttttttctttttcatggcagacaaattcttgattggctcccactttttccctttttcttcttccctctctcttttattttatttaattttttaattaagatgtggagtgtatgttgatggatttattaattgatgagtattggtattaggcatcatatgattagttagtgtttaatattatttaaataaaaagtaatttcggtgtaaatatttgagtttaattttcagttataaatcagtacttaagtttaatttttaatggtaattatattaaagttatatttttaaaatttttgtaagtactaaacgttaaattttaagtcaatagtcatatgatatttttagattggttcaaattattaaatttttatttttatttaaaaattaatttaaatatatcgataagaaaataatatgtgaataagaaaatgatcattgacttgactaacatttaacggttaagtacttatgaaatttataaaaatataactttatacattattaccgtcaaaaattaaatatgagtaaatatctgcaaccaagaattaaacttaggtatttatactacaaattactcttaaataaatgatgttttatgaataataagtgatttttttaatgggtattgctaaaggtgtctagtatcactgttctataaatagtatgtaattttttataacatttattaaaataaaataagcggaatttaatattaaattttattaatattgatattacacatataaagatgtcagacactatgtgttctttagtattttttttaataataattaataaattaaaatatacgaaacttttgtacaatcctataagtggaagtgagaaaaatatgtgaaatcaaacaattaattatattgataatgataaaatagtttatggtaattttgaactctaatagtctaaataattaattaagttaatttttcatcattggattgaatgaggctaattataatagtcaaaaactttgatggaatgttttatccgacaaatggattgattgaatgatttattatataggtactttacttaatgagatcttgaatttttattattatttaaaaaaaaaataattagatcttgaattattgttacatccaaaatgcttgttgttatagagaatattattaagtaattattttctcaaatggggttgaaatttataaacttatagccatgtgtgtcaattgaattaccatattcaaaaaaagaaagaaagaaaaagaaaaagaattaagacttgtgttaagtcatttttcaacacaataataaagtataggtcaattcattgtatagattgtaaattgcacgtattaatttttgtcttattataagaaacaaaaaataataattcattttcataacatggcacttgcattgaatccatattattattttaatattttactaagtgacaaagaaaattaaataatgcaactctcactatctctaatctctatcttcctaaataaataaataaataaaattattggaatgacttgtttaattgaagatcatatatattgctagaaaaatgataaactgcaattttttttatagctttcactataattaactccttttttatttgagttcacataatttatataaattaattgtagaatatgttattttgttcaccacatataatttgctcatttattaattttattaattacaccataatttgcagcagctcattcatactattaattatttgtagtgaaatgccattattagacatgaggactcaatcatatataaacagaacatgaactaataaaccaaaggttaaaaatagactaacacaaaatttttttagtggttctacctgttaggtcccgttcttccatcttgttgggccgctaactcaccttaatttcgacattaatatgatattattcgctttgcgcttaagcattcatggttttatttttgggcacatttctcaaaaaatcccatactaatggagtaggtataacacttatattcaagacaactcttgcctattattccaatgtaagacttgagttgataccccaacaatcctcctctcaaatcaaggatcacatactcgtggcctcccttccagcgaaaccaccttatatcgccgcttatagccaatggaactcggtgcctggctatcacctttgtcaggaatgactttcaacagaggtcctatcaccgatctttatcttgtaccgccgtaatcatcaacgagacatgtcacctcaatatcaggtagattttcgaaacaaggcaccatatagaattttaattgcgaggtcatcacattgagggcttcccccacacatcacaaatgcagtttactatctcagcgctcctaaacttttagctctgataccacttgttgggccccgttcttccaccttgtcgggctgctacctcacattgactcccacattagtattatattgtttgctttgagcttaagccctcacaattttattattggaaatcttcctaaaaggtctcatactaatgaagtaagtagaactggggctgagcattggtcggtttggtcggttttttttttattaaaaaaatccaaatttcagttttcggtctggattggtgtaatccgaaaa

SEQ ID NO: 297452 - DNA, 5199 bp, Cannabis indica
ctctctctctctctctcttgccttcttattaagctaagtctccataattgtgtttttccctcttacccttttcacctctattgttaaattgagctttaagatataaatatggagtttgtgtctcagcttttgtgctagctttgagttttggtttctgggtttttagttttaggaaatgggtactaataatgatcaagataagaatgtgggcagagagcttgagtgttgttctgaagaaactactactcttgttactcctaatcacaatcataaggtcctaattacttccctttttttgttaagctttatctttgtgttgggttattgctgttttttgtgttttgatcatatatatgtgttttttaaactcttttaatcttttgggtcattagatctgttagtgtttattcatgttaggtagtgtttaactcaattagttttacttattaaaatttatgattgcatgaattaaagatttgtaatttcctaaaataagctgaggaataagccttaaaacattgattgacaggaccccaagtgtgaatttggtagaaatagattatagaaatatgtagaatctgcagtgaatttggaccccagtttttatgtcttgttacctctttatttcttttgttctgaaatatacaaaggaatcttgggatcctttaatgatggattttattgaattagaattatctatgttcagctgaaactactgaccaaagttccatctagtttgggacttggatttttccttgttaaccatttcaacttcatttaaaaggccatactttattatggtgtacttccttgatgatggggttttcacttttcaaagacacaactttttcaccccatttcaagtgatcaagttgcaaaatttaagttgaaaataaccatccaaacccatctttgacatttgagtaaataacagcataagacactaacagagtctttattgacaaaattcgacgaaattacagttttactatcattaggtacttatgtcgctaagaaaatattaaatttatctttaggagttatgccataattatacctatattatgatatcttcattcaatgaaatagtatgcctgtgttattcattcatggttcaattgacataagcttgttttctttagcggcacaagtatcaaatgttagtaaaactgtaatctgttcaaaacactaacagagtctgtattgacgaatcaagaacttatattgcttaaaaaaattaagtttatattggttacaaaatcaaaactttgggagttatggcacaattatacctattttatgttatcttcattcaatgaaatagtatgcctttgtgttgttcattcatggttcaattgacataagcttgttttgttcaggttgaagtgtcaattaacataactgaagaaacacaagaagttcatccatggaagaggccgaatctcgtcttggagatacccccaagagcatccgatgtatcatcatcggatttcattggaataaagatgccaccaacaccaagtcctaacccaaagaaagtgaatttcaccttgacacccagctctactaattcaaaggttcatggatctccaggtccatcttcatccaaaggaaaatcatgtaaaaaaagtctctttccgaaactcagcttcatttatcgaacttcttcagatgttgagaagggtgataacatagcttcagaagcatcagttacagcgccacgagagaagcctactactatctcgagatcaatgtcccttactaagctgttcacaccgaggataaacagaacatcgtcactacctgtaactcaaattatggattcaaacccggaatccacacccagtggaagtgtaggtagcactccaaacataattgtaagtgttatgattcatggttgttaagattcatggttgtttcgctttgatatgctttttaactttagctattgtgtatgttcagaaaaaaggaaaccaaaaccgaaatatagctcgctcactttcagtccctgtcaataacaaagagaaaagcttaaagaggatggactcattttttcgagtgattccttccactcctcgagtgaaagaaggcgatgtagtatcgattggctcgccaacaactgatgctggtatgtttgattggttatgacttatatttggctgtttttatggttaatcttatgctaatttttcttgtgttagtggttggtttagaaaatgatgatgcgaatggtgaagacatacccgaagaagaggctgtctgtagaatttgtttcgttgaactatgtgaaggtggcgagactcttaagatggaatgtagttgcaaaggagaacttgctcttgcccatcaagaatgtgctgtgaaatggtttagcatcaaaggtaacaagacctgtgatatatgcaagcaagaggttcgaaacctatctgtcacattgttacgagtccaaagtgttcatactcgaagtggtggagctagatctcaacaactcgatgctaatggtttcaggcaagtaaacataattgtgatcttgttttagtatgtttagcataagatgtaaatgctctaattctatttcgacttcaaatcaacagggtttggcaagaagtgcctgttcttgtcattatcagcatgcttgcctacttttgtttccttgagcagctcctggtaaagattagaaatcattatggttctgtcatttctacttctttgttaattgtcaatggtgatgtgatatgttatatgtgttctctatgcaggtgggaaaaatgggaacaggagcaatagccatatcgcttccattttcttgtgtacttggtctcctctcatctatgaccgcatcaaccatgggtatgtcaactaagattcttcaaagctttactgtttactcattcttactacttatctggtttaaattctcgaagattgtttgtcgcttacctgactttttctttttgtttcggtgtttagtgaagagaaggtttgtctgggtctatgcatcgattcagttcgctctggtggttctatttgcacacatattttactccttggtaagatgaaacttaactgtcctttccctatagatagaaatcactgctccataggaaaatttggctagaaattgtgttcggttgatgatgcaatgtctttgttcggccttttcttaacaaaccaactagtgactttggaaaagaatttagtcttgttaaatcactacacattctataacgcgatcttgtaaagtttgtgcacgacaggatttttgagctcccgagatctctatactaacttttgactcgtttttttttcatgtaacttttgtgggctcagattcatgtgcaagcagttctgtgtattctccttgcgacatttgctggacttggtgttgccatgagcggaagctccataattgtcgagtttttaagatggaaaagaagatggcgagcttcgaccgaacaaagacaaagctcccaaatattgccataataaaccaattcctgtgactttacatttagatacaggataggaaggatcaccttcatcatgtctagtgggatttgagttttagttggggttgaggaacacccattagtggcttatacaaatatgtttttagcatggggttgagagcatttttagtgtttttttgtaatattttggttgcaagattttgaatctatatatcttttttgtttttttacaccaattgtacagggttttgatagttatatatagctagtgaatttgaccattttgaggttaagaagtttgaatgaaatggaatttgatacaacactggatttacattatcataagttagaatgatatgattataatttgcttgttctctatagtaaatattctcttagaactgtcactatgtgtaatattttcgatattaattttattctatatgggaaatgcgtctgtttacgctgcttcttgattcttcacaaccgaagtgaagccaagctcttcaaaatcattaagtttccaaattatggatttgaagccataatcctatttcaagcacactcaagtgatatcgaattcttcttcaattgtagaatggaatgtatgtaagaacattagtacaaactttaccataataaaggattattgagacaaacttcaatcgtgaaatttaaatttagtgttaaattaacactaaaaaagcatacttttagtgttaaatttattttttattttaaccataatactaaaaatattttttattattatatataaatacaaataatatatattcaaaaattttaattattaaaccattatttaatttaaaaactaaaaaaaataattttaccgtggtttacagaactcactaaatttggcaagacacgataaataatcttatttataaatttaggtatgcagtctaattagattatatttaatgcgaaactacattatttttgatattttgcaagccaattggagatggcctggaacatatatgatatgttcaacaaatgtatttttttttttttgagtgtagcgtaatagtattttacaatcatatattagcttaaaggtatttgaaacatgcttatttttctcttttctcaaaagattaatattatttagtatgaaaggattcaaatagagttactctaattttctttgcttgaaccttcctcctagtaataatttgacatactaagatccctattataaattaaaaatcccacatgaaaaatgaaaatcattcttcctgtccatatgtgatatattggcaattaaactaattaatagaattgaatcaaaagtaaagatattaacttacaagaatattaaacttcacaaaatttgggtgaaaatatgtttaaaattcacatgcaatttttaatcatttaattttttttacgggatataatatttacaccgcacaaatttataagctttaaattgaattgttgttgttgctggtacaataatatatttatagaacatgtaatagggatatttttttatgtcaaatataccaataattttttttttgttataaatctaatggaataagtaaatgtttaaactcaaatatattttaaattcattatgaaaaaagcttaaattttaatttaaataaatatatattatataaatattcaagatataagattttttttaaggagttttttcataaatatatatataaaaatatagtataatttatttttt

SEQ ID NO: 297453 - DNA, 6217 bp, Cannabis indica
ttttttattttctaagtatagaaaatcaaatttctctatgtctaatcatactcgtgtctttgtagtttgtgttaatttcgtactgtgttaaaaaatctgacctgtatttacaatagtatttgtaacaatgatcatatttatttggggtggtaaagccgttaaagtaacgtccgtataaaaggaacttcaaaacgacattcagagtgtttcacattcacacacaacactgagtaaccatttctctcctctatcatgaccgcatgcttcttcacctctcttccctccattacctctaaccgtttctctcttccatggcctccttcaacttcaaaccctaaccgcttcatttcccctacttttctcacaaaatcctccattgattcacctagattttcccccacagttctccgacaaggtccggggcttgtttcaccggaagacctttctttgccccccaccccaccggttgagaccgccactgaagaaaacgaggaagttcttagtgtttttgatggagctgcggaagaggataatatatttgatgataaggccccaacttctttgcctagagttaagaagaagacagaggaagatgatgaattagataacaggtttaagcttcggaatggaagagaggtcaatttctatatttatcgttatgttatgtgtgttttcctaggggagagacccaaaaaaagataaaaggcaaagaaaactgcttgtgttgtattattgatgaatcatgtagattagagattcctgatagaataaaatcagtggtagtctggtaatttgaatgcttcgcgctgatagttagtgattgagtttgagtgaacttgttaattattatcttgaatacctaccttgacagagtaacgaaacttattttctttcaggtttttgaagaaaaagcataccttgttggcgttgagcgcaaaggtgatacagagtactcctttggcatagaggaatcactgaaggaactggcccagttggcagacaccgcagggcttatggttgttggttccacgtatcaaaagcaagtatctgattctcagctctagcatagctgttgttgtcttcagaataggggtcgtttgcacataattgtatgtgccaggatactggtaactaatggtttttgtgtggttacatcttattttttctcactatacaggttagcttctccgaacccaaggacttacattggatctggcaaggtggcagaaatcaagactgctattcgtgccttggacaccgagactgtaatatttgatgatgagctatcagcagggtaaggacattattcttaactaccatcattaatctggatattgtatgtatctttacatcattgttaattgttatgcaaatggtaattatatctaaccaggctttaacaatttgagaaattgggatcattgatgtgagctttgattaaagattactgaaaattttaattatcatagcagtttcttcgttcagcatgatgctgcggttcttattctgacttttccggaagtgcatggatttttgttaattttgttttccctgttaacttcaactaaattttaactagtattttgtaggtcaatattaactacgtatgtataaatgtctatattttttcttatttagaaatgttatcttaataggcaattgcgcaatttggaaaagtgttttggtggagatgtaagagtttgtgatcgcactgccctcatcctagatatttttaaccagcgtgcggcaactcatgaagcagctttgcaggtaagctaatatgtatccttttggttaattttaataagatatctgcatatgaaatctttgccaacaacttggcatgatagaagcttgaggataatggggtcatgttagtatggtatttttcttcttttggggttcttactttatgtgtgagaattgaaaagtgaaatcatttataaagttttcccttgacttctataaattttcaggtagcattggcacaaatggaataccaattgcctcgattaacaaaaatgtggactcatcttgagcgtcaagcaggaggcaaggtgaaggggatgggagagaaacaaattgaagtggacaaacgtatcttacgcactcaagtaagtaactttgattgagttgcaagaactgtcccttgcatagaataggataagtaaatcagccttttgctgagggaaatttgagctcctatgctatctagtatgccttactaacaaaacaggccaacctttataattatcaccaaagataagcttgttttttttcttctagacattgcacaaaattgcccatcccaataataagtcccccctctctctctcacacaaaccgtctcttaagatctttttctctctacttctatggcaccaccacctcctccccaaagtggcccagctaccactgctgttaatatcatcctcgccacctcatatcaccattgaagcacctatatacctatgtataatttatataaatagggaacgactcgaatggggtaaaaaagtaccttaaggtggggcatggtctaatgaagcacttctaatatatataaatattcatatatatatatatattatgatagcattcattgtacttgtagtttttaaaaagttatggacaacttagtgatttaaagtgcccaaagcagggtgtaaataattgttttccacgcatatgaaaatgaaaaaatttaagcacggttgcaacaaactgtttgagaattgatttgagtacagtcagaaatttttagaatgaatactgccatgaaaaaacatataatattaagtgcctcaattagactataccccaccacaggcaattatgctttcctcgttgcttcctatatataaatatatttttttaatgttctaaattagtcagaatgaaattcaaaacttagatcctcaaaatattcacttaaaacactaattttaaaggtttcaaacacatttacatctatgagttttgcttgcttttttcattttttttcttttatggtcagatctaatctctgatttttcttttaataattttgagatgctctagtgatgctcccgttttcatacacttttacggtgctcccatggaaaagttgatttttttaggccaatttcaagtttcatgggaacatagtgcatcgtttcttacctcaaaaataatgaaaattgggaacatctgtagagcatcaatgaatcattgctaagcatcgcaaaagcattgtcttgattaaaattctgtagattttctgagatttagatctgagaaaaaaaaaagaaacaaccataaccaataaagaattgaagtagtactttcccaccatggggaggtggtggttatgccattgtgatagagagaaagagagcttgagaaatggaagagggggcttttagtgagtgcaattatgtcccatgatttgaaaaaagctgattttcttatgttttttttaataaggcatactagacagcatagaaactcaaatttccctagttaagcctgcttactaacaaattttagactgcaaaatagtttacatattcaagatgcttcagttataacctttgttttctccatatgtataatctgttaaagcatgtttggatggttagattggtgtgctcaagaaggagttggaatctgttcgaaaacatagaaagcaatacagaactcgacgcacttctgtacccgtcccagtggtgtctttggtatgtatgtgcacaaatcttgggtagcaatgtttttattgtaccttcctaatatttgtagtcatctaatgcttgacataagactttaggttggttacacaaatgctggaaagagcacacttctaaatcaattgactggagctaatgtacttgctgaggatcgattatttgcaaccctcgatccaactactagaagggttcaggtcagttacatcaggaaactcttgttttcaccacattacaaagtgttattatatgtctaataaatttcaatgaggaataagtgaagcaagctttgatttcctttgcagttatttagagttaccacttgcccccctttctactgaaaatatgtaccttttgacaatctattagaaattgatgtagcctataatctatggcttagaatcactttagtagttgtaattttagttggttgtacctttaataaagatgcttgtttccaatgtcccactttctagacgaagaacgggaaagagtttctgcttacagatactgttggtttcattcaaaaattacctactaccctggtaatatactttcctgtgtgatgaatttctcaccgtcatttctcttttcaactggaattaaatcttctcttttctcaggttgctgcttttagagcaacactagaggagataacagaatcatcgttgttagtgcatgtagtggacatcaggtacaattttggaaaattgtcaaaaagacatgtttcgggtgataatttagaacttatttgttttttctgtcaactccagccatcctctagcccagcaacaaatagatgctgtagacaaagttttagcggatctggatgtctcctcaattccaaaattgattgtttggaacaaggtataatgatctctaaaatgtatgttcctaggtgctaatacctttgctctagtttctttcgggaaactagagaatacatgtagtttcatgttaggtgaattttccaaaccccatttcttttgggaaactggagaatatatgtgtccaagggctatatgtatactaaaaaatccaaactgctctaacttcaccactttgctagtgtatcttccaacctatgaacatatcaccgaaagcacacattaaaaactcaaaattttgtgaatcaattaatactaatcctgaatggtaccttggttcaggatttggctacttgatcatacttcatgcgttgatttatttattttatttgaatatcaagttgcactggaaggcttataggttgagtataattgtatttaaaatgtccgtaatatattgcatcttgcgacttggtatgatgatatgaatgatgacaggttgataaggttgccaatcctgaaaaattaaagttagaagcacagaaaagaggtgatatagtatgtgtgtctgctttaaatggcgaagggttgcttgagttctgtaatgcagtccaggatagattaaaggtagattgcttaaccttgatgcgcttgcaaaatttattttgacttcgtttcataactaaaaattggtaattttttatttcatttgtggtaatgtcgttttttgaaaaacaatttgcaacaggatactatggtatggatcgaagccttgatcccttttgagaaaggggagcttttaagtactgtacatcaggttggcatggtagagagaactgtaagtaatcatgtagttttgtctgtgtgagctcgctttgttctgatctgaacttgggatatcttaaataaaaagtgttttgttcaattcgaatatttattaacaaaaattcacaggaatacacggagaatgggacattagtgaaggcacacgtgcctcttcgatttgcaaggctactcacacctatgaggcaacactgtattacctgatttcagtttttttctcgaatgagcgtgagtatgggatgaggggtcttaaatcgttactctgcgcacaggttccttgattcaatttagctggtgttaaaaaacatatgttcatcataaggcagattaatcgaatttgacaggtgcagcgtaagagatgctcttccaaagtaaatggctgtaatggtttatcattttgtacatatgttgtaatgttaatggtttttcagtacctgatctctccaatacaaggaaaggggtgcaaaaataaagtgtaaaatttgaaatgcattattaatttatgatatgagctacatcaagtatggatgaaaagatcattttctgaaaaagtaggtagctagaaaatctgaaataatcaggttagcattcttttgataaattccttctattccattttaaaaaattgccttttgttttttttttatctggtgaaggttgagttatccaacgttatgtcttatgtgttgcttttaatttgaggatggacgcttaggggtgttcattggatcacatccaatggatttggacccatccaatccaatccaattatttattggatgttggatttttccatccgatccaatccaattgaattgagtcatc

SEQ ID NO: 297454 - DNA, 6085 bp, Cannabis indica
tgatggatggaatgatgactaagtggtatatgtgtaataaaacaaactttgtaagtaaaaaagtaagtataagcgtgtatgagtaattttgtaataaattgtgtaaaatagatttttcatgtaaaaatttctattttttttcttgtctttttagtttatttatttttcatggcagattttttttaatggtgacagattaattacttgaatacattgaatgcttcattgattggggttctgtgttgagtgtcagaatgattttaaatcttactaacaaaacgtgatttttatgattcattattaggaaaatgacttgtctatgctgaaaaacaaacaatactaacccaaacctatgattgttctttccattattagtatatagctttcaatttattttagctatggagagcaaataactacaattatataataaattgtgttctatatcttcctatgtattttcacaaaaacagaaaccaaagtgtatttattaagtgtatcaagctgaaaaaaaaaattaaagatattttagggtctttatgatattattttttagattttttattttgaataattagtatttttttttttgctttttaacttttttacactactaaattatactctttgtacagattttaataatacatatcaaaatacaatttttacagtaaaatagtcattttatcacattttattcaattttatcgtaaaattattgaagtagtaagtagtagatggtagttgaaaaataaatacaaattaaatagggaaatttacaaaattactagaatttgggttaacttttacaaaaatactgccacacgaaaatcttttcaaaaatattgtgtttttataaaacaccagtaaaacacaaagcataacaactcaaaacaacagtagaacaccaataaaacactagtagaacaccagtcaaaacttaacacaacatactgtagtatgaaacttataaaaaaacacagtaaaaaagtaaaaaataccacctggcagtatttttgtaaaaaaatagtaaaagttaatataccatgtaaatttcccattaaatatcataaacatttttacattaataaataataaaataaaagactttttcctctaaagtgcttatataaggcaaatccactctgtaatattattacatcaataaagataataaaacagagtagagctttttactctgcgataactcatatggtatcagacgacataactcaatccattacaatggtgtgaagcactcgaggtcaccttagcgacacttcttctcagaccatccttgagccccaaatctcagtctgaggtgatgagcatgtccttgtcgactctttggtagctcctcctcgctgcaattcttcaagatctgatcgacccattcaggaagacccttcaagtcattgcttcctgagtgccggagatcacttaggccttctctaggtctcttctgttcggactgaaatcaattactactcctggaaacgagccatatccatggcccttgctgcaaagaataagaccctcttcatcgatggtacactccctcgcccctaagctcgcgatccttttctttgatcttgggttcgttgcaacaacatggtgatgtcatagcttcttcaagctgtctccaaaaaaattgcccaaagtatcatgttcttcgatcttgcagcagatatgtggaatgatttggctgatcaattcaaccaagaaaacggttcaagagtctttcaactccaaactaatctcactcatctttaacaaggcgatatatcttgacatcaactcatacttcaccaagttgaaatcatattggaatgaactgaaagaattttaacctgcgactacctgtacttgtggcgccatgcaaactctcctagactattacaatcgaaatcaagctctccagttcttgacagaactcaatgaatcctatgctttggtaagaactcaaatccttcttattgaccctataccttctatttctaagtgttttcaatgatggttcaagaagaaagacaacgcaccattggttttgttcttcctattgctttagttgcccatccaccaccagctccaaacaatccatttcatataaagaagcctcaaccatcttgcacttactgcaaaaaatctggtcattacatcaataagtgctattttttacatggattttcccttgtatatggtgacaagaagaaaattaagaatgacaaatctattgccaatcaaacctctccttcctaggatactactactgatccaacatcctctatcgacatcataagtcaccgttaagcaaaaacgtttgccatttatttctaatcataattttgctctgccacatttgatttgattcaccttgatatttggagacctttcacttccataagcatcgaaggctacaaatattttctaaccattgtcgatgataaatcccaattcacttggacatatctactcaaagcaaaatctgatgtccaaaatatcatactagatttttttttactttcatatgcactcagttctctgccaaaatcaaggttggtcgaactgataatgcaaatgaacttaatcttcattccttctttgctttaaagggtgttcttcgatatcattcttgtgtagaacgatcccaaaaaaatttcgtaattgaacggaaacatcaacatcttctcaaggtagtccgagcacttttattccagtcccatataccaatttgctactggtcctatatcattaggactgccacatacttgataaaccgcaccccgtttgccctcttcaaagggctcacttcctttgaagtgctatacaacaaaactcccacttatgatcatctacgaagctttagatgtcttccctatgactctattctcttgtctcaacaacacaaattctcccccacaaagtcgtgcctccgtttttattggctatcctaatgggatgaaagcctatgctttgttggatctccaaatcaatcaaatatatcagtctcaaaatgttattttccatgaaaaaatcttcccatttaataataattcccccatctcatgtactgatttttttttatcttaatgtgctcccttctaacagcatccctttaggtgtacaatctgacaataatcatcacacattcgcaccccatgcttctcccaatggatccacacaacccacacaaactatcttcaacctcaccaaatcattactcgtactgggagattatctcacaaaccatcatatctcgatgattatgcttgttaactaactgttgctttagtttcaaccatgcatcccattgataatcatcttcattatactattcttccccctattttatagcagctgcccttgttgccaacactatcattgaacccacatcctatgaagctgcatcaaaaattgaagtgtggaacaatggcatggacaatgaaacacaagctttagcaaaagataaaacttggatagtcaccactcttcctccaggccataaacctattggctgcaagtatgtttataaagtcaaatataaccaacaaggtgaggtaggatgctacaaagctcgccttgtcgctaaaggttataaccagaaaccaagtgttgataacattcaaacatatgccctcgtggctaaattcaacactctcaaaatcaggttggcattagcagccatcaaccaatagattcttcaccaaatagatttcaatacgccttccttcatggtgacctccatgaagaggtatacatgaagcttcccctagttacaaaccaactcaaccccttccccctaatcatgtatgaaaactacagaagagtctttatggcctcaagcaaacctctaaacaatggtatgagaaacttagctctacctttctaattgatggtttcattcaatcaccattcgataattcgctcttcaaccaaaaaaaaaaaaatccacaaaattcattgcactcatgatataatagtttctagcaacaataatcaagccatacttaaattcaaacaaaaactagacatcaaattcaaacttaaagatattggctcattgcgtttcttattaagatcagagattattcaaaccacttcaggcatatcgatatctcaaaggcccttcactttgcaattacttttcgagagtggcttccttggctgcaaaccaacccctactcccatggaacccaatctaaaactaagcaaagatcaaggagatcttctccatgacccttcctcctactgaagccttattgggaagcttgtttatctcaacatttcttggctcgatatctcttatgtcgtaaattgcctaagtcaatatctaacatcatcaagattaccacatctgaacgctacccacgtaatattacaatacttaaaaggcacccgaggacagggtttgttcttcccatcctctagtaccctcgcatctcagcatatgttgaaaccaacttatttccatctgcaatttgattgaaacttttttctgatgctgattgggggagttgtcaagatacgaggcgctctattactggtattatgtgttcttagaatcctctgtcgtctcgtggaaattaaaaaaaacaataaacggtctctcaatcctctgcggaagctaaatatcgcgatatgatacacgccacttgtgaagtcacctggatcattgccatactcatggactttggaatcactcccaccattcatgtccttctatattgtgacaatgatgctactattcacatctctaagaattccgtttaccacgagcggaccaagcatgtggagatagacttccacatcgtctgggagaaagtcaaccaatgcacactcaagatgatacatgtttcctccaagcacaacctagcagatgtctttactaaagctttgtttccctctcagtatctaaacattatctccaagatgggtgtacaaaacttgtacactccaccttgatgggggctattagacatgtgattgtattgattttgttatattagttagtttaggtggttaggattattaactaattctttctacttagtctcctttagctgaactgcttatataaagtaaatccactctgcaatatcattacattcaagtcttgtctcgggaggaagcaaccacacttcaagcagatagaagggagttcgagttcttgaaggttcagaaagattcattcatgaaggtgtaatgacatacaattagagagaatctacttatgcataagtcaaaaactttatatttttacgatcttactaatgaatatctctagatgtggccccatgaattagtaacaatctgcaaataaaaaatttatgtgtttttattttttatacttttattatttgctagctttctggtttgtacttacagaatattgagctgcagatacaaaatatctgtttagtatcgcattaatattcaataatattaatgagactctagaaccccaatcttctagctatattcagcccgaatttaaaattatttttcctacgattatgttttaaaatatgtatttaaaaacatgttgtgggactggctttgtgaaggttggtggtgtgattagtagggaagtgttgggagttgtttgggctgcttgggcagtgtgggtgttgttgagaatgagaagtcatgggtgctccttcaatagtttggttgtgtcgaatgttgtttgatcattgagtgttgtaggtggtgccacttgtcatttaacttgaagtggcccatacacttacttctattgctagtttgtttggtaattgtaattgggcaaatttctgaatttttatgttgatgcaattgccttttataaaaagagtcatagactctcctattatctaggaagtcattttttcttcttacatagaaaacacatttggtgaagctactttcttaattctttctaatacttagagcttgtttgactgtgttttcagttttcaattttcaatttttaaaagtgagaatagaaaacagttttttgacattttaaaaatttaatagtgtttggcacaaaatttaaaaaactgtttttagattttttttttacgaaaaaaaaatcaatatttta

SEQ ID NO: 297455 - DNA, 965 bp, Cannabis indica
caaactcattaaggcaggggtcgagaattctaggattcataagaactagagaaaggaaaaccaccaagaacattctctgtaataaaaactttcatgaatacacagactcgtggactaaggctcattaatgtcccaaccacgtaaaaatctctctcattaattccttatagctttcgtaaatattattattatattggttgccgaaaacttcggtcaacaattttattgctcaattcattacttgaattctgtgatctcttgatttattgtttcttgattgtgtttcgtgtttgttggtttagtatagtgaatcgtaggttattaattgtttccgtgtcgcacgagtaaacttcatacattttatcatacacgagatctcatgtactttctccaatacacttgtgcagttagaagattaccgagagcaacttttgtaatcttagtttgttgcttacatgactcggtaggcatgacgaattcatttatagttaatttcattgtattatttttatgaataaaaataaataatgttggaaaagtatatagtacacatttttaaataagtgttttgaaatatttaaaagagtttttattttaattatttttcatagatgtcgcaattatttaacatgatatctaataatttagaaaatttgaaatttacaaaactagttggaacactaaacaatcctagctaattagagtgttgttattagataccagtggtacttaataccttctagacatgtcgctttacaattaattagcgatactcattaaaaactattatattaaaatatgtgagatcagatacttaattagaccaataataatatgaacatataaaaaaataataaacaccattaatatcttttagcagataattactataatctataactactataaaagtgagaattaggggtgttcataaaaaccgaaaaccgaaaccgaccatcaaaccg

SEQ ID NO: 297456 - DNA, 2289 bp, Cannabis indica
ccaacaattttaataatttagaggaattttcaacagccaaaaaagttgatggggtatgatttggtatatgccaaaattcagggggcaaaaatcctaattagcatataagtaattctcgacaaattagtgcggtataattataaataggtattttgattgagactgagttcagaatcatattatgtgttatgactattaaataattttatttgattaattgtgtgagttaatgaaatgtcaatgccttttgatccattttatgatgtttttagcctgttgccacttattgctatgttgataaaggaattttatttaatataagtgatattcatatttctttcagccttgaagagcttcatcgcccctttcattctctctttccctctttgtgaaaaaaacttagtttttacttgattgcttggtgaatcctatagttagtgattgtgcaagctaattgaggtatgaatttgattctttaatatttgaattttttaatttaattttaggatttgagttcatatatgccgttcttgaatttgagtactgatgatgatgtttttgggtgataattgcatagctatgataattagagtcatagttgaagttgattagtgggttttaatcttgttttgcttcatgtattttgttatgcgatgtttttgagctgaaacttaaactttgagcatgaatttaagttaaatttcaagtttctaagttgtattttggtgtatttttagagtaaaaaatcttgatttttaatttaggcatcgaccctattcttgggagttgcgacctttattttttttcgttgtttttgctctctgtaacaagagagccacgaccttagttgcagagtcccggcccttatagttcaatagaaccgaaatttttcgtaacttgttttggcgataattttttatttctagctccattttggatgtttatatcgttgaaaatcttgtgaagaactctaccatttagtctatattttgaaacctagttatttataaatattgttatgtgattggaaattaattctattgtgtttgtacttgagtttgtgactaggagtaccaccacttaatcaagattatctgtcaattggaattctccactaacgttggaatctaggtaagaaaatgaactttacacttagagtttaatgctatgacaccttttatatgctatgtagttacatatataggaataagtgttagggctatcactctaaaagttcctatatatgaaaatatgttaaataagttgtgtggataaatgacaagggttatgcatctaagatataattagattagacttggtaatcaaaccaagataaatcctaataaggcattataaactaaatagacatgtgggcataacacgcggtgtctatacaaaatagatctaagatgtggtggcatcattataaataatgtggcgtgttatattagtgtagaggcatagttattaacaaagtggcgtattaaatgagataaatgttacgtgattattttgggtttgattatgctttcttactaggccttatgagtttgagggctttgacggtagattgtacatgttctggtcaagttagaccataaaggtcaggtcctatagggatattacgttagaacatgcaccatataagaacacacaaatttaagttgtatatgttttaagatattacaatatcttaaaacatataaatttaagccaccacacaacatgcaccatataagaatacacaaatttaagttgtaagtttgattgaagaaaaaatcaccaccaactatggaggacacttcaacacctttgaatattccaattggtccaacatctaaaggaagttttcctaaaaccaccatacattcttttattactctccttctgccttttcgtagtaagtttaatactatgtttggtagaaggaagaagtgagtggatggagaggagatgaatgaaagaaatgggaggagataataaatctacttatttggcaagagaaattaggggagggaacagagttagatggagagtaaatccttccaaattcttaatttagaattcttccattaatagaaggtttcacactccctctttaattattagaaattaaaaatatacattcttaatatattattaagaattggagttttttcaattttgaattaatattactttaaataaatatttatactactactaagcaaaaataaacatttatattatttattaatttcaaatagaaatttttacatgaaaaatttattttacacaatttattacaaa

SEQ ID NO: 297457 - DNA, 4200 bp, Cannabis indica
aaaagaaagtgattccatcttgttataaagaataatcttcagtttttcacttattattgttctgtcaaaataacatgtggggaaccacatgtgtgaagtttagctttctttgaaaagccaaaaacaaaaccagagacagatctcccataaccttttttttttttacaatttagaatatttttagtttttataccttatcccattggcctttttgtgctatttttctcgctggaactggaagttaaaaaagataccactggcatcaaagaccaatatgcagaaagaaaacccaaattaaaaatacatgaaatcaatgggcatataacaattatattatattggcctctcaatacaatagtagaatttattccaactgaattcatcttttgttgaaagtaattgtttaatggctaatcttaaaaatagcactttgaaaagacataaaaatatctcaaatataacatcttattgagataaaagataatactacgaaatattataaaaataattcgacagaataaatttaactcaagaaggaaaactaaagttcccataatgatgtaaggaacaatatttgtttccttaatttcttttaacttatatatatatacataaattttgatacagatcttaatatatattttgtgatacattaaggagacttgaaccctcaacacttccacaatgacacaaaataatttatatatatatatgtgaagatttttcagtgaagtggaactaatataggattgggtccaactacttgggttgagtcaagctcaagctaaaatcccataactttttggccaagtccttgttcttagccatagagcttggtttggctttgttgctgtccaagaaatactcacctgttacacccttaagctgtggatgcaaagccacatagcattgagttgctgctccctgtaacaaaatttaatccaaaacaataaatacattaaatattaggtaatctttgttgggatttagttgaacactgattatatcatggccctgatacctgttgaggagttttgatcatgtgttgtattacatattttccaaggactctgatagtgtctgcaccaagccaaaacataaggttttaattttttttcttaacaatgcctaggattatgctcatacatcttggaaaaaattatttgaatctctgtaagcttgaagatataccgaatactaaacccgagttgcgaagaatgttggtagctactgcacctggatgaactgaatttgcagttatgctcactccttctgcctattgagccaattttcaaggaagttacagaaagaatgaaataaagaagaactgtaattggaaatagcatttaggaaaatagaatttcttttcaagatcactacgaaaaatgacatttttgaagtagccttcttgacacactcaacaccctattagaaaagcttttttttttcatgaattatcaaaatcattttagaaagtatctaattgcaccaattactctttattaatcaatatactaagttacggtggtcaaatttgaattggttacctttaaatttcttgcaagctcattagcatgcaatatattggcaagctttgattgtccataagcagagaagttcttgtacctgtatagagaaaccaactagaaaatcaagcaaaagaaagaagtcaaaagaaaatcttcatcaaacatttcaagtcaaaagtggtacttttttttgtcattaatcttgtcaaaacgaatccctttagaagaaagacgatgagcctctgatgatacaatcacaattctcccctccttgttgctttcttttgacgtttttttcattgtctccaataaaaggtttgtcagaagaaaatgacctacaaaaaattggtatatttctcagctcaaacaatggtagaaatattggaataataattgctgttatgtgtggttaaagaaaaaatcatacctaaatgatttgtagcgaactgaagttcaattttatcttgggaaagagtgaatggagtacccatcactcctgcattgttactttctcacaaagagtcaaaaactataagcttcaaaacttagtactgaatctaaagaagaagaaaaaacatatttaagacaaaaaataaagtgagtcattgaaacattttcagtatagtaactcaatttcttacatgaggagattcagactaagaccggatgacctataatctgaggcgaattttcgaactgatgccattgagcttaaatctagttccttgacatcaattttggcggcggggtttttgttgatgatttcttctttcacactctttcctgcagccatgttcctcacagccatagtgacatgaacaccgcgcagtgcaagaacacgcgttgtttctgctccaataccacttgatgctcctgaaacaagatcaagagtggatatgagaaatggaacaaatgcaaggagtgtaataacatgtatttagggacaaaagaaaaggattgaaatttgaaaccttttctccaaactgaaaccttgttgcttataggacttgttagaaatactcatattaaacataacagtattatataagatttgagttacacctttttgattaattaaattgagaatctaaatcttttctctgaaaaaagtctgttcctcttaacttattataatatactatcaaaagtgatgttatgtttcacatttcttcattgttgatcactattcagtccttaaagtcgttcattaaggattgtattaaaaatagtttcacattataatagtgagaaaaacactatctgtagcttttatatagtataaagttaactccacttaacaaggtacaactaaagcccaacaagcacatgtttagtggacattatagattgcaacatatttaagaccaataatttccattcagacaccaaattttagttacaacataacaaagtagaagctgtttgtttcatctcttcctcctcatattttctcagtaactaaacacataatagaatggaatacagaccaaaataagaaaaaccaagataacaactttgagaaataacaaaaaaaaaccaagaaaaaaaaactacctgtaacaattgcagtgagaccagttccatcaattccacgagtaacctcctcagctgtagaacgagcagagaacccagatggtcccttaacaccaaatatccacatttttattcctataataaaatcaatattaacttaattgaatcactgacatataccctttaaattcagtgcacttcgtcttttgttattttctattattagtttctctcgagaacattagaagccacagaaacctggtaaccactaaccacaaagtcaaactgccttccaacagttttatctttgtcatctagtgagggaactctgtatttaataactttgttaggaaatttggattagtaattaaatcatcccaagagtcctatttgtctatagataacccaatttacttaatcccacctaataattattttaaatgcaatttttaatacacgagatagtcatattgaatgattttaaaatattttacataaaatatagtatatatccaataatacaacaccaacagctcaagataatattaaataattgaaaaattatttcttttaatgcttaagttaaaatttaattgatagtatgatctattagaacatgtctaatcatattttctattttttagtagaattttagctaacataactagaaggttaaaatatttattactttaataatttattttattagtatgttataagaaaagcctaataagaaacatgttagtagtctgataactgaatagacacatgttttaatttctaaaataagtggtaattagtaaattattcttgatcacgatctgaccaggctagctcttggtttcccaggctgttctattagaatggacgccaggcgaaacacgaggagttagggtaacacgatcgaatctagtggtggtcagggagttcagattccttcgaatatacgtggccgaggcagggcacgcagtcgaggagatgttaacccgtcgcaagctgccgaagaatgggaaagtaggttagccagaatcattgaacaagacgaagagatcagacgcctgaggcagcagggtgctcctgcaatgcctgctccagagatgcaggtggcttcttgttgggaattattttaccaggatct

SEQ ID NO: 297458 - DNA, 3176 bp, Cannabis indica
aaatatggacatgaacatgatgaataaatttcgtgtcatgtcgaacccgtaaaattttatgtcgtgttcgctaatattttgaatgaaagatcctaattgtaactgtttaagaaaacacaaagtccgatttatttttttaaaaagatataaaaaatcttttaattttttatattcataaaatctatatacaaaagatccttttaattatttaaattagtaattcatcaaaaacaaagacaatataaatcctttaaaaatctatattgattaatgtggtaacaaaggagtctcgatatgcaagatcaaacagaaaacaaattataagaacaataattaggacaaagtttaggattgaatcaaaacatacacaaaaaaaaaatttatagtataggacacgatttaaaaccgtcgcctataccctgttataggcgacggttttaaaccgtcaggaagtctacattagcgacggtttttaaccgtcgcctattttgcctattttgcgacggtcgtatataggcgacggttaaaaacgtcaggaaaaaaattaattacttttctttgatttgataattgtacactaaaatagtaaaaaaaaaacctccataaaatgattataatttttgtttaaaatagacaaatatttgccataaaaatacttaaaactatgtcatagagataaaattaaaacacttaaaactatgttacatagacaaggattaattgctatattaaaaatcgaattacagtaacaaaatacaatcccaatcaagccatttatgtccaaaaaaactcagcagatcttaccagagaaaaaaaaataacctttgatagctatagatttaagaaaaaaatctattattattttttttgtaatacctttctactaaaaaaaagttattggatgattaaaaatctaaaactctccaacattatgttgcaaattcttttaatttaattgtgtgaaagcaaaaaagcaggctaggccgaatgaatattaaatattatttatgtattctatatgtttttttttgtttgtttgtttggattgaaataatttagtcattggtggtttaagaatattaatattcaatacatttgatctgttataattatatgtatattttaattaatttgctgtagtcataggccgattgggatacaaggttatccaatgaaagatattgaatttatgagaagataatctctaattacaatattattgtcatatagctagttagggtttgttaagaaaaatatttatatatatatatatatattagctatttattttaaaattaagaatttgtttctaattagcaagttaaaacaaattgttgtggaacttcttgttcatgatgagaatcaagccaactcagcattagttataagcggaggcttagtcttaaggtataacgattaagataaaattaaattttggggctatatatacaatttaattattattaaaataatagttataatattttagtataacggtaaagtttcttaaaaatattaagagttatctttcataggtgcacattaatattttttaaaaaaataaaaaggtagaggttgagaattgagtttttgatctcttaacttaaagtaagattttttaccactacactaaataatgtttgttatattttttttattatttaatattttatctatatactaataatttatttttttacaattttggaatattcctgagtgttcgggagtccgaggctcacgcctgactcacctaccctcagagtcgaccctaaagacaaataaacatcaaaacaagcatgataactctacttactaaataataccttgttgagatgcactactaaagttctataaaataccattccaatatggtgcgattcgtactgaatttgttagtcacatttccccgtgtggtcctaatatttttgtgctaaaatgatttgagaattatggttataatattctcttgtatcttgtgcatttgtgccagttataattatgcctaacggctgccttttactgtgtgtaaatttatttctctaaatgaaagtatccaacttcattaattattgagttgagaattatattcattatttatctttcattctttcttaaatttatcttggtatcagagcaatgcaaggtctacgtccattgctaatcttggaaatgatggccaacaacttgctatcattgctgcatcccaaacaacaagctcacctgtatataactctactatatattacgggcaatattattagtagcaataatagccaatctcatctccataacccctaatctcagcaacactttagcacatttaaccaatatttttttaacctagattgtaataattatacttcgtgaaaattaatagtctcgaccactattagagaccatagacttaataattttcttaatggtaccacatgttttcgaatttatgagctgtatacctcgaagacttaaagttaactaaggcaggcccgctcataggcccaataaattaataaattggcccacaacagagtcgacctatggctctggatccaaatgttagtccaacttagagacatgataaggtcggaccgtattggtcaaggaaggagcatatgcctagaagacacaaggtccatcaaagtgtatttggatatatacctttatgggataatccaaaacgggcaactaaagagacatctataagtatccgaaaactatcctcgcagcattctccaaacacaggatccctccaagtcaaaaatttatcccctacgtatgaggagtgtgtgcaccaccaaaagggacatactttggtccaatgccatattctttgacatttattacaattttataactcatagattatttactttggattcaattcaggcttttatgtttaataaatttggaatatagtatatatatatatgtattttgattgggtcttacacctaaataggtattattgagaaaatttgagattttatatacttaatttttctttctaattaaaaaaaattattttttttacattatataggttgaggttgttccattacataaagaaaattatacgacaaaaaaaaagataagaaaaaaagttgagtttcacttagatattttttatataaacatattttttgtatagtataaaagagatattttttgatatt

SEQ ID NO: 297459 - DNA, 4871 bp, Cannabis indica
acccacttttataaataatgtctttattagactcttaaattaatgtaaattatgtagtagatttaaatagagagtgaatatataatggacaacacattactaaaaaaaaaaaaattaaatatattttaataaaataaaatataaaagtatctttgaataataatgaatatagtttagtttttaacttatccctttctacaaaatggtagcattagacaagtgttaacatcaaaatcccaagagtcagtgattataaatgaggacaagagaaggaccaatcacatttggttcttaaagtacaacaaaaaaaaatgaagggtcggtaaaactcgggattagtaaggagataaataaataaaagtctttagcaaattttgactaaataaaacaaaaagaaagaaagtagtgaaaaaaaacagtgagtggaactagaagaaatgctggagtgacattgatgagtgagtgaatgagagcaagaaggaactaaagaagaataatccatctgaattcgaaatcggaatgagtggcggtggagaaggtgagtccttggagtatactcccacatggatcgtcgccgtcgtctgctctgtcatcgtcgccatttctctcgccgcggagcgtcttctccactatctcggtcaggttttgaataataagaaccagaagcctctatacgaggccttgcagaagatcaaggaggagttgatgcttttgggtttcatttcgcttctcctcactgtttcgcagaacacaatttcaaagttttgcgtacctgcttctttggtcgacaatctcctcccttgtaagcgccctcatcaggaagctaatgattcgtcttcttcaacctctcatcacatctccggctctttcagacgccttcttgaagaaacttccactgctcatttgggttattgcgctcataaggtctgatctgatctaacccatatctttagttgttgttgtttttttaggggttaaacaaaattttgaatctttttctataaatatactttcccaaaagggactattcgctttaatctaattgtaatagtacaaatatgtttgtttcactttttttctttattgtagaaaaaagtaccccttttatccgttgaagcattgcaccatttgcatatctttatcttcgtcctagccattgtccatgtcactttctgtgttctcactgttgtgtttggaggggtaaaggtaagtatatcttccaaattcatatgcttctctctcttttatactctactactttgtttttgttcgtttatgagaaatatttctacacaactagatacgtcaatggaaacgttgggaggattctattgcaaatgagagttatgacactgaacaaggtaagtattctcagtaccacttttgacaatattatagaaaatttgtctgactgtattccttctaacatatgaatcgcttaacagctgttcttaagtctaagaaaaaggtaacaagcgtccatcaacacgcgttcattaaggaccactttttgggttttggtaaagactcagctctactaggctggctggtaagtaactctttgatttgtacgtttagtatccaaagttctgaattaggattattcttatggtctccgttttcttattctcttgatattatattcttcttttattccactttctattttgagaacgttgttgcttagttaagaaacgtgagaagaactccattgatactgagcctttggagattttctccatcacatgaaaactaggacatttttgtgcacatgttaaggagctagctaacattaacattggaaacaggacatcgctaaaccatgatttgattctttttccccttgtgaacagcatgcttttgttaagcaattttatgcatctgtgaccaaatcagattatgcgaccatgcggttaggattcatcatggtaagaatcagagcttgagtttttacttataaattactagaatggttatgacaattgttatctttctttttttcttttcactaaatggtgtttatgcttctttatttgtattctagactcactgcaggggaaatcttaagtttaattttcacaaatatatgatacgtgctctcgaagatgatttcaagaaagttgttgggataaggtaacccttggttgacagtctattttctgatatttgatatttatgcttctttttctgtgcatatatatgtgtaattcttttaagtctactgtatcggtctcctagattgaccttttagctttttggctgcagttggtacctttgggtttttgtggtcatcttcttgttgctgaatgttaatggtaagatgcttctgtctctagtttataattgcaagaccataactcaagatctaagtgatattggattgttttctgtagcagaatcccgtaatcagtctaggttctttgttttgaacttcaagtgtgtcatctctttggtgcttttacttaaaattgacttccaaattatagtttcaaataagcatctttagttacaacgttttctagtgaaattagtaatatatttttccaattccttactctgcctccacttttctatggtggagaaaattatactccaagttggtgtaaggaattggaaaaatatatttactaatttcactagaatgcaatcaacaaggggtcataatctgattgtatgacagaagaaaccagaattctgattaaaaaaattctttctttatttttctttttcttgccaagaaatttagtttacttttattttatttttgctttgaaattaatttacattaaacctatatagaacataattttacatataagtaacaccttaagataattcaattggatcttactccttgtttggactacaatgaggcaatgtctatattgattattaatgcctctcaatactcaaaccaagatcattcattatttatataaaagaccagtgtgtattaaacttctttgttgtatggaacatattagttctttttttttttttgtcaatgttttgtgattggacgactaagctcttctgaataatgtgttatatttgcaggctggcacacatatttctggatagcattcattcctttctttgtgagttgtattgagattatgctatctactttgtgattattgtttgcatgcatgtttcattgttcttgcatggtgttaatagttcatttcacattttaagtatcatactgatggagaaagagataaaatacagagagggagaatcgggttgaaaaaagtttaacacaattttgtaaataggcaaatggacagctaagaaggaaaccaaatttagaattaattgaacaacatgacctaggtaaatattgtgcaatttgttttgtgataagttacacatgcatcatgcacttgtaaatgtagagtcatgagtcagggtagaaatttgcacctagacaggtggttttaaggtggtacttctcatctccaagtcttaggtgatatgtatgatagtatgagtgccttttgctgttgtgatatacatatcacaaattgtaaccacttgttgttttttcttttaaatagcttctacttgccgtgggcactaaactggagcatgtcattactcagttggctcatgaagttgctgagaaacatgtagcaatagaaggagatctaatagttcagccatcagatgatcacttttggtttcatcgtccccagattgtcctcttcctgattcatttcatccttttccaaaattcatttgagattgcgtttttcttctggatattggtaagctggtttctaactcaccactctgcttctacttctaccaaaaaaagaacaaattgttattatgaacacaaacttatcttcttttctgtgtatctaggttcaatattcatttaactcctgtataatgggacacgttcgttacattgtcccaagacttgtcattgggtaaaagcaatagtctttatattctcattacaaaaattttaatcatcgcttccaagtacgaaacttttatttatttttaccatgttgtgctttagggtgttcattcaggtgctctgtagttacagcactctcccgctctatgccattgtcacacaggtgcgttgatatgatgctgatctataatttaataaagttctaaaaggaaagtaaggaacttaaataaaaatgctgaccataataaaatcttgtggaatgatttgaagatgggaacttcttacaagaaagccatatttgaggagcgcatgcaagtaggaattgttaattgggctcagaaggtcaagaaaaagaagggatttaaagcagccctcattggttccggtgctggctcaggctcaggctcaggctcgggatcaggctctactcctggtcaaccaatttctgatactggttctgcatctgtgggaattcagctgggaagatttgtgcccaaagcatcaaagccagagcagagtgatgactctaagtgatctcttttcaacgtgtcagtgttcatgacactgaagacataagtctacccttaggtaatactactactagttgccactttccagctgtgctgggattagaaattttaattcttctgtcatatattatggctgtggtgggactgtacctaagtcttttatggacaagacacaagcctttgatcaatatattatataatcttatatatacataagagaaattaagaaatctgatcttctcatgcttctttcttcttattatcatggtacatacttttggtaactgaatagtgaatacgtgtagtctcatgggaaaagatatttgataggaatttcctatcattttggtacaaacagaagcaaaataaaagaaaatagagccaaacagtagcaacaataggaaatagct

SEQ ID NO: 297460 - DNA, 1667 bp, Cannabis indica
ttttaaaataacaaaaaaaaaaatgcttttattttaagttttgaaaacacaaattctaaaaactaaaaatacaaccaaacaacctctaatcttttgggtcggactccttggtcgtccttgtctttctaatgacttttttaagtatatataatgaattaataatataattataagatagttattataaactaataacaaataaaacgagcaaaatgatgcacaatgttatgcagcggtgtgctctatgaaatacataaacaagtgcatcaaattagttagagagtttgttagaaaatcaattaggaactcaactaactaattgtaatgacatagactatgacatctcacattcatcttcagttgtaaaactttgcctataaataaaactttagctcactcaagtattttaaatgagtattctttcaatcaatcctcttcatctacattctttctctgaactttctctctcaagaacaacaattcttgatctttgatatggtatcggagccatggcgtcaaaagaccaataccatccaaatccacgcaatgaaccaatttttccacctactaaagatgaaccagtctgttcacctactcaagctcgagttgaagaaattcctcaaaccgcgttaccaaacaacaatctgctccaactgaatctgagactcagttggtccaattacaacttctagagatccttggttctggttgctactcaagcttacaatctcaatggttacattctcggcaccaaccttcctcttcaacaattcttgaaggtgatgttcctaaccctgattttgtccaatggttgtgatttgatcagttcctaatgcacttgttaatgaattcaatgactgagatgatgactggacatacaattcactgtcaaacctctgctcaaatatggaatactctcaatcaatttgttcaacacaatgtcaagagcccaacttctttaaatctaaggatccctgcagtcaacaaagacatgatctataacaatcgatgagtattttttaaagatgaaacaatttggagatgatcttgctatggctagacaattcttttctgatgaggatctcattttatacattctcgatggtctcagatctgagtatgaagctattttcttcaatctcacctctcaatttgattcttttatccttacaagaagtgtaattcatgcttcatagtcaaaagatgagaataaattaacacaccacggaagattttgtcaatgtgaaagcaaatcttgcaaatctaaatttgaacaatagctcttgaggtgctcctagctactccaacagaggtcatcatggttcttattatggtggaagacactcataaaataatagaggtggaagagataataatctaccaaatgtgtggaagagttggccacaccagtctcaagtgttatcattgtagcgtccccgctttaagcctctattgggcctttacacccacaaaataatagctcttatacacgagtacgccactgtggcaacttcatggacttacgactaaccctacagaccaacacgagtgtttccagcgtgctttgtcctcactcgcacgcttcctgggaaaacttcccaagaggtcacccatcttgaaattacctcaagccaagcacgcttaaccgtggagttctttcgagatgg

SEQ ID NO: 297461 - DNA, 7173 bp, Cannabis indica
ataattgcattaagaaagacacagattgatgaagcctcaaactatgcacttttttttttcttcttctaaagttttactattgccaagatcacaaagatacacgaccaaagaaagctcacagtacattcattcatcttcaactatttgtatcccgactacaccggaaaattttatgtatcgatttgttcttccctattcgaaagaatagcaaaaaaaacacaaaaacacgatagcctactgccataagaaacaataccagtaaattctcccacttggaattgctgtcgggagagatatcgtatgcactccggattgcctgaataccggatatggttcttacttgtccaactgcaaatgttgtccctagatactcattctcaagaaggccctaatatgaacaaaaaataacatcatagagggaaatatacaatttaaaataataacataagaaaggttagtctagtgaaatttcccatctgaaattgcatggcattgaagcaaacaagggcaaagttttcccaaatgaactttatacaaacattattatttagagagggggagccgtaacgtcgttagccttcttacctggatagagtaggtatgaaaagcaatataggatataggaattgtccagactggtcctggtaatgcactacgaattctgaaatatcccgcggagagcatcattacgacctgatattccatagtttatgtcggtaagattaccggaagctaaatgtttcacaaaaatcatgataaatacatacaaccatgattgttcatttaattggacaatacaggtttatggttataccaagatccattattgttgacagtgtaaccaaaatatttatgagtaaccaagtaataaattgtatgaaacttacttgtatggatacaagggtcaggacgctccagaaaacatctttccacatagaaacaacagcaagcactagcccttcatttaccaggaggcacatgaagaaatttagcacaaagtacattaacaagctgaattcgtctcgcaacccaacgaggaaatagaagacaagacttgatgaaattgagatcagaaagagaaagggaatgcttgatagaagttgcccaaataaaaatactaaaaccccagagtgttggtttgatttttcacttgcacatatctgccaaaatatacaatcattagatgagataaatacttgtgatggatgaacgtgaacccaggaaaatctattatgaaacttgttaaaactacaataaaaacagggttgagaaaacaatactacatgtatcctttaaaatctcaactacataggcaggcagctggcaggttcttaactagataatttagtaatttataattgcataacgtgtatttcaaacctaggctcatacacatggaatgaacacccatacactcatttacttccttctctcaagaggtaaaaatggcttgcaccttttaaatacttagatatcaccgaaccacagagttcattctcattacaaactactgaaaatcttcttaattttttcaagctttaaaatagaagcagcttggcaagtcagtggtaccttgatttctttcataagtgcaggcactccagcaatgcttagaagtgcagtaaatgatataaaaatgaatattgctgcaactcttgtctgcaatgtacatagtcaagagaaaagaaaattaataacttcactaactggattcgtgaatcagattaatttgcttatgatcatatgacttaaggagcaaataacatgagtccaacactaaaaggaaactatttaataaataccagaaagcataacaggaaactatttaataaataccagaaggcataacagtgtttctcaatttaaacaagataccaaactttaacaagaaatctgacagagcaactataattgaacaagggacttcatgacattgacatacatagtgatacacacaatattactaagtatctaggacatttcagatagaacagctcgctgctttgcactacacagcaagttgagaaaactcttggtcatttcaaaatagtcaaaagatagtataaaatgagactgtcgggaacttaaattacaaccgtagcagcagacaggataagcttatctccctcaaaaattcgggttcttctcggtttctatttgtaaaatacttcaccactgccaactaaagttgataatggagaggttccttcagtaagtcctatttattactattccaaagaatcaattcatattttagctttcatcaacacaccggttaaaattgactaaggcttatctgagaatggtctgtcacaattgcacaaatttcatggaaaataggcagttccatagaggacattatgataattttataaaacaatattacattacacaagaaagaataacaacattctaataatgcatgcatgcaagttaaatatatcaactaaagaaaaatacaaaacaaggaagtgatactacaggggacaaggagaaagggcagattttttaaataacaaaaaaatgcagaagccttaaaaaacaaggatatttttatttaaagaaggaaaaaaaaggtgcaaacatctttaaaaaaatattagtatattctcataaacttaccacaactgaagacaaagaatgccctaagcccgaaaacactgtaccgatacaaagtgtaagaagcatataaagaatgagacgaagccaatagtatttccactcccttgacatgattaatagtgatctccatgttaatactgctatccttgtagcactgcctgcctttcccttggttttgagacgtggaccttcctgtaaattgcaaattcaagtaattaaattaacaaaagccaacatacaaccacaaagagaatacttttcataaagtaaatttttggggaaaagataattgcaaattagaagggaaaggacattgaagaatagaattgggactccagcttaaaaccaatacgtgctaggtgtgagaatttaatagtaggtacctagaactaatatacataatttccatgtgagaatttgatctaaactaatgagcaaacatcaatttttcattaagctgaaggtttctttcattcatacatagggatcaagcttaattgatgtataataaatcaatcaaatttgtgactttcttcaacttcactttatttattacttccaattattctctatcttaaggattctcttttccaccaatgttttcatactttttagaatgtaatgtttaatgggaagactagtcccagagaggggaaatatacacataaacagtaactactttgtggtgactacatatctatatctactgatttatttataagctcatgtaagttgcaagtaatgctaaatgcaatagatgcaactactgattataaagaatctgagcagagttgcttgctaatatgaaacagtaagcaacaaaatatgatatctatatctatataaatataaacacagaccttatctgtgagtctcagaatcatcgtttcaactgcagcagcatcagcagaagatttatatgttgcttcaagggtgcgtattgctacagcagtgtccatattcactgatgaaaagtccccattgtcatcctgttataatgccagcacattgttaacaaaaaaaaaaatgaaaatccaagtgaatttgcgattaaaagaatatcctatgaaagttgaaggcatatttgatccccaactactgttgtaacaatattaagaaatacttaaacacaccactagccctttaagttatcaaatcagaaaaccggtcctctaatactaaaatattattgccaaacaaatcccattttttactggcataagcatttattcaagatttgcaagatgcaatcagttcagtgataattaacaacactacaaaatataaaaattacctgccaatttttacacattgcaatgatcctgtcaaaatctgtatttattgcacgtagaaagtgatctgaaggactttgcataattgggcaaggaaatccagcatttgagaagtgctacatcaccaaaaggagcgtcagttagtaattttctacaaggtttcaatttaacttcctacttaagaaaacaaaatgttaaaaatccaaagtcaaacacatagttggattattaattttactgtttctcacgtatatcaaccacgtcaatcattttgaatttcagttcatcagcaacaattggttaaatcatgtattaaaaatatttcctttacaaacttcaaagacaaaagtagcaaagaaaacaacatatttacagctgtacctgcagacaagccaatgtttccccgaaaaatagtgtatttccatttgaaagcagacaaatccggtcaaaaaggccaaatacttcggtgctactttggcaaatggtaaacaaaagagtgcaccccatgcttgcaagtttcttcaatgtaaccatcatcagaagtgcagatacactgaaaataaataaattaatataaccaattcaacaacaatgctgcaatgagtaaaaatatattccaataaaatagaaaaattaattcagatgcagccatttataaacaaaagaagcatatcataatgggtaccaataaatacacaaatattaaacaacttagtactttcctaagttcctgacaagaaccttacaatgtagacgtctgcttaacgaatgaatccatagaggcagagcgttaacaaggatggtaaaaacagtaagaagcaaagaaacttaaaaacacctctttacctatcaagatgataaagaggctcatctataaataagacatgaggcctcatcacaagctcccgagcaatactaacccgccttctctcgccactaggaaggcccttcatataacagtgtccacctatcagtttgtttgcataatcactcagtgacatagcaatgatggcatcttcaaccacactctttttctgacaaaagaaaccaggaagctgaagcaacgctgaatagaaaagaaactcgcgaacagtgagtgatccaattagtgttgtttccctttcaacaaagccctgaaaaaaaaatcatgaaaatctaagatgatatgtgtgcttgaattgaaagtaactagttccaaaaaaataactaacatacatcctgttaatgtatgtgtaacttacatatgatccatatggcatgtccaactttgctccatttacataaacttccccgtacatcttagcagaatgatgcagtcttcctaaggtacaagtaatttaacaacgttcaattcttgtgcatcctaaaacaagagaaagcaaaaatatttgtagatggtgttcggtgcttccatacctgcgatagctttcaatagggttgatttcccggatttgggaggacccatgattactgtcatggttcctggcaatgcataaccagttgaactcttcacaaccttatcagagtacttccttttcccttttatagtaacagttaaatctttccaaacaactgatgccccagcaatctttcttgccataactgcaccctcaggtagcggcggggaaggaaaggacctactattaagcttagagagtgatggagaggccggcgttgtggcagcattgatagaatcacccccatcatcaactctaacatcaatatcagtatccccccagtccggagaatcctcaaacgaaatgggttgtctaagagaaccaggtttccgcaagtagaaaaaattacttgagggtaccctgctggctggactactagctgaagatgatgaagacctgttattgtcagattgagactgtatttcttccattatcttctccctgagagcaaatttttaattcactctaacttagccatgtaatgatttcactccaataaatcagagctcaatccaaaaacctgcatcaataaacacggttgagaaaaaaccagctattttactgagaaactgggggaaaacaaaattgtgtaagacagctgagaatacaaagctgaccatgatgcaaagggaggctttcacaaacctctcccaaatactgaagaaaaataaaacaacaacaatctattaattgttcttcaaacttaattcttgaaaagttgaaattacagccttgaaaaaagaaaactgaaaaaacacatttaacaccaggattattcttatcataaacatttatcaaatgtgaattaaaaattgagcaccatactttaattttattttatgactcatttattttaattagaggactttaatagcagaaattcactgaagtataaccccttttccagtttttttttctctctctcctcattttaatttattctgctacttgagaattaatacaaaactttttaaaattatactacaaattgagaaaggaaaatatttaatggaaagtagtaggaaaccataaatgctcaaaggcctgaaaagaaaacacattagctcatgatcaatactcttaaaccccaacattattctatataaggaaagaaaaaacacaaccaagtattttcaagggtttatttttgggaggtcagaaaaccaaatattcaagcttggttaaaggttactaagaaaagctgagaaaaaaaaaaaaaaaaagctttaaatcaagctattctttttattctctattgggacccaagaaaaataagagctttcactctcaaatatgcaaaaaaaatacacttgagcaaatcttctttccatttccgtaaagatttaagctttaaaacagcattaaacctacttcaccgttatatttctatcttctctttaaatattcatcttacattttctaaactcccacttctcaataaccaaaatcttcacagaaaactgtgaaagggaaaaaccaatattgaaaagtaaagttaccagtaaataaaaagttgcagaggttggagcagaggcaaagctggatctgagtgagtgagagagctcagaaatgagggaatgtgaaagcaagcactgaggtactgaaaaaaattgagtgagagagagaatgtttcgagtatcagtgagagagtaaatattaattttctttatggattatttgacccgcttttccgggtatttattattattattattttaaaaatcgggtatttattatttttttatatatatataaaataaatcgggtatttattatttggtgttctctactttttcttactt

SEQ ID NO: 297462 - DNA, 1593 bp, Cannabis indica
tttttaatttttttttacatagtatattaaaacaatatatgctatatttaagcatatattgtcaaatttccctaataataagtctttttttcttcaattgatatcaaccatggtttttaatcttgtatatttttgatttgtttcatttctttaactcaaatcacagctttaggctcctcctcttgtaactatagcgcgatgaaacagcgattggagaaattgaaagcgttcacagctcaactcatcgatgactggtgtcttgatgtttattcaagaggatcttaacttaagaccaaagggtataatttgattcatgaaaaccaatcatttgtttcccaaatggggtcaagaaatttgctgtgaacactgtcaaggagttggaatctttgctcatcatacacaacaggacctactgcatgtgctgagattgctcataatatcaagactatttagatagagtaaggacattgttgagaagtgagcttcttagcttgattttgttgtgagaattatcctcagttttgtttttgaacttgtaactaagagttgccaaaatgttgcattgacttatttttctcaataggggttcataaaatattcaattcatgttgattgacatgtaaaaaaaaataatctaatattgaaaaacaactaatctaaatagtgtgaatttgatttgactggatttgaattagtatgagaattggatttaatccaaaaatatgaaatttttactaatcattgacaaagatttgatacatatttggtaatggtaacactattcttataataaaaccaaaaatatatgttagtatccaaaacatgtatagtaattaatttctcaaatcatcactagtttgatcaatttacttaaatcactacgactccataaatcaaaaacaccagcctccaatacttcccttaaaaacttcatctcttgatcatcatcatcatcatcactatcttctttaagaataaaatcaacatcattcttccacatatttatcttatattcaattccttcaaatttttccttgaagacattatcttcaagatgctttgacattgagaaaatcacatcatttataagcataatggaaaattcaggactgcaaatacagacttccaaacgcaaaacttccatgattatgtgatgaactatgtcatcttcaatttcttcatcaaaaataaatgtcacctcttcttcttcatcatcatctttgatcttcttgtatatattttgtaaaattgaaaagaaaaagtgtcaaaattattcatgacaaaatgaacatatatataatataactaaataatgatattgcattctcatcatttttctattttgtaaaattgaataaaaaagtggctaaaatcaaaattcatgacaaaatgaatatatataactaattaattgtaacttctcatcataatcatcatctttgatcattgattttgtgaaattaaattgaagagggaaagaagtattatatgtttttgagattaattatatatatgaaaaaaattgtgaacatataaaagatatgtctcatgatcataattatctttgatcttctatttatatatattgtaaaa

SEQ ID NO: 297463 - DNA, 4069 bp, Cannabis indica
aattttgggtttgtgaataagcagatcacacttggatttggtttctcataacaatgtcggccatcgttggggatatcgaacaatttatatgcattataaattgtatggcatttgcaaaacaaaattttatgcattatatacagatacagaagacttgtgaactagtagtaaggtggcatttgcaaaacaaaattttcattttctaaatatgccctagatactttttatttcttttactcatattaatcattcttttatgaataattaaaatgaataaatgaaccattacaagtacagggtgctttatctcaaaaaaaaaaaaaggtacagggtgaaattttataaccatggcactggataaaaatatgacatgtttctcaccttttactccactcagagaaaacgcattctatctcaaaagcaatagcagtaatagtagactcaggtggcattctaacaataaaaatctatcgagctattttaagcagcactagtatatgtcattttaacttttttacatagtaattgttggacaacgtgtgttttacttctagcacatattatattgatgggttttaagctgaaagtagtaattgaattcatttgattgatcattagtgactttcagtacaaacacatccccataaagttgtttatatataatgtcaaggtagtaagtgataatccgaaactaggactcagaaccttttaaagataatctggctgccaacttcttatcctctcagccatgcgtttctgtaggatgagttatcacgcaatgaagcgtcatggggcttgtattccattacatatccgtgtggaagcttcaaatgtcgcttgattgaatctcttaaagccatcacagcctacaacgaccaagaaatatgaagacacgtttatttcacttattcagatatacaacaagtacaacataatacactatcaccaacctggtgatcagatgcatctctattccagacacttaatatatcctcattgaaacgaatgctcaacactgctccacatatgttatctccataatcgagttgatcacctatcaatgcaaggacctgcatacaccaaaattatgactttcaagttgcaccattgagtgagccacctctgatggtttgattttattcaatcacacaagtgaaaatccctccaattgagaaaatgaaaaacaagctgtcgctattatggataatttctacaaatcttttcttttcagacttcttggaatgcaaaagactgcatcatctaaatctaaatcacctaatgatacagataaaagtttaaacaactggaaagatttttactttttctcctacaagaacaaatacataaacaaatttacaaggccaattttaagaaaacaattcaggaaagaaaaaaaaatccgaattgtttaggttgatatcagcaagccatcgaactatatggtctagaatccagaataggtaaagagaccatgatttcagagatattttacgttaacaatacttcagaaggaatagacaaaaacaacttaaataaaaatcaacatgaacccaattccccagatgtatagaaatggtttgtaaatcatttttcttcataaaaagtaaaaagttttactttttagccttatgggttgcgccttgatgtctaaaaaagaggcttacacttcaattacctaacatgagaaccattggtgaggcttagggtcttaatatcttcaaaagtggtagccttactaggttatggcttttggactgagaaaatacatctcaatccccattgtttagactttcattaaaggaaaagcaagatattttgggctaataaattgaacaggaaacaaaagaccgcaaacagtacagttggtcaggtctgaatctcattaaaataaaacgtgaaaaataagaagcagggtaagtaagatgcaacatatatattcctgagtcaatttttgtccttaccaaatcctcccagaaacggcctgatacaacttttttgaaacgtagtatccacttgcctccattacagttagcagagtcctaaccagccaaacaggaaatgaacaaaaataaagtaccacatagatgatgaaaatttgaaagtcggaagtaaataagaccacaccacatggccaggtttcagctgtctacctcccataaaggtcgaatgccctccttgaaaagatgcaagtccgttgggcttggcaaagaagagggacgggccaagtggcaataagcaaaccaaaaaccttcaacctaaatgttttcagcaggaaaatacaaacacaattgagaaagtcttacaaccatcttttaggcttccccaattctttttggggattgtgtgtggaagaaaaagaaagagatggaaaaaaaaaaggtatctaaccgtgctgaattccacaattcttttaatattgtcttcatatgattggttcctgactccaggtgtccgacgagtgtaccaaaatataaacttttgctaatattaagaagtgaaaattttaaattagcattgatacaagccattagattatgaaatggattaagtcaattgtttagttaagaacaacatggcagaattggatcatcatcacaagcaagcattatcgtctataaacccatttcaattgaggcctgaagccattataaaggaatatactttcacaaaatcaaaatcaattctcaagaagaagctacatgcatttattttgttcccttatcttagtaagtaaagttgttgggcatagactaataacaatcaatagaaatctaatgataattataagtattaaaaagacaatcacaattatgaaatcacttcaaatcaaccaagagcttagattttcccctacattcaattacgctcttgaagataaaaatactttgtgttccaatattagtccatgcggttgatggtaggaaaaggatattgcccagaggctagagatacagacgcttttcttctattttacattttggtcttggcttctgttcacatattttaattcaattgacaagctttgtcaaagccacaaactaaatccaaaaaacttatttcagaacaagaaaaacattcaccattagcatatcaaactttaatcaatcatacattttcccaatactatccatataatcagttcgcagcaccatacagtctgaaagttatcacttttcgattcataatccctattaatacctaagaaacttaggaaatttatcactatgaaattaacggagcgtgttaagaaccctagttagataaatactcatgatgcattacatgcgcattgagaaaattcaaacaataacagtacaaatgtaactacgtgatcctcaactgtctattgtgcacccaatcgaaaaacaataacatactaaaaacaccagattataatttatttttcggttagtaattaaggaaatcatacgagaaaaccctaactgcttaggattcgacaaataaaacccaaaaaataaaatcatattgaatgttgatgaaagataaatttaggttaggattaccctgagggggtggaggccagctttgaggtcgcgattcacgcgttcacgaaactcttgagagtccgtactgctgaagttatcagcggcggcgacagaggagtcctgaagcgattgaggagcattggcattatcggtggcggtggtagtgttatcagattgcttcttctctttctccgaaactgactccatttgtgagctctactcgtttccttcgaacacccaggactatgtatggagtttttgttttgttttgtttgggaaaggaggaggaaagtacagatgttttcaggcgaaaaaagaaagaacacggatacttccccttccagagatgggctaggccgtcacacctcccgtcatttgggccgtctgaactatgggctgggtcttgctattcccaatggtagaggataattagataaatcactatttcggttaattttttttttctcattttttaacgattttttttaaaaaaaaaactaacacaaaaattacagttataatctcttcgatttttttttttttattattatttaacaattttt

SEQ ID NO: 297464 - DNA, 2742 bp, Cannabis indica
gtgaacataaaaaatcaaattaataaagttgtgcacttatgatgattaatgttatgccaaattttccattcatttactatgtgtcaaatttgttattatttttttggcacactataattttgagtattattttttcctaagaatatctctaatggagtgctaaaaaaatagtgtagtgttatattttagcacacttatgaaaaactactcctgcaatgatgttctaaaaagtgtgataaatttgacacatgctaaaagtttagtcaaattctgcacaagatatagtgctatgctaaatttagctcacaataaatatatattttttttatttactataataccactaattattatgttttataaaattttactaaattttacattatttatttactatattactattatttaaataataaaagaataaaaaataataatttttgtatattctcaataaaatattaaatgacaattaatataattttttttttttattattttacaacttgcattggagcatcattataaataataaaccaaatataacacaaatttattttttgaaccaaatttgacacaaattttttattatctaagtaaattatattttaatttggaaatgctgtaaggcaaatcaaatgcacaactagggacagtgacccaattcaagagcaaataaattaaggtgttaaaagcaaaattggcactggactaggagatgataataaaacaagaagctgactgaaaatttcggagcagcagtgatttgtctatcaccggacccagtcatttaagaggaaacttatttttgagctttccatgacaatgacaaagcaatccgaagaaggaaaaataaacgtgtaagcggctaaggccgctaaactctctcaattatcatttaatttacacttaattagttaatttgttaagtttaaattttaatagtaaaactttctaaattattaaattgttactaaatttaaagtgacatttattttttataattaactgccaacatagacggtttatgggtatattttatacatatgacacttccatattagtatatataataatattatttaaaaagtataagaaattatttcaaaatttttaatattttttattttttaaatattttattgttataattttaaaataaattttaaaataataatattaagtgtattaatataaacgtgtcacgtgtatagagtgcacacataagcaatccataatgacagtcaagtggatgatagtttagatgattttacctgaacaattaaaaatagcacaaagtgatcataaacagatgtggtaaaaatcgttaatcacttaaattttcacattagaacattataggggctctattgtacgtgaaatcttcctttgggcttcttgtaaagcccattatccacgattcttgtcttcacgtctcccaacccacatctttgcgtaaagcttcccaattttgtagcgtggaaatcgggaatttcagacaatcagtaggtacccaccaggtgtcaacgtggcacattttagttagaaacccagcaaaaatatccacatgtcagtacctgtaaaaaagcgcgcgccacgcattcaactgctaattctcgtcttctcctcctactctcttcgctccgcttcaccgttcaatttctcactctcacgactctgtttttgtcttaatcgcattctttggttttactagattacaaaatccccaacaatggcggccatgacgcaggcggaggaagatgacctgatcagccagtcggactatcaaaatctattttcaatatccatcaagctccagaatctacctcacttaaccgactatatccctaacctcaaaaccctaccaaaccctctcgatcaaaaccccttcttccgcccctctgaaggtttctacatccatccgggtgacgctatcctccgtcagatcgtcctcgagctacctggaaccttgcccgccccttcgcctcacctcgcctaccaccgagctggcccccgccgaagcatattcttcgagccgtcgtctgtcaaggctgctatcgtcacctgcggaggactctgccccggcctcaacaccgtcatcagggagctcgtcaatggcctttgggagctctacggcgtgcgccagatcttcggagtcaccgctgggtaccggggattttactcgacggagcctgttgagcttaatccgaagatcgtgcataactggcataagaggggcggtacggctcttgaaacctccagaggtggttttgatcttgataaaattgttaatgctatacaaaatcgtggcttcaatcaggttagtgtttattttggtttagatatttttccatataagttaaataaaattagtggttttgcttctaactgattcgatgcattgtctcctcaaagtttgcaacttagaatctttattaatttcagttaaatttttcaataaaaattcatattcaatatacaatacaaagttaatacacttacaaaatagaaaataagtttcaaaaaaatagatctaattgaattccagatactcacactatgtataaattaaaataatgtattataatgggtgactattcaatgttacatttttattgtaaccatatggttacatttttctttaacctgtaatagcaggttactaataggtaaactttccttttttagatttaattaattataattaactattttcttaaaataattaattaaatagacatt

SEQ ID NO: 297465 - DNA, 1599 bp, Cannabis indica
aacaaccatttcaacacaaaatagcaaataacagcaaaaactcacagatcaatcgtgaaaataacattctaaattaaataagaaccaataacaaaaaaaaaaaatcacttaccaattcattgttgccgaagtttgttcggtgtctcaaaaatggagtctcacacgaaaactctctaacttttagtactttgtagtagcttagaagggttaactgtatattaaaaataaaattttagtttgaattagttagagaggatgagagaaaatgaagtttgagagaaagagagtgaggagagaaagagaggggacgactgaagaaggtgagagtgtatacaagggcattttgggtacccaacataaaattaattttccctaaatgtatccataaataatcaaatttctcaatagttacattatatatcagctatcataattttctaacatttttcaatttgtctcttcttgaggagcaatttatatacattcatcctgaatatgacaaactgtattgagagacattataggtgacaaataaatcctttaactatgaaattttaaaacacatgatgcatatctagtgtggaaaattaattaatatatactcatgtatttttttctctaaacaatccttttaaaaataataatcattaattgaaaacaaaacttttaaactactaactttagatcccactcaacactattctaaatattaataaaacacaattaacaaataaaaactattactaaaacgaaacaaaagaggttgtctatactacattattacaaacatgatcacatgtgttgtgtgtatatatacaatatataatacaagtagttggtgtaacctcataatataaattgttttaacattaattaatttcattattaattatagaagcttttctttttggtacttttttttttcctttatattaaaacaattactattttgtacttttcaatgtagtactaaagccttgtaatatggagcttaattaaaactccaaacactgatcatcgtatgattcatttaaccattcatttcatatttgttaatatatattaattattacaataatatatataataatatcataaccaataaaagcaagcgttgggaaaaactatagtgtcacctcgtgaggttacaatcttataaaaggtagtttcactttaggtatatattattggatagtgggaataatattgaaagtgggaaaaagtgtaatatataattatatgaaaataaatataatatatatagtgaataatggtgatgctatatactatatagctagttagactccatttgaaaataaaagtgtattcaacatttcaactattcatattcaactcgatcaacaagattcaatgtgaagtaaatgtatatgttttgatcaaatattgattcaaacttcaagctaatttattttttatttttttttgagaaaaaaacttcaagctaattgcaatcaagctatttggtacacttattttataattagttgttctctaaattatttattaaactaataaattatataaaatttaatattaaaatacacaaaaaatagctacttttaatgacaattttttagt

SEQ ID NO: 297466 - DNA, 2165 bp, Cannabis indica
agtatttgttgaaagatttgagcattccttttgttgtttcccccacatgaacaataatcctgttctctctgttggatgcgtgcttttcaattttttcataacatattctttggattttaatacaatatttctctttcaacaattaaggctttagtcaatatacttggtacggtagtatgcaaggagaaatgcggtccatctgtttctgttactcttttgagattgtctgataagcgtaacaaagaaacaaaggcggttagtctgactgatgacagcaacgaattcttaatttccaaagtcatccctggaaaatacaggctcgaggttggtttttaaaatatattcctgctacctttattttatataggatacatgtattttgcgtttttctactcacatctgattgttaataaaaacttctttctgctacaattgcacatgagtttttcatgcttgtcactgatgctgaatctttcttttatcttaggtcaaacacaaatcccaagaatccatgggtggggaagataattggtgctgggagcaaagttttattgatattgatgttggtgctgaggatgtacaaggaattgaatttgttcaaaaaggttacttggtccatattatttccacacacgatgttgatgctcttatgactcaacctgatacatctcctataaatttgaagattaaggtatcatctgcttattatgttttcatgaatacctctcacaaaacattgatgctcatggatttacttttgttacgtgcagaaaggctctcagcatatctgtgtagagtatccgggagtgcatgagctatattttgctaattcatgcatttcctttggaagctcatccatcaagattgataccattaacccattggtacaatggcttacaactatattttccctttgtttagttcttttgtagcttgcttgtggtaaaaacttatctctgtgcttatatcatgatttgttattttggtagcctgtccatctgaaagcagagaaatacctccttaagggacaaatcaaagtagtgccaagctcacctgatcatgtgtctgagtcacctgagaatttcattgtggacattttaaatagtgagggcagtttaatagatagtgccatatctaaactttcttccagtggagatgaaacaagtggtgctttgtatgaatattctacttgggctagtcttggagaaaaacttatatttgttcctcgggacccaaggtacactttgatagttggatgtcttggaactgtgttattttctgattttttgatctttctcagtattcatcaaatattttgtcattctagtcactcaatggtcttcgtaagtccatttgaataagtgctgattatcattgatacgctcatatttaagcaggaagtcactcctaaatgtttaacttaagtatatctttttattttttaatattcctattgatcattttactactctcttcctcattgtattataacccttatttgtgtaagaaaacagatatggctattgttactgagctgcatttagtttctgattatgagtctaatgtttgccattatgtattgtagagagaacacggaggggaagatattgttttatcccagacaaactcatgtaagggcagaaaatggttctttttgtcgatagcttttgattgtgtcatcaatcatattgatatccatatttgtgttgcaggtcttgattaaaaatgatggatgtcaagctcccatccctcagttttctggtcggttgggcttatacattaaaggatcagtttctcctcagctctctggtgttcatataagaattcttgcagctggagacagccaagtagctcaacttaagaatggcgaattagtacttgaaactgccactggtacagatggctcttttattggaggacctctgtatgatgatattgactaccatgttgaggcatcgaaggtctgacaacttgatattggatctgttacctaccatgttatgtcataagatagtttggatgagttatagatctgtttaagtgttgacatatttttatcttataaccatttaattaccggcaactgattgttgtttccttcattctgttatctattgcagcccggctactcatttaaaaacgcttggagtcatatacattttctt

SEQ ID NO: 297467 - DNA, 2562 bp, Cannabis indica
taaatttgattaattgatgaataaaagagacatttttcaacttaccccgtatctgacactcaccacttccaggcctatatacatgaaccgaagagttagtacttgtatgatatgatttgttttttctagataaacggtatgatgtgttttgttgaatcttcaggattctttcgaaattagaatgacttcaatagaagaagagatggtgttggaatttgcagaaagagcagacaaaagaaccaacaatagttgcattcttacgagttgatgatgaacaacattgcaaactcaaataaggtgtttgtaattatatctaaactgaaatgctgatttttgcatacagatttccaaaagaaattggaggacttggcatgttgagtatggatcacataacttcttttgaaaagatacgaaaacaaaaagaaaatggaatcaaaatgaggcctttaaggtgtttgatgaaatgtcacatccacaactttgtgtttaatgaattgtttctgtcataattgggtttcacatataaattttgttagcagttgcctattgtattctctttaaattgtttgttcaaccatttacgctgctctaattctgattttgatacgtgtttgtaattgtatatatccagatatacctgagcaaagcaacaaacagctacttctctcacttatgtcattctctcttgttgatatgggaatgacagtagctactcttcccaaatcaggagggagtttggtccaccaccatagctctccagaaaagagcatatacaagcctgcacttaaggttttgttgcctttgcgcaaccccaacaagtcacatgctgtagttccacttatgaagcccaagtcctccagttattctcatatatcaactaaaaggaagaagatgagaaagagtgttccctttaccaatccagattgcaccacttctgatgttctgaacttaatggatgccctttgcctccctgtctctccagacatgtacaattcttttataagagaatgcacaagctctgctcactcccatcgagctgatgatctgcacgcgcatattaggcgaagcggcctccggcaaccacccttatctttactgaatcgcctcctccttatgcatgtgtcatgtggtcatctagaaatagctcgccatctgtttgatggtatgcctacaaaagatttcaagtcctgggccactattgtagttgcttatcttaacagaaatgattacgaggaagccatgaatttgttcctgaaaatgctgcaccatatcagtatgctggaatttcctgcttggatcttggcctgccttcttaagtcgtgtgtgtgcacaagtaatatggacttagggaaacaagttcatggctgttccttaaagttgggtcatgctaataatttgtttttggctagttccttaataaacttttatgggaaatttaggtgtctggaaagcgccgaaaatgtgtttaaccaactggcccgtcataattcactcacatggatggctagactgatcaacaactccaaagaagagcgcttctttgaagtatttacagactttaaggagattggaaagtcggggatcaagaagaatgccttgatgttctctactgttttgaaggcttgtgcgagaatgcatgatcgtgggcaatgcggtcgacaagtgcatggaaacgccatcaaacttggattagatagagatgtgtatgtgcactgtggattggttgatatgtatggaagaagtgggcttgttagagatgcaaaaagggtgtttgaaatgagtagtgacaaaactagtaacgcatgttggaatgccatgattggtggttatatacgaaatgggttatatgttgaggccattaagattctctatgaaatgagggcaactggattgcagcttcaaccatctctgctcgatgaattgaggattgcttagtggtagtaatactctcatttccatggagaactttaccccaaatagagaatgaagttggaaattgggataaagaaaaaggcagtgctgctattattcttgttaataatagattttagaatcataaactcgaatgatagaatgttgggtagaaaatttagtattattttgtaaatattaatcacagttcaccgtcttttgttgtatatgtcagttataatagagtcacagttggtattgctataatctggtatacttcacagtaactagtctcgcagcacacatggaaacttttttcatttctcatttgaatacttggtactaccagtaccgccaagatcagcaccaacagtcggtctgccttggcttacgccctatacttgagcctcaagtaggagtgcaaagcaaagtctaaatttagaatttagagctccaactccttgctaaaataagaggccccgtgttaagtttttactggcatgttaagagttcattctcaggtctgacacgcaaatatcatgcttgtagtcgtagactatgcttggcttgagttacaaataaaagaaggaactattttataaatactctaaaatagcaaaagtttacattttacaaatttatagtttcttt

SEQ ID NO: 297468 - DNA, 934 bp, Cannabis indica
aagtgttgtccactacttttgattagataaatattagttaaacaaacatccatccaaaaatagaaagaaaaagaaaataatacaatgtaaattctaaatttcaacattaatattcaaatacaatcaaaatcattagctataatacacaacagaaaggcttgttttattaacaaacatcacctttaacaagcctagatttttgtctaaataaaactccaaactttaaagtaaaccaaaacaaacaaaaaaaaagcatcctaaagcgtcatccactaactaataaagagcactaaattttcctttataataaaaatggaagttagttagttagttagttaccagctatgatgaaatagggtcttcttctatacccaaaaattgggataacatcagtaagaagaccccaaaggggtttaacaatccatggaatagaagtgattccaccataaatctgagcttgagaaggttgaactttctgaatatctttcatataatacttagttccaacacgcccaagtgctccactcaatccctggcttattccatagattaaaatcacccctaatactaaactccaatgcatttctgaggcaagctttttcaaccaatgcaccactggcccaccattactacaccctcttcttgttctttccatctcatcatcatcatttttctcttccattatcatcatcttatcattctcctcctccaccaccatcactattactactctctcaaaatggggatctggtgactcagcttgtgattcactactggggagaaaagcttagcttaaaggttagcttgagttgaatccccaattaagaacaagaagtagtttggctttaagctcaatccccatgttcatgccaaagtaggaaacgaattcaatcttgaagattaatttgaggagagagagagagagaggtagggt

SEQ ID NO: 297469 - DNA, 2552 bp, Cannabis indica
cttccccaggccgtgtgagattgtaaagcttacccggtatttccccttacggatcacgggactactgactgtcacacgccagatgtgcgtgcttcaaaagtcccataatttgggatcaaaatgggaaagatggccttggaaccacaagtttcttgtcagcttttctcttcatttctcgacctgctacactccaaactcgagccatcatgtcttcttgcattccaaacttgagccatcatgtcttctttctcttttctcctctggcaggccctgtatttcaactcaccttctcaaattttcttaaatcagagcatcctctcaacttcattgtcttgggcatttgggaagatcaccatggacaggttagtgtccttaatcgactgatggccttgtaaaatcccaaacctttaacaattaatcgtggtcaccaaattcctaacgttgagctcctccttggtaagcaagttaaagactgcgggatgattaaggaaaagttgagtggggtcgtccgaagcaagggggacctaggtccactcagtgaatagaaccgaacgctctaaagctctaaaacccgaggagaagaaaaattgatgaaggcagtccctaaaattattttggtaggttaatgggactggggtctcactggctggataaggttgtaatgagtaaaaactatctttaaatctttcccccttatttgggatggacacgatttcgtaaaagtataaaactttagcgaggtgggagcaggccaactcctaaaaatgtaaaaaaataaagaggcacgataacatacggtagccttgggaaataagtttataggagataatcctacgaaaactaaaaaattgataaagtaattttggagtggcaagcttgtcccgaacattagatgtgcctaaatccaagccccgaacccttcatagttatgattgggggtcttaaattctcgagccagactgtgagagactctaggttcttagtgcatgatctcgttcccttcatcatcttttctagatggtgagcacaccctagagaggaatgaagatcatcagcctctcattcggtaacacaatgaacatagttgaaaatcaggactgaaccttgaattacgattaacaaagggacgaagaggcgacctgaggccacttcttaagatgatgagtttaaaggggcttcaggatttaacatgtccatcccagagcagagtttaagggtttcttcgtgtgtgtaggtccctcagaactttgctcatctgaaaaataagaatatacttagcagttagcccacacatcgagcactaagaagggaatagggttccccttaccactgagaagaggcccttccagatgctagcatgtttagaaattaaaaatttcctatgccaaacatcgggtgctaattgccccatgcactagaagaaatggtacaagagatgaagggaaggaaaaatggcgagctctataaaccataggcatggaagccacgacccaaaatataaacagaagacgaccgaagaaaatccccaaatagtagtcatgtagtataaatgtcatacttatgcaaaagatcacaagcaaaaaataataatgaaagcaatgcatatggcaagcaacttacgaaggtgagaagctggtgtggattgcaggtgctaatgcacaatgatggtaaaactgagcttgacaccgtcggaggaaaaataagagaaaatctagagtgccttaaatttttctggtttgagttctaagaagtgtgaaagtgaaaatttgaaaaagaaagagataaaagacatttatagatccacaagagtgactcgagtcgtcacctatccaacggtctcacttcaaatttgtgtaaactcccacaatccaatggccatagcaagactgttagaggcatgagtgtaaacagatggttacactactcaagcaccaatttgacaccctgcaattaataggagcattgaaatcaagtaaaaggaaaactgaatcgacttcactaaaatggaggggaaatattgaataacattaaagattgtcacgcgtgttgcctacggaacttgatgtcagcacttcgagagataagctacaagccccatttcacaaaatggtaaaatgggacttggggggtaaatgttgcctgaaatttctcccaaaatatgtggcacttcaagagtaagccatttggtaatgggatcatcactacggggcgtgtcatattaaatcgcctctgaagcctagtaattggcaagacttttgagagattagtcacatctggaaggatccaccatgaggataagagttttctcttttcttctccggaagtaaaatcgacccagaaaagagatagaaggacaagcggagcatggtgcgctgctcaaggttaaattactatacacgcatttaatgcggtatgaggaagaacatcctacacaatactcttaaaatacgtgctcaagaatgtaaacccataattctctaattttacaatacctcatacatcatttgacggctacattatgagctatccaatcattagcaagagaaaagtct

SEQ ID NO: 297470 - DNA, 5516 bp, Cannabis indica
agcaaactagtgttacaactacaagagaagtgttataataataataattataatgtacaaagttacatcaattttgcaagttttgaatccaatccaatgtaggtagttcctgtggagtaatgtaaaacctctataaattaataacatcgaaaccggacaaaaatataatttgatcgaacgttaatttaaactatttctcccctagtcgaaatcgaaccatgtataatttaatcgagtgttaatttataccatttcgcctaagtaatttaatcgaattgttaacaagtgaataaatgcacacataccatttagcaccggttatgcatctcatcatgttaagtcagatcaatattgaaatttgtttttgaacctaaaaccagcaaataaatggatatcaaaaagacaaaaaaaaaaatgtaattcttctacgccgcagcctaattctgatcgctagatcgggaatgttatggtttggaatgaaaaggaaatctattaaggacttatgtatgtaccttttagtcattatattctacaacaattcaatcttttgttgggggtctaatttgttctggtgcaatgttcgccgtaaggaccggtatactggaggacccgaagcttcccttcctgagttttacagaacaaaataaaaatatttgtaatttagttagttttctctatataatatattgagtcaaatttcggaacaagtgaatgaaattttctttgacaatgtcaaccagaccttggttccgtagactagaccacctccggcaaaaggatgaaagcaagcaacgttaacctcgtcctcggcactaggaagtactctcactagttccatgtctgaaactctgtaaacctaaaatgatagaaaagagtagcagaaagaatgacagttagcatgtcaagtaaagagttatcattaatagtaataataataataaattaatatgatttgcagcaagttttgagtttgtaacagacataaacttaataatttttcttagtaacataaacaacaaatgttagtaaatagtaatttttatctagtttcgttattagactctattattgtcttaaacggagcacatataaagctcaattccaaatcattagattcggaggaaacatgtcgtatcagttattttcgaatcttctttcaacagagtaattacaaatttaagacactagtagagtctatactggtggaagtaaacaaaaattacaattttactaacaatgggtacttataccgctaaaaaattattaaatttatgccacttacaaactcaaaacgctaagtacttatactacaaataccaagaacatctcactcctatactgtatcgagcaatctatttcttttctaatggacttgttagcatacttaattttttgattagcatgaactaatcttgtagaaggtttggacattttggcgatttttaagctctatttttgattgtttctgtaaggcatataagaaacacaagaaatcaatactaatgtttacctctagaacagtgtatataggcaatgttgtttctccatcgatgactatacttttgagaagagaaccgtgacgtcggccataggcaagtagaatgtgttcagaagttggtgaaaactgcaccgttatatatacaggtttgaaacgtaagagaacaaatctatgcatcagcatttacttcaatcatagcgattagaacagattcaaagttctatttacacgtaaaaattacctgaattgaagtcaaacaatgtgcagccctgattgcccgtgatacaagcacagaaccaaagctgtacaagttaaagaaacaagcatatgagcaaaacattcgaaacggaagaatattcataggtaaaaaaacggaagaaaggcattgaagctttacgttctctcctcgagcgaatatatccgaagttcatacataacttggtgagctgagattgggtggcgagttggagaagttgcagcccccgaatcttgctgaactagagtttgtgatcccgagtcagcttccgtgttaggaagcaagcatgcaacacaagcagctaaaaatctcccgcaaggagaaaaatgagcacccatttcactgcaaaatcatgtgataaagaggtaatcacatacacaaattcgataaaatagttttgaaaggacctatttgatacacaacaccttgtaaaatgagtaatgaaagaaagtaaattgcttaattctgtaattacctgcagagaactgcatgggctatgcttaagcggcacttttcagaagttagcgtggtataaggattcattatatcatgttcccaaactcttagctttacagtgcatggtaactcggcagctgctgcagcagctaatgatgtagcaagttctgcctgaactctattaataatgggttcggcatcaccaccctcacgaagggtaattggggaaggaccgttacctggttcagatgaagagaagtgtacatttgaaaaacgattttgcatggcagatcttcctgaaaccccagataagttgttgctgcctgccattgccaaagaagctaccattgtctccacattatgtgttggcagatgagatgtcgaagcagaagaacccatcaattgtgctgaattacgactaccagcattaggagaaatcattgaaggaagaccagcttggctttggcccataagccatccttgcagaaagcagtgagcatagtctccaccaggcaaaattggatgaagttgtgaaggttcagcgagtcctacattattttggttatgttctgactgtccatcaccgccgctaacagttactgtatctaggttagtaaggcctccacgaagggttctcccgagtgaaagtgtctcgtcactatccatcacatccaatgtttgattgctaggaatagaattatctgtaatatctccaaccccgaagtgagtgccacgaggaataaagggaaatgtttccataggagacactgaattgtcatactgttcggctgtatttgcatctgtttggatctgatttaaacctgaagactccacccgcatgctatttgaactagcattctggatattttgatgtagttcccctctggaatcatccatagctagtgatggcaccgacaagaaaggtaaggacattggtgctaattcagcagcaaaactgagacggtcactagaatgaaaatttgccacaaaaacagcagggggaggatatcgtaagtaacccagagatgttgcttttgtcatttgtgaatctgaagagtcaagatcattgacctgcatatcagtccaataatgtaacctacatgatcgtttgagtaaaaccgccatatgaaaacacactttatataattcacctcagcagttaaaagaaatggagcagcgtgtgggtgaaaatgaacagctcgaagggaacgccttgtcttcaatcaatatttgggggaagtctcttgtcgtagttccatatgaacagctgaacaatatttcacaggtaaaaattgtaatcatatagaaaaaaaaatgcaataatatatttatacttatatacagaaaagtttaaagaaaacaatcaacaccttgtgaccggatgcaacagcaagaagatctcctttggcatggaaagcaattgatgcaataggtcgatctgtgtcaaaaaagaaaggccacaaaaataatcagtatcaagggttggtgagaatctttttgttataacacagaaaatgatatcaaggctagaaattacagaagttgtaagattctatgcactctgacgtgtttgcatcccataagcgaacttcatgatccaaactcccactggcaagaatttctggacatgatgggtggaacctaacctgtaaaaaccctattactattagcaaccgaagatgaacaagataccctattagcaactaaagtgtttgacattctatcaactaaattgcacaattatcaaaatgttaaaacctaatgacataaactacaggcactatttcagtcatttaccaacctaccgacagcactaactaacactaacagcccgaaaataataataaagcatagaaatcggcaattataagccacattgcacaaataaaacttaccacccatggcgtcctcctatgaccacttagaacttttacacagctaccagtttggcaatcaactatctttacagtgtggtcaccactgcaatcatgaagcaagttaaattagaaacaagttgaattgtcttaagaacctaaaacagaattttttcaacagaaatttactgtgtggaagctagagttcttccgtcagggctaaatgctgctgcgatagttgacctcggtggaggcactaaagggcaatatttcgctgataaatgccgaagagattcggcttcaaccctaacaacaacacatataacacatgagaattttcaatacacagaacagatattacaagaattgttctcaaatgaaatgccccaataaataaataaaggaaaacattgaataccatgagaggagaccacgcttagaatctcttgctgtttcactttgagacccagagggagatcccactttctttctagaagcttctccccaattccttctcggaatatgctttgttctaggagaaatttctctccttgctatcaagctaaaaacatttcttccactaacaaaagatgaaaacttcaataatcagaactgagctttctatataaccagtcaacccaagttcatagaaaatgaacacaaaacttaccaaaacaaagtagctaaatcctataaaaaatagatatttaactcaaattcagcataaatgaagataaccaaacacatcataagatctaagctttaaagttagttgtttcaagaaagcaacccaaaaaaaaaaatctccagttcataagcaacttcttaattacaaatcaagctaaaaactctcaaaaacacccttgaaagcttttacagtcgaaatttcaagccatagtaatcgaattacaaaacctaaagaaaaccccagatcaaatttcaccaaccccagaaaaaaagtagaaaaattaaacaaaagaagtcaataaaatccttacccatggcgggaattatgagacgacgaggaagaaacttggtcccgatccagaagtctagagggtcccgccattttcgaacgaggctccatgggggaatcaagagaagggtaaagaaagcaaaaccaaaacgatgaatctaagagaagaatgaaagagatgaaaacatctataattgggtatgggtagggctcatagttgttgttggatcgaagaaaggggaaatgggattgggtattttcatggtggcaatttcatggcaatattattcatggaaggaggaaagagcagagagagagagagagtgttgagtcgttgatcttctctctctcgtggattgtacggccaccaaggttagatggaaaatggattaaggaagacgactacaataaaacaagtcatatattattaattaactaattttattaattattgtt

SEQ ID NO: 297471 - DNA, 3448 bp, Cannabis indica
tctgtattttttttttttcacttcatcttgtaacacagtaataataaatattacagtgagatctaatttaacaccttttaaatttccaaaacatcttggtatgtgacctgataacttgttatgagaaaagtccaaaatttgaagctgattgagtctacataattgtgatggaatccacccactaaacttgtttgaaggaaaagaaagaacaatcagatcagaaagactatctccaatccatgttggtatgtgtccctcaatcatatttagcccaaagtcaaacacacttaacattgtacaatactgaagagaattaggtatttctccggaaagactattattacgaaggtgcaacgactttaagttaagtagagatcccatggaaattggaattttcccagtaaaattattattacccaaatttagaaatatgagtgattgccagtacatccaacaattcggaatgttgcctgataacgaattgccttcaagatgaagaatacgcagaaagtttcttacaccatcatcatttggttcatcacaaagaaagggagacatatcaccagaaaatgaattattggaaagatctaactctttcattgaagaagatatacatggtaagtttgtgagattggcaaagtgaatttctgagacaacaccttccaaatgattgtcggaaatatcaatagactctaaactagacataccaccaaagctttcaggaagagatccattgaattggttgtaacgaatatcgaaagtgttcagtgaggacagttttccaagagaagcaggaatggaacctgaaagcatgttttgactaagagaaagatagcttagagtttcaaacttctcgaatgtgtcatctttgagttgcccagaaaacatatttccatccaaaattaatgatgtgattttgtttaggttgcaacctcgtaaattctcaaggaattctgaaagtcctcccccaaatttattttcatttagcaaaacactctctaaattacatagttctcccatagatgatggtaaattcccttctagagaattatatgataggtcaagataaacaatggaagtcagatttccaatggcacttgatatgattccgtgcaaatcatttccaccaagattcaatctttcaacactattaataccataaatgcaagtgggaatagttgaatgaaagctattactagaaaaatcaacaactttcaaagaggttgagttttggaaatggcaggcaattgaagcgtcaaaagcgtttgtagaaagtgaaagatcgacgaggtttctaagatttaaagcactgggaagtgggccttcaaaattgttttctctaagattaagacttgcaagattactgagattgaaaacccaatttggtactgaggattgaaaattattgaatgaaatatcaagaacttctagggatgtaaaattaacatgagatagaggatgaatatgactgaggtcacaatgattcatgtataattccaataaagatgggagtttgtttactgagagtaaccaatcagatgctgcactaaggttagcttcaatctctagatattctagtgaggaaagaccagaaagccaatgaaggctatcaacatataatatttgtccaatattatacaaataattattactaagaagagtaagatggctcaaacgtgatagatttccaagttcgtgggggatatttccctcgaatcttgaatattgcaagctcaaatattttaaactacccaaagagccgatgaaacttggaatctgagtccccacaaaatcattgtagctcaggtctaaatgagttagatgtgtaagattcagcaagaaagaatttaccttgccacctaatccttcatcagaattaggagaaaatgcaaggagaagttgttggacatggcctgtgatgttgtcgcaaacaattccagcccaactgcaacagtcactcgattcgttggcaacccaagaacttagccagtttgaaggatctacaaggtctttcttgaaactcagaagtgcttctttttcactttcgatacaaagtgatgagcctaaagtattttttttggtagaagaggaggaggtagcaaagatgaaacataggatgacgaaaagagtaatttgaaaagagagtttcactgaatgtaacgccatggtggtaagtaatctatattggatggtatacaacactcagttgtgtctatatatatagaggagaataatattggaaataatggcaaagcaaccgtcattaattattattccaagtcttttctttgaaatattattattattttttgttacaataaattccttaaaagtcttttctttggaaaaaatgtatatagtggggccagtgcgtccatgcatggaaatatcttaggaaagaattaataaatttgactgaggtattgctatacagcagtgccgactctggtataggcaggctaggctcgcacctaagacccactaatttagagacccaaataaaaaaataccctttaaaaaatatatattttaataattttcaaaaataccatttgtctttctagtaagggcctaaaaagcttttctttgcctatatctcatttgaactcagggctggccctgctatacaatatgctataaggcatctcaccttaaaatctccatctccaaagatgcaactaaataatgcaaatgcaaaatatagatcactttgttaaaagtttaacaaatttgatcattgttctatcccttataaccttatcaatcattaccttgtaactttatcaatcattatctgcttactaatcgtactccactactcaccaaagcactaaaagtgttttttctccaatattgaagaactaagtcattcattaatcgaatctactggaacagaacgaaccaatcaaacagggaaaaggtcattcctccatggttgaactaccactggtttcttgtcgaaatgaatcacactagtttccaacactaaatgacgagtaacttcgtctatgaagctcacaagagtgtatcccgagtgcatacgaacaattcgctcaatacccaaattcttttaataaatccttcaaacatacgaaggggagggttcgctcccaaaaccacgcatatgatgactgagttctgcaagttttgtggttggggtacaaacttgattagctttgaatttactccagatattgacagtcgagctttgaaaatccttctcttcaacctcctcagcttaggttttacctttgtagttcaaatctgcatcgcgagacaaccttgggtctaaatctctattgcaggttcaacctcaagctctgaaagagagtcctaaaaatcctcaaccaccggcgcatcactacaacaaactgctacttttagtgacaactttttagtgacaacataatttttttgtgactaaatgtgtgacttttagtcacaacaa

SEQ ID NO: 297472 - DNA, 1726 bp, Cannabis indica
tttttttacatttttattgtattattttataataacaacacgaaaactacataaaagtaataggaaataatatttgaataacattcaaataatatccaaacaacaacaaaaattaacatacaaacaattaaaaactaacaagaatacaacataaaaatatatcaaaagactatattttctgtaaataaaattataaaaatcataaaaatatttaaaatccgtacaaccgtatttttataattttttattatttttgtatatttttaaaatattcggaatatttttttatattccttgaaagtgttatttagtattttgagtaatattgcttccacactatatttatgcaatcatatagaatcagaaaattttcctagaggggttataaaatgtaaaatatttaatgaaataatgtataaatataatgtgacatattatgatatgatttgaatttggtgaatatgagaattattaagcctcatccaaatatattttttaacacataattcaccaattaatatattttttaacattcacctctctcaaaaggaaaactcaagagaaaaattaaagagatttaaagagtgtctagagatataattaataaagaacatacaatatatataaatatatatatctcttaatagtagcacttttctcagttctcacagcattagcattctttatcaaataatcatgagattatacgtacgtactccgtactccaataatcattaatctagaatacaattttgatctcaaaatagtcattaacatacatgttttaatgaggtatatatatgggtgtaatttacatgttttaaatttgaagaattaaatgaacttaatttatgtatgtattttctatatatatgaagaatttttcactttcaaatttattttaggaggtatttgattaattacaagtagtattggataaagaaattatatatatatatttatatatatatataatatttctaatataaaggcatgtacagtagtatagtcacaaagtcgtacgtatacaaaagtcgttgtagtattctctaatataataataataagtttgataataattaagttctatcattaataattatgaccacaaattttcttatcagacaatataattctttatttacttgcacttcaaagaaaaaacagacaatgtgccttatcactatacgtatgcatacatacatgcagatatatattgtatattatatattatatgtaaacttgtacaaatgaatcatgagaataatggttacatgttttgcttatatataacgttaagaaaagaaattccaataatatgatcatgatcagtaatattattagactgaacctaagttactttcttgtcagctaaggaagtagaaaatgaccccctatttattattttcattttatcttattacaataatataattatactagtaattaagcgtgaccctaataaaatctttgccatatttatgtatttattttttatacatatctattctatataaagtgtgcttatataacagaacttttggtttttgaaaaattcatgagtgactttttatttatattaaaaataagatggtttattattaaaaataaaatattttatgagaaattcatgagtcactttttatttatatataataaaataaatcccattaaattcaaaaaaaaaaaatagggttctagattttctttaattaccgtatttcta

SEQ ID NO: 297473 - DNA, 5823 bp, Cannabis indica
agaagaagcttgtgcagcagcatattcattagacctcaaatactgaagatacagcgggtccatcattggaacttgcatgccacctgcattgtgatttcccaatctaccagcattctgcagctcagctgctacagccatcatacttggtcctagagccaaacctcctccaaatgccccagaatcaaggccacccattgcagatgcagcagctgcattttcaaacaagggtggtaaattaccacttcccattggactcccaatcattgatggagatgtaggactaacagcatacccacttaagccatagtttggataagtggaattagaattgtctacattgtgataatgagaggaagagcttcctctgccatgatttggggtagaaggtcctctgaaaaatgaattagcagaagaaacagcagttttattaaattcttggtcatcgggcatcaatgaagaattgctcaaatccatccccgcactacttttattcatattctgataagagcctttagtcgactgtgaaaatgaatgcgaatgaagatgcccagaatcagacttatttaaataaggctgctgactagtattctgatcattttgcaaattgaaaagatgtcgattatcaatctcatgttgaatttgtgatcgtgcatgcttctcttcatccatcataccacttgacagattcataccagataaagcagctactagatcatcagactcgccaagatttgatgagacaccattgaatgagttttgaccattgacacttcttctatctattggggtagccctccctcctccagcagttggtatgcgaggactaggagcccgagctacaagttgagggtcaggggtcgtgcttcttgacaaggtagcacctaaagcagatgcataggtatgagaagcagatggaccaatgttttgcacagtagacataccctgcatgttaccaccagaacgcattgcatccctagaccctaactcgtgatgcatgtgagcaaactgggtttccgaagtttcaacactatcctcaaatgcattacgactagcaggacgagaaggttgcctcgagaccgattttgaatgattaatatcatcctgcattgaaaacaaatataaaacataaagaatacagatgcaattaataagatattgggagaaagataggtcatataatttgaaaatgcattattcaggtcttacaggaaaagaatgtattgaacaaaagatttcatcattgatttgaaatcaaatgttaaaaaaactataacatgacagccatgttaacagcaccactgaattcatatctcaaaatcctaaacatgttgaagcccaaaacctaaaaccaacaaattactcaaaaaagtcagtgcatcatttggatgcgtatctcgcaaatcttaaaaattggaaatcaagaagcaaaaaaaacaatttaataaaattaaaccattatactggagtaactgtctcaaactaatgaaaactaacacaaattaccaaaagaatacacgactcatgaactccaccccatcaaaatgagaacaccagtacaactcaagaataacctatattcatacaaaccgaaaatacatatttcagtatttcactgttatggagttcattaaaaataaccgaaacttataatgaaagttaaaaaaaattaaccaccaatgaagtcacatataacagatagttgagcctcgcttcctctcacaacaaagagaaactatttttgagaaacgttagcgaatcatttgatctcaccagatactctagtcgaatacaaaacaacaaacgactatatagtaattactttgcttatgcgagacattataatttaaatacgaaccacataaaattaatggcatgaaagtccaagcaaataagatttgaaaatatgtatataaaatgaaatgcttaagtagttccaagaatcctcactgaaagctcacctgaatgatctcagagatacttttctgccgacttccaaggcccaatccagtgagcccaatcaacccatcaccgccccactccgcggcacctttcctcgactcaacctcattctcctccccaccaatcccaggctgaaccgaaaacaatgacctattcgggctcccaccctcgccgccacccactccaactttcctcctatccccaatgcctccgaccgcagaaccgccaacggcgccgcccccctgaactcgttgcgaaaaacgccagtcctccttggaaagcatcggcggaggaagccgcgggttgagattaacgtttgagtaatagtagttaacatagttaggatcggagcgaagctcctcttcgctcacgaaccctttgccgctatttttcttgaacccggaaagtgcagaagctgcgttggctgcgtcaaacaaaccaccgacggcgttcaacgagccctctacggtgggcggcgctgacccactgcggtagatattgagctccttctctcgctcgctcgcttcttgttgccgcctctgctcccgaatcaacatccccaaatcttcgccataatcagaacttttgagcatcgatcgcattgaaatctcagacatcatctttgaataagtatcggtgaccatatcacataacagagtgcctcaaaaaagaacgtaaagattgaaactttgagctgaaatttgctcaaaccaagaaatagctttatcctacagcttaaaaaatagtgggtttctctgataaaaatgaaaagctacaagctcgtagctcagaaatttcacccaacaaaggaaaatttaaggaaacaaaaacagtttttttttcggtttgattatgttagatattaatattccgtacttgtaaaggttataatctagtaaacaggattgagatcaagatgaaagctcagaactttggtgatcggtgataggctcagccatgtttacacagagaaagagctaaagaagaaagagaaagaaggaaggagacagtacaagtgagaaaaaaaagggagtgagtgataagcacgagctgtgtagcaatcgcgaccgttggatgtaataagtgacggcaaggatttattcgaaagggatttgttccttgcaatgaccttttagggttttatttctggaaggaatgtgtcatggtttccattttttgaaaaaattaaaaatgaatttaatttattttatacataatggaaatagaaacattttgttgctgaaaaatgtaaataagatgcacccctccatacattacatacccacgttgaggcttttatatgggaatgacattttcttatacttaccagtagaaaacagaaattaggaaaatgaattattttctatcatgaattttaattttaatttttttttggtaatgacatgaaatttatttcttctcctttcaaaaacaattaataattgttctcatccaaaacccaatatattcttgtctgtttttttgatcatgcaacacctgattttctctttttccttttgaaagaaactcaaaatatttttgatgtgtctttagattatactacatatataaatatagatcaagcaagcaattgctctcactcaaggcctatagttcaccaaaatataatatagattcttctagactcaaaataagtaacgatgctactttataaaatcaataaaagaaaaagtgaaatttagtaatattttgtctacatgttgaattccaattttattgttatttggacttttggtgctatttggttgggcttttaaaagcaatttttgagcttctaaaactctaaaaacaatttgattggtttttgttttatctatttttaaaaagaaataattacaaatgataaaataaaataaaatatggaataacaatcggattcactatcgagcccaccatcggactaaaagcattacgttatcctaatttttgtacgtggaagtgcttacgtagacaaaattagtgccacgtgatagtacagctcaccaataagaaaccaagtcagtacctaaacgaacagagaccccggcactcaaataggcatcaagtgatagactagctttctcacaaaagctagttggctacccctgggccgaccagcctctagactgcaccatggtcgaccagcttgcttcctacaggggtctgatcggccaagagaagctctacagggttctctgtgcacttctacacatggacagtgtcatctgggctgcaaattgggccttaaaagcctaatataatagctaaataatatctatgttcaagagcattttagtcttttttaatcaattaattaaataaacaaatatctaagatttcaagtgtaaattaggattttaggcttcctatataaaagttttaacgctaacttagaaaatctaagctcagtttgagcctgatactagcctccaagctctaagcctaagtctgataactcttctcctctccactttctctcacacgcccatacaagcactcttagcacatgagatttaccaatcttgatacatactttgtatccttaagggtgctatatcagatctcgcctatagtaatctaaatagtattaacccgcagtattaatacaactaaaaggggagtaggtcattacccgttatcaaagggggccgaacctctataacaaatttgtgtgttctttacttttttattctatttgtgtaacacgtggcaagcatcagatccatacgaccccgctgtcagttgatcactttttgagatcaacagtttggtgctttcattgagagtgtggatatcgtatctgattaaatgtcatggttcacacgagaagaaccctaatcgcaccatctgcatctttgggtctccctcgagacccacagaccgtagatctgaatgctcaggttcacatcacaattggaatccccatgaacaccgcagatgtgacaaatcctgtcaccaccacaggcaccacgagccttgccactacagctggctaaattgatacaaacatcccagtggatatgaatagaaggcctttgcctctaagggaagacccaccattggcgcctcccactaaaggaagaactcatgggcaaaaaccctcagaaacaactgtcgaatctcgtcttcggtattacaatggagagacaggaccaggagttggtgagcctacgattggcgagccccatgtggacttgggagaggatctcgagttagccagactcagagaatttgtaggccaaggaggcttaattgaagaaccacgcgctgctgattgcgatgtattcgctcagtagagatgcaagttcgtgagaatgatggatgaccaggagtacatccttcaatctcacaaagcagagttggatcgccgcaacagagaggtcggtaatctgataaggcagttcaaccagagatccaatggaagaggccaggatctcattagaaatccactttaaggaagactcattgataaatcagggagggtataacggcaagctgaccaacctggttcctcaggaactaggacatatttttccttgctagggggaggacaaacatttcctcaaaggtctaacggcgagagcagctagatcccggcaaccagggacatggggggccagccagggatctctagctcagtaacccccccagtttttagcctgtggccggccagccacaagcaggagcacccttggccgaccagaggacgtcacttcctccctgaggggagcgaggcacctagaggtcaattttcaaccaacaaggactgcaagcaggtggaaacaccgaaaatggcaattcacaaagtgaaaataatcacttcaagcacctagatccaccaaactctagcaattggtgtgatct

SEQ ID NO: 297474 - DNA, 1656 bp, Cannabis indica
tgtttgtgactaaaagtaagattttttgtagtgcatcattaaacttctaaatcgaaggcagcttttgagttaaaggtagtttgatgttccgatcaacatggcctataaccttaatatcaagcttcgagtgttcctttttcctccccccatggagatagaaggaaaactctccaagctattttttcgttcgatcaatgttgaatgttcaatgttcaattaacaagcctaaaagtggctttactaccacattaaatgacacatatttctcagatatatcttcactaagagaaatttgaaaaatcaaaattattgatgatgtcatgatttcataaggaaaatagtaactatatagctctagaaaacaataattcagtctcaaaaaaaaggcaaaaagtcttcaaagtagcagttggaacgtccatatcaacttaattataaataagagacttttttgatgaaatattatttcaattgaagcgtttatattactttgcacaacttagaattcgattctaagaaaccacacatacgcactctcctatgtcttctatggccgagctatagccccaagtgatttctttccataaaatgttgttatctctttcattatcaaatttctttgtggccaaaacaaactctcaactaggaaccttgtcctcatctacagttaatattgagaataggcaattaatggctaaattgtggtgttttttcctactacaaaaccaaaaaattaaatggatgaaactaaagtcttgtttgtgcttacactagctaggtagcttgtcactaaaatgaatcctttaagtactctctgttgttcatcatcataattttgttattttcattcacaaattgttgcttatcaatattcatttctaatctaacatcttcgcaatcactctcttcaaaccaaactcttgtttcctccaaccaagtttttgcattaggcttcttcacgcctgacaacacttcaacaaatcaatatttgggcatttggtataagggatatgatttcctcgtccagttgtatgggttgccaaccgcgagcatccactttcgcttacaaccgctacttcatcggtagttcttcaaatcaacaataatggaaatttagaacttattacgggaaaagctaataaaaaattcttcctcgacaatttggtcaaccaacgttgaccttccatctaacagaactagtagtagtatgttcagcgtactcttagacaacaaaaactttgtccacaaaaatgttacatcagatgaagatttgtggtagtttcaaaaattcatgtgatacgttcttaccagactccattctaggtttcaatctcaaaactggagaggattacaagctaacttcatggaaaagtaaaaaatgacctgtcccctggaaattttactttgggattaacaaagaaaacacctcccgaaatggttatttggattagtaatggatcttcatctaatatttactcgataatcagaccaagataagctaatactcactagtaatcgaaaccctaacatatattcttcgtataagactctgttcaacctagtagaagatgtagacaaaggaacaatgtagttgaaggtaatgaaatagaatggaaataattttcatctcattcatttgtttagttgcattttaaa

SEQ ID NO: 297475 - DNA, 6871 bp, Cannabis indica
taacccatggttcaattgtcaataggtcatgacaataatttgtaacaggtaaattttacattcttctttcatctgtgtatcccagccacaagccaatggacaagtggaggccgacaacaaaatcctcaagaccatgttaaagaagaagcttcaagcttgcaaagcctaattaccagaggaactccctcgagttctctgggcctattagacaacagaaagaactttaatggggcacacactgtatggaatggcctatgggtggtagagactacaatcccttcccatcgacaagagacttaccactcttctcgcaaccattccctactccaagagtcgttagacttaattgaagagcttcgtgaatagtcgtaagtttaacttaaaatgtaccaaggaaaaattacctggcacttcaattcaaaggtgaagagtcgtacatttgatgttggcgatcttgttttgtgaagaatattcctaactgcaggaatcgggagtaggggtactcggcacaaactgggaaggcccctatgagatactcaagaaggtgggtcattgtagttttcagttgaaaaggatggatagaacaagggtccctcactcttggaacgcagatcacttacgtgtatactaccaatacgcgaggaaaattaggctttgatgacatccggaatgttttgtgtaagaatctatgtaattaacttttgcacgaatggccctcggacatcatgaaatgaaaacaaaaacattttacatttgaatttacactttatgtttttaagccacaagctatatttaaaacaagtgaccaggaagttggacacgtccatacttctcagctcacttggggggtatcatgcctagtcgtgtgtgcccccaaaaaacgtgtcgtgttccatagatttttattttgttggttttgtttattaatatttttaattttttcttagaacttgatgcattttcaaccaaatttcttaaaaaggaagatcgcttgaattctttcttaaagttaaaataagcacatatttttaaagaagaagcgttttcaaccaaagttcccagaaaagcaaaatactcgcgtgaatcccttcttaaaaactttcaaaaagagttgtttagaatttgaaattattaaggcctcgcttgaactcctatagactttaatgtcatcctgactggaaaaattgtctaaagtctatagcgtataaaattggcctgcctaaattataaaaaaggcttaaacagtcgaagaatgtcaaggctccatgatcatacagtatactgggaacaaccaaaaaaccattcatgttttcagaaacttttagttggctcaggcttaaatttttttataaggggttaagaccaaaagcatcctacgtagcaataggaagcaagtactttttaagtacctcctaagtcagcagaggagtttaaggctgactgacatcaaaggtttgaagtggtggtcgttgtaaccacacgcttctaaacagcctaaggagacaaaccttaaaataatcacacaggctaatgcataaagctaagagtgaaaaacagcatgaaatattaaaatctaaatatggtaccttgtagaatggtaaaccaagttgttcctgaaggccattgtcacatacagccccgcagaccaggccaaaataaacacaactccgcggcaaacagaattaaaattttcttaggaaaaaagttagacagcaagaaacaaggatggctcctattaacctttggtaggggaaggtgctaccgagtcgatccgagttgtgtcattgactggccctggtaaaggattgtgattaggcccagtcgcatcctgaataggctcccctagattcgaattaggcccaacgtcccaaacaagctcctgctcaatccttctggaagatgactcagcttctgcaaactcttgagagcttgagacctcaacactagtttcctcattgctatgactatcaaacagaaaggggaaactcctcaatatacatatcttgctttatggcgagcactctcctgctaacatctgccctatcttccttattaatgagctggagtattgtagaatctaccttccaaaggaccatggcataggacatctctaagaaataaaggcgatatttctttcccttagctgctgctgtgactgcatcctgaataggtcaggggcattttctctcattctacgcatggaagctagggaaatatatgccttcacaccattcgttgggttatggttggccttcctttgcaacatgttattggtgtcttgtcgaaggttgcttttatgacgagctgcgtggagaagggtgctcagattgctatgttgtgtcatccaagactctattcgctccttctcttgtttatattcgtccttaaggacctgaatgagttggtccttttgttggatatccctttggagagagttgatctcccaaattagggtggatatcgttttagactgaagaaccaccctggcctcggctttatccttttcctccctggccttatcaaagttttcttgaagggaatgcatggtctcctcaacctttttctctccttaggtctcgtgttttaagtatagttcctagtatttggcgtctaagttcttctccacaaccgctagtttggccttacagtcttcttaaatcttttggatgctagaggcagcctaagtctccacctactcgacttttgtgcgtaaggcctcattctcggttgacaaggattgaactttagcacaaagttggctcagttcaatagtcatgttacccacttctatagcagtcctctctgtgaacaacaccatctagagaaaggaaaataacgtgaaatggttacacacactttgataataagaattgcattaaaaggactaatggttcaggaaattaagacttcccctaattcatgttgcttagcggccaccgataacgtgtatggatcaacattgttgcttacatcccatttctcaggtgtaagcttactcacactaaggctcatgctatccagcatctctggagcataagggccaatgactctacccaccttaggtaccaaatatcactaattgcagcaagatcaaacactgggttggggaggcaggctgacaaacaccccctgcaatctcagctgtcttgatggaagatagccgagtagcccatttttgaagatttacttgttctcactcatggcgccttttcaaaaatgcagcacactcacatgcctttatgacgtagtcatggtcgagaataggttgtctcatggggaaggagaaacccagtgaaggaatcttaccccctacagcatgctgagatggatcagtagaggcatgcctaggggctgcgtgcccaggaaggtgttgaagtgtaggacactgagaagggtgtgaggcagactgagatggcacaatctgcaaatgttaaggggatagagtctgctgctctcgcagtagtggcactcatccaagttagtgttgttgttgttgttgtggttgttgttgttgttctcgttgttgttgttctcgttgttgttgtagctattattgttgttgtagttgtcattgcttctgcgtttttggttgttgttgcagatgtgattgttgtggtttctattgttgttggtgttgtggctgttattgtttttgctgctgcaattgcaatggtgggttggtcaacagtacgccagatgtccctagattcatgattaaagacataaccttcttcacgctgggacacagagaagtatttgatcccttgtgcttagacttaatgggagtccctttggggggaaagaaaactccatccaagctgttataaaaaccttgtgggtttgatgtggtgtctaggattgtcccttttgggaggggaatgtcttgtaaggcctgctcccctggagtagcaagagcttcagaagctttagaggcctttcgggaggtgatagagtccttctccccactagcggaagcagaagggctggagttgtaggtccagtctcggtgggaggaggaatctctcggacatctggtgacaaggaagttaaagtgggacacagttttggagtcctagaagccatgtcttaattttccccttgcctatttcttgggatttcttggccttgtccatagcggcagagatctagctactctaagactttaacatcacggactctagtgtatttgcgcatgaagaaacaacatgagtaagtaaaaggaacacttatgatcatacaattatgacgaaaatagtaacagcaagaaaacgaatctagtaaagacacttgttcgtgggtgaaaccattcagtgaactgctatagggttgcccgtgagctaaagctaaaatacccctatgactaatgaagctttcatactccttaaatttgggtggggacatgccatcaaatgatcaactttgacagtgtccgaaggagttcccagatttatagggcttctaaatatttcgtctactttgtctatgtaatcaattcatggggtatctacgatgattaaggcctagtaaatatttgtcaagtcctccctggttcctcaagggcaagcgactcagactggggctacgaaggatgcggaagagtccattacctctttccgaagtgctagcacccggtgtccccacatcaggataagtagcggtaaacctctttgagatctcttcttcctcaaatagaggattggggtggcacgacacccaatcatagctcagggcattatcattctatgacgcattggtgattataatggccagatcagtggcaatcgcctctttcacttccctagggggttgaccctatcctcgaaggttgactgtatcaatactttggaactttgtaattaagccagacctacggaggagttcagttatcaccaagtctccaaccttcaattgctcttccaagaaggccctatattgggcttctttcttgattatctcctcagtcctaatactttgaggaggaagctcttctacaaatcaaatatgttaaatcaaagtacaaaaattagtaaaatttaaaaaagaagacaaaactcaaggtaaatcattaggatacttggaagttgaaagcttaaccgaagacatggcacctagctagtaggaaatctagaagaaaagaactaatattctcagagatcatgggtgcgattgatttgacatacatgatagtaagaatccaagcacttatcttgacggaagaatcttagctttgttctgtctgttctcatgggattagccttgacattgtaaaagtaaaggatttcctatgggaaagttgcacatttttaactttgttttaaacttcctcttgataaattatttagaaatacggtgagccacaaaagctggatgactttaaatagacagttgatagagttccgtaagagtgtaaatgagtttattggagatgcttaaatgcaaataaattctggtagagttactcgatgcccttgcatgagatgtctgaatgtgaactttcagaatctaaatagtattagggtacatttatttatgcatggcatccagcgatcgtacatgaccaagtattttaacaattagtcattcacaaaatcggctatagaaatagtagacaacggtaaagaagaaaagaaggatgtgatggctgataatttaagagaagatcctggttttgacgatacaagtactaccattgattccttcaatgatccctcactgaatggtagtagtaagtacgacaatttgtttaagaatatggaaagtgaactgtactagaattacaaaaaatcagcgctcaatgctttggtgaagctggtgcattaaaatgttctcaataagtggaataaccattcttttgatatgttactctccatattgattgagttatttctagagggtacaaaattacccaagtcccattacgagtcaaagatgaagttgtgtaaccttgatttaggttatgactccattgatatatgcaagtatcaatgtgccttgttttggaagtagaatgataaaaacattttttgtcctatttgtggcaagagtcgttggaaaaaagggacacaaaaaaaagttgctcgaaaagttatgcggtacttttccctaactttgagaatgaagaggttatacagttgaagacactcggacgacgacatgcagtggcatcactgtaagagacccaaagaggatggagttcttaggtaccctgcagttgcaaaggagtggaagtagtttgataggcgccatccatcctttgtacttgaacccagaaatgtgaggttgggtttggccactgatgggtttaatccctttggtaacataggtaactcttacagtaagtggcatgttatctaagtcacgtataacttacctcattggaagtgcatgaaagcgaatacattgacgttatctctattaagtacaaggcgcatggatgttttcatgagaccattgattgatgaatagaaagagttgggggagtcaagtgtccaagcttgagattcttacaatggtattgagtttacaatgtatgctattgttttgtggaccattaattacttctcagcttatgctttgctgtttggttggagcaccaaaggtgtaatgacaacatgattagattatagattagcaaaggaaattagcattaattattggtattatatttgattttatatttattgtgagccccatatttagaaattggcatttaagttataatttcttaattccagagattttatttaactttaagagtattatttatgttaaatatgaaatagtaatttttatgatttttcctcagcgacaatggaaaatgcaatggatcgtcattagagtcacatgggtaagtttagaatctaattcttag

SEQ ID NO: 297476 - DNA, 5101 bp, Cannabis indica
gtttgtttcgcggtgttgtaattttgctgcccataatgtggctaaatggactttcgatcggaacattacaggttttgtggaaccttcattaatatctgtttctatcctttgtaatgaccatgagatctaattttttctatctatataacgctttattttcaaagaaaaaagatataataattactgtaaaaattaataattttaaattgaattttggatccactttaagaaagctatatttctgtgatcatcttctgaaccccatctctctactagaacaaaatattatacacataataatgccactggtgtggcaaaacactgagaagggagcagggagcagcattataaaccctaaacactgagaagggagcagcattataaaccacaaagggaaaaaaaaaacaagcaattggacaatgaatgagctatattggcaggtagctccattcttctttcttagactttttattactataaaaaatctcacatcataacaattgattgaataacagaagagaattgggggagggaaatatctataaaaagctcttcttcaagctattgtcaatgttgttggaatgtgaaggagctggcatcattccaggacaggcagcacttgatctttttctgttggggaatatgaaatctgggttcttttggaattgttggattcttcatcgacctatccaacaaaaccgaaatctcagaacacactaaatactatcatcaatagttaaaggaaactgactttttgtttaccttcttgggatgaaaggtctatcaaaataaggcatgggctgggcttttggaacgagttcctttctcagtcttctaacttcttcctcttctgccatctgtagtaagataaaggaaagaagaaacaaagcaacattaataaaaactcattgaaaagtaccaggctgtgtgtatgtgtatcagctaagaattattattaccctttgttgtctctctctttccatcttatatagctctatcagggtcattttctctgctacctggttgtgtaaaaaggtgtataatgtaagtatacacatcaaacttccataacatataataataactacttatgttacaaagctgagtgcctagttaaggcaggttcattcatgatgactcacacaccacttcacatagacatagtaaactaaatgataccatttcatcactgcaccataaactttacttcttttcataacatagtaagctaaataatttatatcaattcatcactgtataaatatttcttcttctctatgctgagtaagcataaacgataccgtttcgtcactgcacagtaagctgagtgcccagtaaaagcaggttcattcatgattcacacacaccacttcacatagtaagctaaatgataccatttcatgactgcataaaaagtatcttcttttctttgcatagtaaggatcaaagagataagggggaaggaagaaagattcagcatgataaaagagcacctgattatcaaactcagctcgctctactgctcgaacatcactgtgaagcttcagatccacaggctttgttctctctttcactggaggttttacaaggcactgaaatgaccaaattaggaaactcagccaaaggattctaaattgaattgagaagcaatagactattatagaaacaagagaattagagaactaatgattgtcaagctcacctctggttcatctgtagtccaaggaagaccctgagcaactggtatccgctgcttctcttcttctactattatctcctgcaatttcttaacgaattcctcttccttcattcttcccctttgctgcaatgagaactctccaaaagttatattcaatttcaatgctagtaatgtttgtattccgtgaacaaacttaatcacaaacacacacacacccgcactcacctattatcactcacacacagttacatacatacatatatacagtgaaacacaatcattcacactcagacacacgcaggcattactcagaaagttataaacattttcaatgctagtaatgttggcatttacctctgttcttagcttgaatggtttctgagaagtggctttaagcttcttctttttccatctactaccaccaattgtgctaatcgattctaagctctgagattaaaacgcgaataaaatgagcccatcactttgtaaaacatatacgatttccttaacaatctcaaaacagtaaaaaaaaagtcttacatttcttcgactccttcgcccaccattagaggaattcctgcttgaaacactacaataggtgcaaaacagcaaataaaccaaatcagaaactcaaaatgagcaaattctaaacatatcagatataatacttattgaaaaagaaatcataaattgggattccaaccttccttgactgccatcccaagaagacgaaaccgaagcttttggatccaaaccaagattttcagatgtcaaaaacaactcggatggacaaaacgatgaagatgaaaattgaatttcaggaactttaggaggaggtaatccaggtaaagcccacatcattggctttttggtctctactaattcctgttcctgatcagtcttctgatcattagactccttagacttgggtatggaaagaagtttctcaaaggcatgaaccaaatgcatcactttcccacattcaggcgcactgttccttgcttcttccaacaacttttcccgccttctcttcactgtcgagcaacctaattgattaggcgaatcaacctcaccagattcgccattattggaatcattaatatctcctgcctgcccctgatacccatcatcgacgtgaaggtcttgaatcatcaaacccttagctatttcctcttccagttcactctcagctctatcaatagccttagaattgttagattccgatacttccccactaacggaatcacgactcttgaaaaactcctcttgcgaagcccggagattctcataagcgacacaaagacacttcttaggattaccaccaacgaccttctctttacacttgcaagcaactttcggagccacgttctctttcttagagttcttcttcttcgccaccacgaactttctttcccggatcttattccgcggcgagaaagcaaccggattctggttcggatttttcgaaaccgatttctgagacttggccgatttgatcactggcgagttcgtcgttttaggaccaggggaaacattagggttcagattctccgaacatctcaaaatttctgggttctttgatcgagaaccatgtgaatcttttacaggagtcaccgcaccggcgttcttgccgatcaaatccatcgggaatctgagtcgcgaaaggagacacttcgccggaaacgattagggtttcgtgggtttttggtgaatcgctcagtgttttttctttattttagttagaactgcacaaatgaatgaatgaatgaaatggtggaaaggatgagaagaaatgagaaagaagacgttgaggtctgtacgctctgcgtgtaacggctagttttgtggggccgttggattgaaatttttaaataattgtttgagtttctaccgttggattggtgtttaagggagacaatgggctgatttggatttgattgacaaccgttatggccgagatagttgcctaattatgcccgtgaagttaccaaaatacccctggtctttttatcaattccactgtcgtaatgataaaactttcacaaacaagactgctaatctctttttttagggtatccttatatgttggagaattttagtttaaatccttcttttttcataattaattgttcaaatattgttaaaccttcacctttaccgcctaagttaacgacacattcttcaagaaacgacatttcaattttttttttgaagtacaaaattttaatttgtttattttatcgttaaaaagtccaattcatatttacaacactatacacaagtaggaaataccccaaataagtttgattacaattatatttaatagcaagatgagaaaaaaaaaatgagctaactagttacaatttctgttaatatgcttaaaagaagaacacctctgaaagcactcagcttgcttcttgacctcagctgcaatcacctggcccagcccacaaaagtctccctagctagatatactaacatcacaattaacacaaaaacaaccatgtctaggaggttcctatcacttaatcaccacaactcctttttgagaaaaaatgtatttggattaaaacgaaaagaaaacctagaggtcattagaaataatatcagttggaattgggtcaacctctcgattaaaccaaactgataacaagctagcgcccatttaattgttagaatctatgccttgagaagcatgtaaaaatatctctaaaacattttcatatatgtttgaatgtaattaaattattaatattaaatattaaatgatttacatacacatatttaaaaaaaaaattattcatacatcttgtattgtacggagaattaagaaagacaacttagctatgaataaaatagttagcagtatattaaagttatagaatatttaatcaatggttgctagtacagtttactgatacccactattcagtgcaagcaatctcgattcaaattactgatatagtatgacatctaagtgaatgtgttgtatttaataaaaattatatatggcaagggtcgatatgaaattaaactgtctttatcaaacatgtttattataaagacctaattcatatcataaagatgatcgatagtaaatcagcctgaatcttaattaattatgaactcatgttcatgttattagtttctttaatttactcgttaaatttttttatagaagataatttttataacttctgctttaggaatctaataatatggatagctgggaacatgatctacaattatggaatcctgactttcctaacagatcgaatgttggtttctattaagtgttaattctggaactaaaagtgtgcacaattaaattggatcaaattatattttcattagtgaattaatggtaccaaaggataaacgagtaattagaagggtaaaaca

SEQ ID NO: 297477 - DNA, 3241 bp, Cannabis indica
ttttatcatgcttagtcaaagggaagtgttttggagacaaagatcaaaacaactttggctgaaagagggagatcaaaatagtaagttctttcattccaaagcttctagtagaagacataataatcatatattttgtttaaaagctacttatgggaacttgagacacttggagaatggattagatcatgtgatgactgatttttacactaagctttttactggtgagtctacatggtgggaggaggttcttgattgtgtgacaccgacagtgcgtgaggaccataatgagattttgcttcggccgattggtgattaagaggtcaatgatggtgtgtttgaaatgcatccagataaatcttatggccccgacggtatgaacccaaaattttttcaaaaatatttgtccatagttagaaaagatgtgattaatactcttagaaactttttctgctatgagcaaatgccgagtagaatgaatgatacaaatattctcttaattctaaagaagaagatggaagatcagatgagtgagttgcatcctatttctctttgtaatgtttttgctaagataattactaaagttcttgctaacaaaatgaagggattattatctaagattatttctttgaattaaagtgcatttattcctgggagactgatcacagataacatcatggttaccttttaaattttgcactacttgaagagaaagaaagtaggcaaagatgggtaaatggtgctgaaatttgatttacgcaaagcttatgacagagttgactagcattttttgtgcgcaatgctgagacaaatgggtttcgctgataaatgggttcggcttatttttagttgcttatcctcagtgcaatatcagattgtaaatacaggacatactttgggatcgattgttccaagcagagggcttagatagggtgatcatattcctccgtaccttttccttgtgtgtactgaaagtttatctactgtcattagaagatttgaggaaaggaagtggattcatgggattaaagtagcaaatggttctccattggtgtctcatatattatttgctgatgatagttttctctattgtacggctaaaaatggggaagtcactcgtatgctacaacttcttcatctgtttactatggctactggtcagcaagttcactttgacaagtcttctgtgttctttagtacggatacaacatcaaaaacaagacaagaaatctttgctagaatgggtattcaggaggcggctgagaatagcaaatacttaggtctccaaagtacggttggtagaaataaaaatgttgtttttggctaattgaaggataaggtgcagaaacggattcaaacatgggacaacaaaatcctctctagagcaggtaaagaagtgctaattaagtcagttgttcaagctctgcctgcttatacaatgaatgtctttcttattctagttggaatttgtaatgacattgagcgatctattagtcaattttgatggcgatgttcatcaaaaaaaaggtattcattggatgaaatatgccaaattatcaactcataaagctaatggaggaatgggtttccatgactttagggactttaatcttgctttgtttgccgagcaagggtggagacttctcacatgtggtgatagcttgatggggaaaattttcaaagctagatacttctcctttggctcctttctttctcctactttgggattaaatccaagttacatttggaagagtgtctttaaagcccaaagtttagttcgggcaagtgttagaaagattgttggtgatggctctacaacaaatattctgtctgatccttggttaaaggatgaattgaattcctttattgagtctcggcatccaactcttgttgggaatgttgttagttctctgatgaagaccaacttactagagtgggatgaaaaaattgtctcagatgtgctaagtgtgagagatcaagctttaatttggaaaatccctcttacaagaagctttggcaatgatacttggtattggatggaggaagacactggtttgttcattgttaaaagcgcttatgcattgcaggaagtaattaatggtagcaatgatatggattcaaattcggggatttggaaacaactttggcagttgaaaatccctccaaaggttcttaatttttttatggatagtctcttctaactgtttacctataagatttcagcttttgacaaaacatgagccaatcaatactcaatgtccatctgtgctgtagctcccgaaacatctttgcacgttcttgttcgatgttcttttgctcaaagtagctggagcatgtcacgggtacctagtgtggctactgctgcaataacctttgcagcttggtttgaggaagggctgagttgttggagcgtgtccgagaggttggaggcggccatgctttgttggtcgatttggaagcacaaaaacgagccagttttgaactctaaaaggcctgaggttagtgaggttctgacattagctaaattgaactttattgactgatataatgctcaaaagaataccattcctattgttggagttagtggttcggttgatgcaaatttggagcattggacagctccctaatttcatacagttaaagttaattttgatggagaaattttcacaaatgaaaggcgttttggtatgggttttgtggcaagaacggcggctggggtagtattacaagccaagagtttgatcagagtagatgttttgcagccacatgttgtggaagccattggcatgaaggaggctttaagttggattaaagtaaatggttcgacaaatgtagtggtggactaggattgcttgagagtcattagagatttaaaaaggttaaaatgtatggcttctccttatggctatataatctcggattgtatgactttatgctcggaaattgttgatctttcttttaattttgtaaaacgatatgctaataaggttgcgcatgctattgcgcgatcttctccctttgacgctgattgtaatatattgcggatgtgttacctatggtttatgcatccttaataaatttcatcattattcaaaaaaaacttaagccttcacacaatcaaattgctgctgcaacctgtgaaacttcagtcaattatttaaaccagattttcaatcctaaactctaatattaattcagatgcttactttgaaaaataatgcaaagatgcaaattaacttcaata

SEQ ID NO: 297478 - DNA, 3513 bp, Cannabis indica
aaattgtttcctttccattccattccatttcattacctccaaccaaacgctaccttatttctttagtatcttgggttgtgtcgcagaggtgggagaccacttggagccattatgaatggttcggaaagcagaacccttttatttcaaggatgattgaaatctactgaaggcagaatattagataagtcataagagcaataattttattggagctttaatcggggtgaggataatgagcgaatgaattatgttattttcatattgtgggaaatatatacttataatggaagtaggttaagtctcatgctcatgtcttggacaccatgatatgggattcaccttggttgttgtttacgagaaacgttataatgagtctaatcgtacaattaacgcgaatgagctcaaatagctaattaaggtaacatgtccgagagtgagcatgctaccaaactggttgtttagatataactttcaatcttgagtttaagtcctagaatagattaaaatgagttgcctactggattaccgtttttgtgacataaggcttgaggttgttgagcattttccacttgagttgatcgaaatgggtgaatttagacatgaggtaagaaaagtataacggtgccacatagcatgtcaatacgtgattcgataattatcgtctataaaagagagttgttactctatttggtttctcattagacaacaaggtaagaaagagttcttacactattgggttgtctcattaggcaaccgtgtaaaagagaagaaagagttcttgctctattgggttgtctcattaggcaacagtgtaaaagagagtactactctaattgaaacagttggtaggtttcttacttatcggttgtcttattacacaacaatactgcttcgtttggcaaatgtgagaaatggttactcgagtgacaatttagtttgtcttataagataaatgtgtgttactagtgattgtttgtattagacaatgtgatttcttgctcttgagttaagtatgtaaatatctgattatgatttaatggttatgtctgattatatctgtacttagaagtatcctatgtatgcttttgcttttcttgttaaatttttgtggcttgcgggtgctttgtggtgcagtgttttggtttatgataactctgaaaagtataagtatttggttgtaacaatttaaaataatatctagaaatccttttaaaggggatctccgaccctaatttataatgccaaaaaaatttattttatatctcgaataattaaataaaattttaattatattaaaatattttttaaatcgttagtttattattataaactaatttataaaagtacatatgtggcgtctctacgggttaatgcattatatgagtcattttcaacaccatttcagaataagtcttctgagaatattctccgttttcattaatgattaagatttgggtgttttcaagtagaaaacgtagtcatttaagagccagaactcggacccagcgcccaaggtgaccttggcgttgggcctagcgaccaggttgacattttgtcatcctaggttatttccaatcaaatttttcgagaagtcttttggaaatattcttcattttcacaaataattgagatacgagagtttttgggaatcaaatggaactactcagctgaaaaaatattgacccatcgcccaagttgacactggtgctaggctaaccgccaaggttgacattttgtcaacctgagctatttttcaatcatttctcccaaaaagtgtttcgggcatatttttcgttttcataaataatggagatacaagtgatatcggtgagcaaacgagattctctaagattgaaatagggacccaacacccaggttgacatgggcattaggcattgcgcccaagttaacatacaacctggtttgcatgtttccactcctcaaacacaaactttgttccgagcatttttcttattttagtaaaaaatagcgtaagacctaatctcaaatgcataagaaatatcaaaacgagtctcgaaaagccacttgagacgcacctagcccctagccccaagttgacgtatgaactggtgctttgggttaaataaaattacaaaaatattatctttttgcttcaaaaattatcaactgattaagaaagtgagagaaaattcttaattttaccataagcctacattatgacccatgatctcataaaaaaaaactagctatacccacttgaaaaaaagggtcaaaccatttaacaaaattgtgtcgggcatgaactcaacattaataattcgtgtttaagggccatgttgagcctgagcctcaaaaatatgagtcaagtctcacacattgttacacaaactatattagattactggttaggggtgaagcaaaaaatttaagaaactgatcaaaccgagtacaccgaccgtttaaacaccgaaaaaaaacaaaaataaaaaaaactgccttcagttaaaacagtctttgtacgaccagttttagtgtcaatggcaaaaccgaccaattaaactgagaaccgaccgaacatatatattctacactatacatatataatataattattttgtacatatttaatgtacaattttattaaattagttttacttcttatcttttttatttaaagtctcaattatccatgctttattttattttaatttgatgtatttacatattatatacacacattcataaaataatacgagtttttttaaaataattcattactatatgagtagcacaaataatttaaactaaattttttttttttaaaaaaaaaaaactattttacattatttgtttgactaagaattttcttttcttaaattatatgatatttgatataatactctaattttttttagtttccaaacaattacagcaaatttaatgttttaattttttttttttaaaaaatgaagctcggtttattcagtttaaactgaccaaactgtagattaaaatagtcagtttttttttttatatatatttatataatagtcggtcagttttcaaattataaccataaaaactaaaaatcaaattttagattttttgtgtaaaaaattgaccgttactcacctaaaatgagatattgtaaatacaagtcaagtcgggctatttgtatatataacttctaatattattttatatatttttatgacttagttatcattaaattaaacacataacatatgtaatttaatttttctacattcactccaaagcaggttgtttactagtttttaaaaataaagcacaaaaaatgatacggggcaagcttatatgcgtttcttcctttaatctttattgtctcaattttttttaggtttaattcatttttttattaaatttttctcattgaattaattttagcttaaggttataatttctctcatttaattagctttttaatttagtttttttctccccaaaagatcttgtttctctccactatttttctttttgacaaagtgatta

SEQ ID NO: 297479 - DNA, 1784 bp, Cannabis indica
tttttttttaaataaaaatagaactttattaaccattaaaatctaatacggaatacggcaaattcctttatattttaattaatacaattattaattttttttatatttttgcggtaaatttttttattttttttaaaaataaatttaaagtgttagctttatattacatttaaatactaattggattattaacgtattaactttgaaatttctttcatgtatgtacgaatgtatacaatggtcatacaattgatattaaaagttatatttgattgatgtctcaaatttataaaaaactgtaaatttaagagagttaagtgtataaaaattaaaacataaagtcaattacacttttttatacgatgacaccggaatatttttattttttaaccctttctaaatatgccaagaattgtcttaagaatgaaaaatgcattcttctaattactgtgaagaaattacaaaaaggaaaataaaagagagattttggtttcttagagaaaagcatgagagttttttcgtatctaacctcgttatttttctctttactgataacatcttttcacaggaaaaatggtaattaaaattaacttctaattactatatatttatatatttaaaaaccaaatgctgcaatttcattcaagaccagcctaaacaacagaagtaacaacagttggagcattctctctgaaaataaacaatcaacataaaaagtgaaactttagcaatattaggaacaacaccattcatagaccgcttaacaaaacactcattaagccaaaagcctcttacagttcttaataagcaaatcaaaaataaaattgataataaaattattccgcacagtttggaccaccactaagcattttatttttaaattcacctctgccaccccttgcctttcacctatcttagaacctctttgtgtctgagagcttctgtaatatccgacagcaccacactgggacaacaccagcaacgagctttcctcaaccttccttgacaatctttgatcacacatgcaaagccaaactgagcttcttgttgaaaaattgcagcatgaatgttgatcttgaatctagtagtaacaattttagaccataggttagcccattaccactaaccctgttagggttttatgtcctgaaaagcctgtaaagacattttgattataaatctaagttgaacaatttgatatatgtttgaatgttaaattatttagtaatatttatatataatattagaaaattccttataaatatgagattgtgacttgtattgtatggatatttaagatcacgaggtatgaataaaatagtaaacaacatattcaatttatggaatctttaatcaacagttgctattatggtttagtgatctccgttactctgtgcaagcaatcttaatttggatcgtaaatgtagatgataatctcggtaggactgaacattttttttgggtttgaccccgcccgtactcgacctgacccgtagaacttgactctgtggaaaaacccgttccctataggcgggtcaactccaacctaaataaaatgtgagagtcatgttgaatttttatgaagcaagcttcgacttccgcaaaggaacgctaaagttgcttaaaagttcaagcaataaagataatctttttgtttcgggaaggagggttgaagacgtattttacccccagtgatcttccttgcatgaaaaacgatgttcatgcaagagtcatgttgaatttttatgaagcaagcttcgacttccgtgaaggaaggctgaagt

SEQ ID NO: 297480 - DNA, 2177 bp, Cannabis indica
ttttttttttttttggtaattttcccctgaaaaatgaagggggaaagagtatgtgtaggaaaaatggaaacttttcattactgacacaaactttgatacttttgcaaaatgggttgtgctatatcaaatgatcggtactgggaacgtgtgggtttgtaggttgaaaactttggacaaggttagttacgtggagcttcgtcctaaacgaacgaaaggctcatcggagagtgatgagattcgcataagagatggcttgaacccagagatttacacagaagagcatgagaagcttttgggggattgcaagaacacttggacactgcttgttgatggatatggagaagatggaaaacgcatatatgatgaagttaatggagaaacatgccatcaatgcaggtaatggacttattttggtgttgtttctttgcggaattagcctattctgccgggaattaagttcacacaaataacatatactgtctacagtgggctcttttgtcatgttattctttttcatagttgtgtttgacttttagatgattgggagataagtatagacatagtactgtttattttcaattgttactgaagtagttgactttattacaatgcaactaatttttgtaggtaaggatattgaattatgttgttttctaccattaacttgaattgtgcgtttgttagattacatttagattacatgaatacataaattgcttctcttcttttaggcagaaaactcttggtcatcatacccattgcagcaaatgcaacttggtccagggacaattttgtggagactgcttatacagtaggtaaattgttctccttctctcaagttatgtatgtatagatcgatttatttgtttgaattagctatcttataatctattgtaacattttatagtaattaacttaatatatgtctcaaaaaaatgttgatagtagtctgaattcaaaatttctgttttcaacaggtatggagaaaacgtcactgaaaccaaagagaatcctagctggatttgtcctgtgtgtcgagatatctgcaactgcagtttatgccgcaaggcgaaagggtggatgcctactggtcaactcactagaaaggttattgagatataacatgttcatatcttgtcgacaaacacttccgttatatgaggaagaaatttcaaattgcatactcttcatggacagagcagtgattgtgaaatactaaaaatactcatgattgaattttgttaatttacaggttttcaggctgggctacaaatctgtagcacattatctcattcaaaccttccgttctcaaacaaaaacagaaaactcgtgtcaaaaggaagcatctcatgaaagaaatgtatcactgacatttcaacctgagaactcatcactcgatgatccggatgttgatgatgaaggacagaaggatgttgaggatgcaactgaaaaagatggtatgtaagagaaggatgtcatggataaagaggattttgatgaaaacaagctgtaaactgcctctggttttgggatgaaattgcattccctgcaaactatttttgaatctgctgctaaagcagattatatatattatatatagcgagtaaagcgcgtagtaattttagacatcatacagagtttgcagggataattcatttactaaaatgttaactgtctagttgggagctgcagctatcttcaatcattttgttatagtgatacagataatcatcttattcacaggtatatatgccaatggtttctcttgtatatgtgattgtgggtaattttcatttcctctaaaactgttctgttttgcattttgttgaaacagttgtagtttgaagattgaagaaatgagtgagtgagaagtggcttaactctatttttcattttaattttcaaattacttgtacagtttatgtccaccctctgtaaaatgttctaacagaataaattagcagatgcaacatgctaatggtgatgtgttaattagtcagtagtgaagccaagaactttcgtgagtgctactctataactggttcatagagttttaggggctgtttaatttcataacttaaaaattgttaaaaaattgttttcagctttaaacaacagtaaacaatttttaaaaactaataaaggttgtttggtaaaaaaatttaaaaacagttttt

SEQ ID NO: 297481 - DNA, 4531 bp, Cannabis indica
attgtgcatttaatttttaataaataaaattattaataataatatgaaataagataacatattcataattttactatatattaagtaactatttattataatattaaaaaaaaattaaattagtcagcggctatattacttagttatgtatatgattaaaataaaatttaagaacataactaaatatataatattaatctagtcctccagtaaaaatctaactagtcataacaaaatgaggatcacttagcataaatcaaaattaaacaatctgactcaaatacaattgaaagtgatataatatcagttaaaattatatatgactatcttaataataatatatgtgacaaattcaattaagacgcattataatatttaaaaacaatcaaatttagggccattgtataactattagaattacaaaatataataattacatatgttttgtttgcttgaaatatattaattacacttgattttaaaatataaaatatatttcttatgaaaaaataaaataaaaaatagaatatcaaatatcaattatatataatttttcatcttcatgataaacgagttagtaattatatatattaacaagtaatattatcttataattataattacctaatagtaatattttgtaaattgtgtgtctaacattaacctatttcttcctaatgtattactctcattatatttttcaataaaatgcggttcattgttaaacaaaaaaaaactcaatcaagtcatacttgttttgctttcgattaaatatttatttatttattttggtgtgttgttgttccttatatttggagtattaatggatttggaccattggctaatcatccccatgagtcgtcaattttctctgactagactagttatatttatattaataatttttttttcatgattattcctcaactctagtttaaaaataggatgacacgtggcagtcagattatggtacacgtgtgttatggcaggtgaacaaaacacgcatatctatctatggtagcttagcatggccaacccattcgttttcacgtgccaatagttgacacgtaagcattgtacatacaatacaacaaggagcgtaaatggttgaaaatattatgtggcgccgcttacttaattaataattaatatttacaatttttcttttttgtttcttgaaataataaaaaaacctaatattgtcgttttgcttcaaaacgcaatcacgacctcacgtgtataatattatttatcgccgtctcttcaccgaccataaccaaaatataaacggcgtgcgtaaacaataggggccaacctaataaattacgctatttattgtatgagaattgttaaataatggtgtagcgctataatattattagcatctactaagagtatttctaatgcaaataacttttaaagatgataaaaatttagacattatttaaaagtataatattttaatttatttttttatatattatttttagtactcttatttttaaaaatacttcaacgtatagtattttttaaaaatattataattttgatctcatatattattatttaatatatatcttaatttttagttacaataattttttaactttaattttttttattaaaaaaaaatgaatagcattaatactacaatattgcatctatgtaaatttctaaaatgatattttttttctctaatggtataatattttaatattttgccacatagtatgtccacttcatcaagcatcttctaaaattttagatgctctaatattgcttttattttatttattgcattcgctagacccttcaacatatttaatggatgtatatatggaaattattattatttatccgtgtatatagtaaattaaggaacttgtattttttaattttttaatcagtgaattaatggataatataatactctatacgcaacacacaggcacaatagactaaaaatatcattatttatttactattttggcatccaaagaaatattaatatggaaatctttcctatgcaaatttcctcaatacccaaaatattcaaacctgatgaaaatagtatcaagataaatgttgatgcgactatctttgaagaacgaaactatttcggtttgggatgtgtaattagaaatcctaatggctttcttttgactgctcttacgaaactgtttcgtggtgctattcatcctatggtggctgaagcgttaagcttccgagaggctcttagttggctcaaaatgcatcaaagacaaatggccattattgaaaccgattgcttattggtggtgcaagctttgagaagtaacattcatacaagttctttgtttgaggaaattattaatgaatgtaagaatttacttgctcaagttagaaatgtttcatttatttttgttaaacggtcagcaaatgtagttgttcatgaatttgctagagcatctatattacatcctgatcgtattttcagtatggggaatgtcccaactgatttgcttccatgtgtggttgctgaatttgaaggttaaataaagttgaatttccttccaaaaaaaaacgaaagtatgaataataccacctcaagtgttttgtacctcaagggtgtgttcacaattcacagtttgcatcctaggtgtttgcacaacttagtgtccgcctctctaatggttcgcaccactattgtgtccgcaccgtccctaatgatcccaccccttggtgttcacctcccaagttcacacccttcatttttgctacacacctctcaaagtaggatgcttcacaacaattggtgttcacaccccttgatgctcccgcaacttagtgtccaccagctccctaatgtttgcaccgcttggtttggcgcgctcccctaatattgaacgcatcttgttaatgagaaaattttcctctcccttgcgagaaggacttcgctaaaggagatctcgtaatattaaaagtgggacctcacaatattaaggcaaacctgcataagaaaatgtgcgaacacactaatcaacgggaatgaaacgatcaagcattcaagagccattagagcagatgttacatttgtattataattgttctaattattacacttgataggcctattattatttgtaacggtcatctgtaaccatcacctactataccctacaagtaggtgaacccacctccattcaaaggagactggactagactgatctgaataataaaatacagagcaagaaatctctttcaaaagtggactagacagatcgagctcaatcgagctcttgctaaaccactaaaattttttgtgtctttctattatgtatttacattcttccatataattttactatttcatttgactactcactattctaagtgagcacttgtacattttagtattttttaaattcctctgacaatatttgacgctagaataaggggattccaacattgttcctgtaatttttggaggagaatcatggtggtaaaccaaacatatacacaaaattagcctttgttcaagaggcaaaccaaaaaaaaatatgcgagcaatttattagcccccgatgtatttagagatcatctaaatcaaatacaaatctctgttcgagatcatccacaaagtcatgtgaagaattcaatagcccccacctgggaataataattcgttaatgaacagagaaaggtaaaaataaatctatacaattattttcaaaaaagaaaagaaagaaaagattttaccaattgctcaagctttgaagctgtctaaactttgaggacgctcgatcatagaaccacttgggccttagagcatctcgaattttagaatttcgcccttaaaactgctcaaatcttgaggacgctcaaattttggagcgcttgagtatcgaagtatctcacattcaacttcctttgaagaaacatcgtattagtgacaatcatggagacgaaaaagacggtgtgcgtatcacgagctcaaaaaattacaaaaatactaaaaaagaaacatcaccacatatctgcgatggagaggcactggcacgaaggagtctctagtttgctcagcaatagcagaggatgtcaatcccccatgaagtatgtgtagtgacaattatatacatactgcgaggaaggagattcacatggtacaattttgtataactgtgaatgtgaggagtaaaaatgaaaaagaagacaaactgctgccacccaccttgtcttcgttctcattagggatggcaatatatttacggttacaagtacccatgtgtggtactttgtgtcgaccactatgaagttggtcataatggtgttctgtcgtggggcaattctaactatcagtggaaatctaattttagggagagatgtcgactccgctgaaataatatatgagttttttccatggctccagattaagggtggcaattcgtgttcgcgggtcgtgttcgtgtcgtgtcgagacccatgtataacaggtacacgcttgaccccaaacacgacccgtttaataatcgtgtcaaaaaatgaaacccga

SEQ ID NO: 297482 - DNA, 3867 bp, Cannabis indica
gtgatagttcaaaccgcaaaaatcgcaccgcaccgcatcattttttgcggtgcggtttttgcggttttttagtatcgcggtgcgggtgcggtttggaaaattagaaaaactgcgggttgatttgaaaaaatagtgaaaaaccgcaccacccgcaccgcgaacacacctactaaaaaaagacgcatcttctttctcttctcttgtcattgaaattctcaccagaattcaagatattatatcgtgacaaccgatgggtccttggaatctcaccgtttaaaaaaaggaaaaaaaatgttaatcgagtgtcgcaatcaaactccatgtatttgtattgccacgtgtctctgattactaaccccaatccccggcccaatcgattgtcacgatgggccaccccattttaccacgtgctcggccacccgcatagacccaacccaccgaagtcattatcgttagaggttagcgggcgaagaggcctcatccacagccacagccacagcattctctttcgcactattatttcttacactcactcactgactctctctctctctatacattttgtgcgataaaaacaggagactatgtttgtcctctctgcttcgccatccgcattctcctccgccattttcatttccgcgacttcttctagggtttcgtccgtcactctgtcttcttctaagctctttgcggcttcggtgagattcgctgggaagaggagctttgcttgtccttgttttttggccatggcagagcttgtgaaggacaaggaagcgttgtcgtcgtcttccgccacctccgtgagcagcagcggtgtgtcggctgtggcgtctggctctacttcagagagtaaggagcctagctattctcgcgcgtttctcaatgctcgtacggaagaaggtaggcagtgtttgttttcgtttgtgacaaaatgcgcaagagaatgacaaaatgttcattttgttttactcggatcatgctttatgattgcttgattgactttgttttgtggcttcaatttgttttttattttatttttgtgatttgtgtggggttgggggaattcaatgtgaaagcaagtgtttgtatagattaaaaacaatgaaagcttcaagtaatttgaaaaagacgatggaaataaaggaattctgtttttgtcaatgctgtcctccgtgtcgaatagttcctttttgtagctcaaatgctccgtgtgtatctgggcctgaattatttgaggttcagacagagttcatcctaattagatattttttaatttcatgccagacgcattgcatccagattctaccttttcgtttatattggattgcttcagattgggtgcaggagaatatgattgggtcctggatttagagagagcttattctcacttttcttcgaacaacttagaattataagtcatataaatataattcaatcatataacataattggttgctaaaaaaagacaaagtgtgtaggtgggaagagaagaaaaggaggagtataagcaaacgatttgggatttatcagatataacaatagatgctttttgttttcgtgaagctgtgtgattccatttttatgttctcaattgtacaagaggttttctatttgctttcttcttcactgatattgatgtaattttaagattttatttactttcgaatatctaaattaggatatgtgattaaatagagttaagtgtttttgggttttcgtttgtagattgatatttatgaggtttcacagtattgaaataatttttagaatattcatttgttcatatcaactaggaaccttggtaatccactctacaaatcacattccactatgctcaaatgacggaattaataatctgcctaagacataagttacagttgcctagttattcactagtcataattaatatagtgaactcttcttattttctccaatgatctgttcagtccattttattgattcacacaaatatagagctactgagaccaagttgatgtgaatctcaagaccatgtgtacttcaaattattttatttgcatatgtcttcctggttatgcatattggtgcaattgaataatttcctgttaatctggaaactttctctggtgacttagacatcaatgtttgacacgtaacatgaaggatgacgtcacggagttgagtagatccgagtcatagaagtcgacctgtgaggggaccctatccctgcgcgcaggttgactccgggatcttcgggatggaagttctgacttcaatacttgaatccaacccactttctttcagtattatgtaccatgaagacatggagcaacctaatccaaggttcgggggctgaacttacacgaacctgcaacccgaaagccaacctgcgcacctagggtttccacgcaacactcaagttgacatccttaactagggtttcaatttctgagactgtcttagtgcaaagtagccaaaacttgcattgagacatcaactagacataccacggacatatgtgaagcattagaatcagattcaaagcaagttgatttttgagcactcagggccccgagcactcagcgcccaggttgatatctgtcaatttgggcaccttccaagtgtccgatcgaagattcgacttttgcattgaatctgcctaaatcaaaaatgagaaaataggtccttctggaggaaaaacaacaattcttgagcataaataacagggcccagcgcccaggttgatacctggggttggccttgtgcccaggttgacaatttgccaatctgagtctcaaaaaatggagttttttaggagttctttcacgtattatcctcgtttttagaaaatattgagattcaactattttcgaggaccaaacggaatttctgaaagggcaaaactgggttctagtgcccaggatgacattttgtcaacctgtgtcggaaatccaatttagttcaacaaaaactgctctgggcgtttttaccaactcggggagaaaactacaaactcgagtctctatttctatagcccagcgcccaggttgacaatcaatctgagacgttgccttcaattgctcaaatgccaaattcgatgtgactattgagtctgacatggtcaaaaacaggggaggagaccttgtcctcaagttcataaaccttggaagtatctaaaacaaaaatcccgaaggctcagtttaaagggcccagtggtttgctgggttctgcttatccaaatctgatgttgtttcggctgtccgtctagtttttcacaagtacaatgatccatgaagtcagaacaatcaaattcacaatttcaattttttttggcaaattgacactttgaaattagaagttttgagtcttccgttttctgcaaaataacaacatgtccgagaattggtgaccagcttcgccaaaacctataaatcgagtaagtgttgtcaaactatcacttaggcatctcaaaggacaccccttggacgtttctacaatcctgggatgttaacctcagcgctgggatgttaacttgggcaatgggacctgaattgcattgagtaaaacagccacaactccttaatttttatctgattgacgcaattcaacttgtgttttgaagctatttaaacactttatcaagtcatgtctcacaccccagacgtaattctgaagctattgtcgtcaaaatttacccccaaaggagttatgaaaataagttccaggtaactcacagcgggattcgccggacaccaaaatcggccattaccatagaagctaattttcatctttagattatcatcaacagtggaaaacaacttattagtatttttctcttatttttgtgggtttccttcacctataaaaggagagctcccttagctcatt

SEQ ID NO: 297483 - DNA, 1697 bp, Cannabis indica
gatcaaaattcgatggtttgatatttgatattttaaaattaatatttatagttaaaattgtttagtaataattcataggtaatacccattaagaagtgtttcatatatatatatataaaacatgcaacgaaaaaaaaaaagtatagaattatctgtaaaataattgtcatcaccttatttaatttgtaatcattattaatatctttctcaataaatttactccatgcataaaataaatcaaacaataatcggtaagtactaacttttatacataagtgaatcattctattataaattaattaagtgaatcattagttatcctatgtaattatatagttctttttaattttaattaattaataatctctaattaaataaaattaattaattaataatctgtaattaaagaaagtataataaaaaagttaattatttaatgatctatgttatccacacttctggatgcatcacacgtgtacttcaagggccaaaattaatgcacgagcccattcgtcaggctagatagagcaatgggttagcccataagcggagccgggtcgtggccctagattcaactatgatcctgtctcaacaaagtcgaacctccttggtttgggaaggatgattctcgtatagagagaaagactcggagagacacagtcggataccttcggggttaataatggaaagtagtcgaggaggtgtcggggtgcaatcctacgtggcacccttctgacatcagatcccacagagtttttcccctgtgtcggacctaggaaaggagtacaacaccaaaaatcaacatactttttgtccaacgtccactcctcttacatttactgtacacaatcggcgatgcatggacatttatcaccgtcaagttgaacaatcacgtacaaacaaagggaattcctccaatttaggtctcacctacccgacccaaaggcaatattataatgtatttcaccccattagtgggctatttcatgtacaaaaccctagcaggtctaggtttactcgagaatccagtttcagcctataaatatggatttatcccttcatgcaaagggttacaaattttagctagacactctgtagaaatatggcaagaataatcttgtgtaaaatactccatatccaaagagctattgtggactaaggcttatcaataccccaaccacgtagaaattatcttcttctttatttcttaaacattttttcttagcttaatttattacttattcaattttagaaaatttcggtaaacattttggcactttcattgagagttgagaaaagtattctccattgtcgtcatctacaataatagttgcaactagatacatggtggtcaagctaaacgcttgcaaagacagcgaaaagacgatctaaattgccctcctctggtggacacttaggcaaacatcacgaaagacggtgaaacatcagaggtagctaatcatccaccatggaaaatcaaacaccaagaaaattatgtttatgagacttccttcgacaaggataaccaaaaaggccaaaacaagaacccaaaggatgactacaataaaaaccatgaaaaagactatgaggaggacccaaagatggtgagactaaggcaagtagttcttgatcaacaaaggcaaatggcaaagcaacaagaagttattagaatatttctaattaaggaaataaaataa

SEQ ID NO: 297484 - DNA, 4062 bp, Cannabis indica
cttcttgtacacaatatatgtatacacacatggtatatatctataactcacattactttcgataattgatatgactgttagtactttcttctaggggaagaacaaagtaacacatctgttgttactagaaattaagcaaacaagccatcaaaatttaagatgtaaccaacccaagtagtttcgctaacaagcaatataacaactgtttacaccaacaaatctagcaattaaagccaactcagttggcaatattatataccttaccaaagataggtccatcctttgagcaaactgaggacaagagcaacaagtgaagatcaactcggacttattaacatattaaaacctcactgggtacatttcaaaacataaacaccattatggttacaaagaagtgatggttcaaactctagagctgagaaaatacagttcacataaaaattgttcaaagaggtagaatcaaattagaattggaacacttgcgaagttaaacaaattgcatctaaaacaacttaaaaaaacaagacgctgaagaaattgattaataaacttgaaacaactaaaacaaatcttatataaaacttgtttaaaacacaacattgaaattttcaaaaagcatttttttgttcaagctcaataacttaaagagtacacaaattgatcattataattaagtactgaaatggttcagcttttaaacaagagaaaactacaaatatttttaaaggggggtgggagaggaaaatgcaatcatgaaaatagaattttcattttaagatttttaagattctgctctttgcaataaccatcagctccttaacttcagaagattcagcataccagtacaaaaagactgatgcacctatgtggatctgcacattgaataaaaaaccataaagaaacaatttaaaaaaaccaaatcatttcaaaaccgtaactcttttaaaacatttcggtacatgcaagcctaaaatgcaaaaatgatgagtggcgataagtatagtttacaaagaaattaatgctaaaaatgtgaggtattatccaaacttttaaatagcgcatgtgtttgtgatttgtcatgtttcaaactttcaattgatggaaatattaatacattcaccaatcaaaagccaacaagtcacttaacacatcaggtgctaattaaaaagtgggataacaatgacatctctaaaaacaatttgagtcatattcttaaaatagtttttaaaataagatcgtgtgtttcttcataaaggagaagcccaacagttactcttgctattgtgtgtgtattttgctactggtttaagaaattggcagcaggttctcatcagatccccaagaaaaatatgttgccttctaaaatggtccatcaattttttcttgcacaaattagatacactacataacaagccaatcttgcaggtagaggtcaatatcaaatatccttgttaatattcaacaatctaaatgatcaatgaatatgtgtacgaccaaaaaataaatttggaaaacaatattctaaataaccaaaatgaacactgattatacacctaatagatcaacagaactcttcataaagcttccacgagactttataatccattgaaacgcaggtgtggatgattactaacttgatgcagccgtttattccaccaattactatcctaaagtcacaccttctgtatgcaaaatctttgagcacaaggaccctctctccttcaaatgaatatttgcgccagatacacttcaatactctcattaaatcctcccttttttcccatagggtattgagcattgaattcttctcaaaaacaagcaaaagaattgcagaattctactttacaaatagctaagtacaatgttttacagcaaatatatcacagtatgcaagtgtatttatacacatagatatattgcaaggggatataatatacttgagcatccttctagtcaaataaattaatatataaataaggggatataatatactagagcatccttctagtcaaatatattaatatataaatatatgatagattaaattatgtgaatcaaaaagaaatgctcttaactatctaacttgtggtacgttctacaacatcagtttattattagctacgatatctcaaaactttggtctcactatcacagcttcagaaagaaattaggaaggtttttaagggaacaaatatacggcaaagtttaaaagggaaatgcttacacacttccagtgaacaatatttagatttggctttcaattattcttagcatgtcaatcatataattacgtaaattgtgctttgatgattcaattcttgtttacttggtagaaaaagtttaaattaccgatcaaaatcacctagtaaagtacatatacaatacctgtggctcacctagttccccatatatgctgaagcacccccatattgaccggcgccgtgctgtcctctcccaggtcccccctgccctatctgctggttcaggtatccacctggcactcccccttggttcccatatgctcccatcataccgggactcatattagcttgattcacataagcaccctgcattccatgacctgctcctgctattcctggggtcacagcagtaccagcccccatcgtcccaaacaagttagtcaaccccaaaccagcaccctgagttgccagcaacgcagtcagagcttgcccaagtgcagggttcaatgcctgaaccgccgcagctccctggttgaatccagtcccagctccacctggtgccatcaagtgccccgtcccagctgcagtcccgccaacaaacccagcattttcatttctctggaactgagcaccatgttgctttgggttttggctatggttatggtggtggtgattgtgttgttgggacttgcccgacttaggaccatcaattgctctctggcaatgcaaaatgttgccttcaaaattcttatgtggctcttcaagagccttcttcgcactctccacagacttatacacaaacaagcaaaaccctttaggcttcccagtatgcttatccatccccaatggcccgtcctcaatttctccatacttggaaaagaatgtaagcagtttctgtggatccagctccgccccaacattgctcacgtatatctttctctgcgtgtactcagaagtcggagtctgcagctgcgctgactgggctgctgccgaagccccagcaccaggagttggagctgggccaagtgaagcgagttggcaagccgtcacccgattaccaatcttcttctgaggcacctttagtgccctacgcgccccgcccctattcttaaatacgataaagccataccctttggacttgcctgagactttatcgcagacagccttgcattcctcgatctcaccatattctatgaaggcgttcttcaacgtctctgcgttggtgtcccaaccaagaccgtggacgaagattttacggtgaaccgggtcctcatcagcaaccttccgaatccgatccgccacgtccgggtgcttatccgctgcttcgcataagagattcataagatgttctttgctgaatggttcaagaagcttctgaatctcttcctcatcatcgatgtcaccagccctacctgaggcggatgtctcaaccttccgctttacacgattggcggcggcgcttgacttaagagcaccttcctggtcgtcatcttcttcctcatcgtcttcctcctcatcttcttcctcttcttcttcatcgtcgtcgtcctcctcctcctcttcttcaacttcttcgtactcttgttcaatttcttcgtactcttcttcctcgggatacttaggatcctcaaaaacctgtagttgttggtgcttcttgggaggtttgttaggatctttggatctagactccaattttcgcttcctagccatgagttcggagccggagcggaggttcaggagtggcggatagttagggtttcttagaagagagctgacgatggctacgcccaaaacccgaccaaagtcagaatccaagcctttttttaatttttttcctgttattttattttctttataaaat

SEQ ID NO: 297485 - DNA, 6536 bp, Cannabis indica
cttgctcgagcagcccttggaacggacaaagagaaaatttggaaccatttatgttcctctccttgaagatcatagtctcagtttcttgtttttctttagtctttgatcttctttttcaaaaaaaaaaaaaaaactaacttgcgcattgttttaactaaatttcctccgtgttaaatcttcttagtttataaatgttatttttcaaataataattatcactttgtccaaaaaaaaaatgaaacaatttatgatttatttgtaatctaaaagttattataggagaattaatttatgtaccatttttttaactttttttttttaatttctatgtgtgttcctatgtgaattatgattacgatttaaattgctctattaattattatgttggttgctatatgaatttttcgtataaataataataataaaaaaactgatttaaacaataaaaattaaaaaacctcattattatttattatatatgtagagaccaataaactaaaaaaatacatatttttgtttttattttatgcaataactaatcaactaatcaaaacattttcaaccatttttgcattgaaaataataataaaaattataaaatttcaaagtaacatttttaaaacaaaaactaatcaactctaattaacggaatgatttccaaatactattaaaaaaataataaaaaaaaaatttgataatattaaagagaatgagaaaataaaagggaatcatttgtgatttatccgaaatatcggggtaatgttgtaaatatttataaatcaaaggaccaaaacgcaattaattatagtttgatcatcttctttggagaagtaaaagacgcaattgacacagaagaaaacactgccaccactctctctcccctctctctctctcttgggttcttctcttcttcactgctctgatctttggtacgtatttatattttccgtatatatagttatcgatacaatcgttgttgttctagttcaattttgtgatttttgtatggaaatgtgttaatttgactggtaataacaatttgtcatattaagcttcgatttgtttaaatttcgaatctttttgggggtttgaatgatttttgttacttattgtatagaaattaaaattcagatgaaaaaaattaaaattaaaatttaaaattgatgtgtttgggttcttatggtgataatggaagatcataattttggataaataacttctaatttagctgctttaatcctttcaaagtattgattttgatgcaaattttatcggggtttgattagtttttgtttgttgtttagaaactgaaattgaggaaaaatgatgggttttgggccttatggtggtaatggaggttcatatttatcaccatcatcctcaagtttatcagcttctgcaccacctttcactattgatcgttctggtcccaaaccttcttcatgccctcttatggatttggctgaatcatcttatcctggtgctggtgctgtgaattcttctatgcacaattggctcccttctcttgctccaacttcagaaccccatttctttcccagtactcaattggagcacaattctgggccatcttcaaatgcatatggttatggaggctcaccgcctgttgaatcttcgaatttgagtacccatttgcctcatttgagcaccactgtctctgcttcagtggatggattttcatatggtcaaccttcagacagtgcgggggcgactggttttgttgaagccaagccgtattatccctcatttttttcatcttcaggccacaaagatagtggtttgaggaatcctgatcaaactagttatgactggttatctacttcttctcgggttcctagtgccttggtcgggtcttctaacagcgatcaacctgtgaagtttttggattcatcgtatgcaggccaatggggtgacatgtggaatggatttgcggaatggaagcagggcaaacagggacaacttaatggaagtttaggaggctccaaggaaactggcgtgcctgttccatcgatgtatgagaattacatgaaccaaggtgaaggtatacacttaaatgtataaccatattcatgctaagtttacattataactcaatctataatgtgtttttggaagttttctctattgcctttctttatactattcttgaaactttcacatggatgccggtttcagaatatcgaatgctttagtctgcagatacatggtttaatgttgtgcagtcatttcattttcacattagcaaaatttgttggaaactaaggcagaaacataaagtagtggatgattttctcgtacttcatagactccttagaactatgtttgaaatcacactcgcaaatcagcacaatgtacttccttattttgaaatcttgaacatagtgaataaagtagccttaggttgttgtacttctgtcgttcatattgttgcttgtgctagattaacatactagctagagaattctgtgatgcagattaacaccattcgttttcttatttctaatattttatgttgcagaatctcataacccgaaggtcttgaatagaagtgaagaagtgtcccgtggcgccaacttccaagctccagagacgcatagtggatatatgaatttggatatgatgttaaatctatcctccacagggaaaacttcagatttcatgcctatggaccattcaaaacctatcttgggatccttttcaggacttcaagagactcatccagagtcgacatccttcatatttggcacaaattctgggaaccatcaaattccttatggaggttcgaatgagaagcgcttgaaacagaatattaacagtagtgcatctactgtgaagtcatcccctgtccttgtcatggggcttccgacaaataacattccttttaaaacaatgaatttaggaagcaatacaactcatgcagttgtgtccagcaaaaaggcatgtgacataaatgatcctcattcacaactaagtttcggaggcaatctttgttttgattcaagccgatttgacgatcctatcacttcacgatcattttttagtaaaaaggatgagacactaaacaaagagtgtatcactaacgatccatcatgtcaaatgctgaaagtgaaatctggagttcaaacttcaaatgtaagtcatgatggcttcaatttagaccttaatgccaatgaaagcatcaatagtgttgcagattcatctgagagtgttgagcatttttatcctcctgtggactcaccgtgctggaaaggagttgctcgttcttctcctttcgttgcatctgaggatgttacagaaatgagaaaaccggagaaacagacattccctctcaatacttgtgagaaagtgtcccccgagaaagcaatagaaaacataaagtatcatcaatttgggtgcttggaaaattcttcagagattcctttgaatctatcttcagctataaattcagaaactagagaaagacaatcagatgatgttgcaaacaccaattatgttcagaaactaaaggcattaagcactctgatgacaacaacgaacatggaagcaagtccatgggattccctgactcgaaaacttttcaggcctcaaaacaagattttcagggagatggattgacatctgaaaataacaatgaaacagtgcaattcgattcatcatctttacgttttcctgttgaacatgttagttctccttttgacaaggatgcttcttctaagcttaccaaatcaaatgaaggacagtcaactccaacagttgatgttctaatgctggttaatacgataagcaacttatcagaattgctggtgtcccattgtacaagtggcctttacaatttgaaacaaaaagatctcgagtctgtccaaagtgcgattaataatcttaatgtgtgtgtgtcaaacaattccgagaagatgattccaacaacttcttccgaaaaggacacttctgactatcccagagaacaaaatgatattcataaggtaagatacttaacaatttaatttataaggttttagtttcggtcaatacttcgaacttctactatgtttgttggctgaataactttttcttccagggtgttactgaggacagcccaaaattgaccaaaaccataatgctcaaaaatctgtttgactgtcagaatttcaacaaggggaaaagtaatttcttgtctggtcagaaagatgatgaaatgttcgattctgcttctgtgaaggatgatttagacatggaggatgaagataaagctacccaggtactgcgcttttagttttttcttgtatagagcaaccgaagaactatttgttgtttctgtttcgatatgatgtaaatgaattctaattataattcttgcttataaggttgcgagtaggggagcaggttttatgaatctttactttttagtcttctataatatttttgtaggctttaaagaaagttcttgctgagaattttcccgtcgaagacgacaaaactgagcctcaaacagttttgtataagaatctttggctcgaggctgaggctgctctttgttcccttaattacaaagctcgttataataggatgaagatggaaatggagaaacttaagttgcctaattctataggtaaaagtttttatgaatcttccattgctaaatcaattgtaacaaaagtatgactattatttattagatgcaggtgaaaataccaccgctgctacagatgtgaagaaaccgtcaagttctgaggcatgtcctgatcaaaatgcagttgaatcacctaaggccgagggtagtccagccgcaagaagccacagttctcctgtcttaagctccgatatccaagctgatgatgtgttggctcgatttcatttactgaagtgccgtcatgagaactcgaattctgatactgttgctaatgtggataaaccatcaagttcccagttgtcttctgagtcgaccaatgctgtcaaaatacttgctgacgcacatgaagaaaatgttggaagccgaaaccccgagaatttatctttactggcttctaccatgcgtgacacacttaacccaactaacaaatttgaggcttctgttctggccaggtttcatatcctcaaatcccgagttaacaatcataaagaagcatcacagtcaccagatattgttaatctcggattttctagtgagaatcgagagtggccttatattggccaagaggctagaaattcagatgtccagcccaaggcttctttgcagcatcatgctgctgacagcaccgaaggccaattaatcgggagcgatttcgacatgcttgtgaacgatgattcttccactcaatctgatcacactaacagcaacagggttcagaatgagaatttgctttttgcaggttggctcgatagggtgtcatcggattgggaacatgtaaggaaggaggaattcggactgcaagtgggccccgtccctgccaccactgctggtgattattatgaatgatgctgatgttgctgtcatggtgggactgtcttggaaagtttatgctgctataatttttgtgcatagtatttagaactctacttagatttccacaacttggggtgttttaatcttaaaataattgatttgttgagacctggaacttacactctctctctctttcagtatctttgttaagacctggaaccatatgaatgatattatctatgtttatattatcaaaagtttcaatctgtggattgtatatatatattatctgatttttatcatagacaacatagtatttgcacgtagggcaatgctctttagggatggaacacaattttcatattctttataatattaaaccctactgattcgatgcaaaacgaagaaccttattaagcttgagcgatagttttagtagtctccgagcctcgagctctttcgagacttcacttgggtctaaccctttggcccgattgactacatgttcaaggaccctttggatttacttggcttctccaaccaatgcttatacacttcattgtttgtatagtttattcattagggtttggatatgtatccttcatgcatatacaatatataaatatgtgaatcactttagaggaatagacatgaaaagaatgacccacatttacaaagaagaaataagataaaaagaatggtgactattttaaggcataagattagtgtgtttcacaagtaaaattgtcatatcatatattaaatcaaagcgtaataaagaaacaaaagtgggagattttcttagattacatcacacacaaactctttacaaattaacttgacttatacaagtgttgatttcaaatattttttctcaaaaatacaaagatttcgattgttttgtatatcatatattgcccttgcagcaaataacacacctgttatgagattcttcttcttctttttattttagggcattttacaaaaatactggatttggggtaatacttttcaattttactgccacacggcagaattaacatttatactgtcctccctttttttttcttttatactg

SEQ ID NO: 297486 - DNA, 6819 bp, Cannabis indica
ttaaaaaaaagaggtaaaaatgatagactttaaaaaagagggtgaaaataaaataggacaatataaaaagggtatacagtgtaattttctccttgtatatctctagtgccctggctctagtgctaattgggctagttctcgatctggaaccacgaatcgacttttataacaagtgtagcccattattttaattgggtccgcatttaataacataaaacaatatgaaaataacatcgtgaaaacaacatagaacaaccacctatacttatgtaaaaaaatgtttaaatagtgaaaaaagttaaataactgtaaatttatctttatgtaatttttttttagaataaatagtatttttgacccccaaactttttattctactaaatgtttcccccctaatatatactgcttgttacaaatagtccttaaattataacgaatgcagaaatgtagtcattctgttcacttctgtttaattttgccgttggcagtattattttaaataaaaaatgatgtggcaagacatgtggacattaattttgggtgatgtggatattttaatgtaacttaaatatttttttttctacattaatgaattaaaacaacaaattaaataaaattattataaaaagataactataaacactcaaaccctggctgccctttcctatttcctctctctttttcacgcacggttgtgttcttcacacatgctatttttttttttgcagaaaaaaaaattgggtagataaaatctaggcttttctggccaagcttttctttcccatgactgtttcttcttcaccaccaccggcccccccccctcacgcctgcaaccaccgtcacctccgccagcaaccaccgtctgaaccgcctgaaaaacttcgaaccccaccagccatgttcgacccccaccagccacgtttgacccccaccagtcacctttgacttcgaccccaccagccaccttcgacccccaacttcgaacaacccttgcccattcttctcaagtcacggtgtaaaaatggccctttctctaatttttttatttttaaaaaataagagttgaacaacccgtttaattttccaactcaaaccaatgtttcttttattttagtttcctaaataatttttatttattaatatttttggaatagtttgttattgataattaaattgtaatgccatgtcattacatagtttctttacatgaaaatgtcacatcatcagttttaacaaaaatgaaatggagagtaacagaaggatgacatttaattagttgaaatagtttgaggagtatttttaacaagcagaatattataaggagcaaaatttagtagggtaaaaagttcggaggggcaaaaatgctatttattatttttttattttttcatatttatgataataaatccccatttttaaggttagataaggcctaaatgaaatgggccttggttttgggcttttgttgggccttggttttaggcagctcagctaagctaataataatctaagctaagctactaattgttgtattaggcgtaccgaccgccacgccacgctccaccgccatggctgccactacttacttttctttcttcatataattgccaaacacagagttggttgtgaaatatttgacttttcttcttcattcattgagtttcaactaatcccatcttccttgattctcaagagtccacttcctttttgcccttttcttcttcttctcttctcacacgtttttctcttctaacaaatcattatacccaataataatacaacaactacgaccattagggtttttgttttggggggttgttcatttctcaagtaattttatcgccatggacgtcaaatcaagctctgcccttctttccaataccaatttctctggtttcactctccgcaattcggatcatgcattttctacgtaagcctgaatctttttattattattattatgaatgatccgtgaatttcatttagttttatgagacaattccatctggggttcttcagaattgtgtgaaattcaacgttgttgagctaaatcttttgtttttttttattattattaaaaaagaaagaaataatttttatatatttaaatgaaattcaaactcatagagatttgctctgatttcaggtcttgttcttatccaagatctcctatggcagtttcatgccaattatcgaagaattcacatcatgaaaatgtgacatctctaccactatctaacacgcttactaatcattgtttaacctttgacaagagaaacccattggggaaaacattttgttctgctggtgtttgtacttatgatggggttgctgtagagtctcattctggaattgttgaggaaaaagttggggttctacttctcaatctaggaggacctgacaaacttgatgatgttcaaccatttttgtacaacttatttgctgaccctgtgagtttgtagtggcattgcctcactgcattttactatttctctattgtatttggttagccataataatgttttctgaatggggtaatgcaggacatcattcgccttccaaggttgtttcggtttcttcaaagaccgctagcccaattgatctctgttcttagagctcccaaaagcaaagaaggctatgctgctatcggaggtggttcgcctttgcgcaaaatcactgatgagcaggtagatatgtctgtttgagtgattgttcatagtaaactcagcattgcttgatagtttataatgtttttgagtgttttcatttggagttgggttggacttttcattttggtttttttacatgctttattcatatgctgcaggcaaatgcacttaaaatggctttggaagcaatgaaagtatctgcaaatgtctacgtcggtatgcgctactggtatccattcaccgaggaggcaattcagcaagttagtccttcactttaacatgcattttcaatatcaacttcctagtagttcttgtcctattcatgtgagcattgtttatgatatgaacttccaagaactgcttaagattagaaaggataaattttgttttttagctctgtgcttccttggattatcaaattattttatttgttatcacattgtttgaagtgattaattatgcttaatattaggaacttatgtcagtatctatgactctataacagatcaagagggacaggatcacaaggcttgttgtgctacctctttatccacagtactctatttctacaactggatcaagcattcgagtgcttcagagtttgttcaggtgctaatttcgtgtcaacttatcatcttctgaagcatgtgatttccattcatcgttattacttgtttgttcatatagctctaaactagatttgactgtcaggaaagatgcccatctgtcaaagctgccggttgcagttataaaatcatggtaccaacgagaaggctatgttaagtcaatggctgacttgattgcaaaagaattagagaccttttctgagccttcggaggtagattaactctttcattgcagatttaaaaagtttcctaatgcagtggacatatatactttggataccaggctgcagcatattctgattttgtttttttggtggtaaaaacattaggtaatgatattcttcagtgcccatggtgtccctgtcagttatgtcgagaattcaggggatccatacaaagatcagatggaggagtgtatatttttaattatgcaagagctgaaagctagaggaattgagaataagcatactcttgcttatcaggtacttaactaaattttcgatcttgaaaatttaactgatgttctcaaatggtgaacaattcttggttttccttctggtatgttactcagaaccgtattgatttatttattttttgattggttggctttataaatcagagccgagttggtcctgttcaatggctgaagccttataccgatgaagttctcgtcgagcttggccagagcggtgtcaaaagtctcctagctgttccagtcaggtacatgtttaaaactggcacttatgtttctgattatcatgatatgatgctaacaaagtcttgcaataaatattagcatcaattatatcatttttgtcgatcggggttggttaaacaaaattctctagattgcataatctcattgtttggaactcatttgaaattactgagtaaagcattttattcaccatttgtatcttattgtgagttttcttcatctgcagctttgtcagtgagcacatagaaacacttgaagagatagatatggagtacaaggagttggctctcgaatctggaatcaagaattggggacgagttcctgcgctcggttgtacctcttccttcatcacagatttagcagaagcagttgtagaagccctaccatcagcaacagccatgtcagcctcatcagatacatctattgtagaagaagatcatgatccaattcgggacgttgttaaactgctctttggttcagtcctagcatttctcttactcctttcaccaaaaatgatatcggcggtcaagaactacctctagagataaataccatacagagctgctcttacagaataaaatacaagaatttgattttctgagattcaagttttgtttgtacaagtcattgtcagaatatgtaatttgtgttccttgaaatggctttcctaatcaaatttcactatagattttacataccatgagattattatgattatcttgtcagctcatatacactggccattgtttgcttggtaaattagtatatgacagtagatgtggttaatgaatggtctgtatttttcttaatatttggagcaatattttttgacattttgtactttgtttagtgtggaaaaagagtttgttgtctcaagcaacagcctttacagcagcccatttaaaataatgataacaaaatatagagaaatgaacaatgagctaatgaaaataccaaaatggctaattgagaacaatatagatgtatattagaagctgatcaattattttagctgagaaggttattgaggtgaatttaatccactcactcagtttccacacatatgatgttaacaaaactaattcttaaccaaaaagaagacattttcacagagcaaatgtaaaatattaactaactgatgagatgttgggaagagaagcatatgactagctcatcttcaatggaaattatttgtgtggctctgcatttaaacgtagtagccagtgaaagtgaatcctcgtcctatgatctcaccggcacaaaaccaagcaaagcattctaacccgaacagtgttgcaattccagcatcctccaccttcaactcttgtctgttcttccatagatgctttacataatctagctctttcgctaatgcttctcgacgaccaggtaaactgtaacacaaaaacaataggtattgtggttcaaactctgatcagatttctagtaatgctgtgctatatacacatttcgatagactatgaagaaaaatatccaacataatcacatgttatttgttaaataactcatgtcccaccaagcaagatacttgttttgattaatcaattcttcatgtcatgatccatgagtatatgctaaacatcaaaatcattgtaaaaatagacagtgactaacattatgagcagaaacagcttaatacaatttgttttccaagcaagaaacataagggattcttataattgtaataagtagtagtgagataaaagacatacctggctagacgagtataaaacaattgtttagccaaaacagtgcacttttcaacagaggggggttcctgaatgtactgcttgttctgctccaacaactgcttatagtaagaagtaccatgcttagccacaagctgagaggcctgagtagccttggattgtagctgaaccagctttgaagccatcagtcctaataattgcacaacccaattggtgataagtaccccaatttggaaaattacactaaatgagtttctcatctcaaaacccaattgctatattacaaagaaaaaatcactactctagtttgtaattgtggagctgattatataaattatatgatgattgatgaatattaggtcataaaattggattacccaattagaagaaaatgagcaatgaaaatagaaatgcataataaagaaacccagaaagccactaaattgatcatcaagttctcatttttctatctgggtatcactcaaattaagtatatgaacaacaaaatcctcaagttttggggataatctgatcaaaattcagtaaaagaattgaattgaaaatagatctaatacagctaacaattacatatagaagaattagaaattagataaagattgattgaaaatgaattaaggtaatgatgtaatgggaatggagaaagaaaggagataccttggggaagtgatggagaggagagtgaagaagagaggtccggttaagccaaagtgattgcgttttgttgtgaacctattattattattattattattattcatctcaaactccacagtctatgccctacttttttttccttttactcattccacgtggacggtcaagatgattccaatcaaattactacgtattttaaaatgactaattaggatttttgtccttgaattttgatatgtactaaattatgcctcctgaatttttaagatagttaaaattaccccctgaactattgagattgttggatttaaggacttttatctaatttcattcaattttactatttcagttattgtttatgtactaaaccatgttccccagactttaatatctaccaaatc

SEQ ID NO: 297487 - DNA, 3097 bp, Cannabis indica
ttttacgtttcatagctattaaatttgagtattgatttttcgtttcttctatgggctcaggtacgtggttgagtcacctgttttacagcagacgatttttcgatcaaaagtcttgctgttcttcgtcttacgacgttcacggagctgatcagattcggatttacttaccaggaatggtggtttatcatttttagagagttgtatcatcttattttgatggcgatactgtacggcatgtattggtgttttagcaacaatatattgagatgtgcagggggtttggggtgattggggatctgggtttttagaaggatgtataagatatcggcacggaaggttccatgcgagtcctgagttccgattcatctttgtcatccgacctttgccatgacaggtgcgcttgcatggcaggtcaaaaatcttaataaaaaagaaataattttttggtttggggagaagatcgcacggggtatttgcccggggtcttctctctggtgtgtgtgctctgtgtcctgctcttttttttctttcttgtttttgtttactcgcactatgattgcccaactttactacgcatcgagacgaataggatggaagctcgcatccacagaaacgccaagcaaaggtataatttgcccaatttaatcttattcatttacttattttgcgcaagaaaaaacaacgacaaatcaatatgattaggatcccatcgtagtaagtactcatgcatatttgactctatcgaatcaggccaaattttcataaaattgcttagtttattgattggtatttttaacaattgcttgtagttatgccaattgctttatctggagattgctgaaaacagttctttctgaaaggtaaataagatactattaaaataagtagaaaatagaaattcatgatttagctaacattattttgccgatttcatacgatttcaaaacacggctacgttataaaaataatttacatcataggtctcccgcacaggtaaatttttgcaaacctttatgcctataattactgtctttaatctaataatcatatcgagcctgcaactgacctataactatgtatcaaatactttaaattaactgtaaaccatatttttaagtgttcataattatcagtcttgaattcaatacaagtttgtatcaacgtttttgtgttgcgttgaaggttttgtaagttattttgtaatattttggcaacatgtagttgtacatgctggtctcttgtaaatttttagatccatctatggctgcaaagtcgaagttgttcgatatgaagcggtctctaccctatccttgtttcagcgaagtttgttcagagtaatgaagtttatttccagttctccaattgaggtgataaacgaattgatttaagtggacaagattattatcccaaccacctatatatttataatcgttattactaaaagtagtttattggtttatattttcattattaatatcgatggaggtttacagctgcactgttacttccatattcagtatatattccatattcagtatatattaatacagtatagtccagttattcatataattataataaagtcttacatataacagaagttgaagttatacaaatatatatcattcatttttttttttctagtatagctttatattttaatttgttgctttctattttaccgtatgttgttattataatgtttgcagatcttgttagtgctataatttcaatttctactgtattggcttgaatgtatcgaatgcttggctgtatgaagaagtttactgtgcttatgaattttaattaatgaattatatttaatttattattttcttttgttgtttctatttttcatttttttgcttttcaatttattttttaaaattcacgtgtgataatgatgaggttttttagaaattttttgtaagtgtggagatctctaatctaatttccgtggtacttccgttatcacatttagaaaaagttcttttagcttaaatttttgaaaatgaaaaaaattgaaatagtatgtgacggagataacgagacagaaacgtctaaaaaaatgtatttttattgatcatgtttagattaaactttttctaagatactatattaaataaggtctaattttatacgtaaattttttggtttttaaaattgttcttaaacaaaaaagtatatattatacttatcgaagaaaatgtatttctaaaataatcaagtgttctaatttatttcatttttggttgtgtgaaactttttcttccaatcatcacctgctaagaaacattatggtgttttagtttctctaatataatactgttttcacctgcttggccctgctaatgatagatctgttagctcaaacggttagagcactcgaagccttcttattgggtttcgagaggatggtggttcgagtccaccctgatctctattttgtttccgcctaataaatgaaaatatcaaattttcctaataaaattttgtcgtgtagaatccaaatgtgaacagctcatatgagagtgggtgcgtgggcccaagttgaagtttttatgtggcggatatctcatactttaagaaaagcatttgttggttcttcacgtaactcaatttctattggctcaacaatcggcctttcgagttgagtaaaagtcctatcagtggtccctccttccttccaataagatgtacttttgtttttttgctcacctaaattatttcccaaattttggtttctaatctttttttattttattattgtaattttttttattgttattacttaatattaataatattataaatcttagccttccttgtgttgtaagttgttttatcatttttaatcacatgtgctataactaagcttttggtaaagtagaaataaataatttcttttatacaaataaaatactttttttcaatcaaattcttattatcatcttattttgagaatatttccattttgactatctttctcaaaaaaaaaaaaaaaacaaaaacaaaaacaaaaaaaaactactttgagaatccttttcaaaaaaaaaaaaaaaactaactttcagaataacttaaggctctcaattca

SEQ ID NO: 297488 - DNA, 2147 bp, Cannabis indica
gtttaatttagtttcttaattaaataggcccttgctaatcaagacccaagagtgtctttgcctatgaataggacaacacccctattgtaaaagcatccctaatttttgtttttaagctaaagcgttgtgaaaattgcgagaaaactactattgttgtgcttcaacaacaaaccccgcaataatattaaatagtgtgctatgcttagttaacacctaaactatataaaaactttattttctttactttaaaattatcttttatttatttattttattattatttaagttgccaaaaatttcaatcaacgttttttaaaagaaaataccctaaaaacgagagccagagaagttcattaatcaagaagattcaacctcaatcaagggttaaatgcagtcacaaaatctacgccaccaaacaaaattcttagcaacagtaatacatacttagctaaagaatgaacaacatcgttacaagttcatcgagaggaaaaaaaaaaaggaacatcatgaaaatcattacaaacctcatgaatatcatcaataaaagcatattatttttcttttgatttggcaaattatatttacttttcagttcttgtatggaacaggagtcctatgtgtctcaggaccaacctccatgtcttcccaaagaagatctgacaatttcattgttaactctccaactcttcctgttacaatataataaaaactttgttactctaatttattcattaagacaaattacaattatgagaaaatagctaagagactatattagagttagttttacactcttaaagtgttaaaataaaataccatatataaaatgaatgaattactcatttcattatcaattggttttgaagtagaacttcatctaccttaatctcgaattctaaccactttaagtaaaatgttattttgcctaagtagtagatagagtaattggaaaaaaaaaatattttttttagggatattacctaagttaatttttatagtaatgataataccaaaataattaatacttaactattcaaattatacattttttggggctaaaagtactaaaattattatgataatagcacttaagtatccaagttattcatctaatttaacaccacttagatagatcacttaagtatcacaaaaataacttggttacttaagctctataagcatattaatttaagtatttttgttactgaaaaattaatttaaatacttacgtattacaaacgtaaaaatttaaatacttacgttgttaaaagagtaacttaaacacttaaatgttaaaaaaaatgtaataagttaaagtacttttatagtaagtttctgtataatatcattttgcaaagaataattaaaaagaaaatatatacttatagttagtaattactagttactagttactagttactagttaccatttccaatgggttggtcatcccacatgatgataggcaagacaggcaatgtgctccccacatacatcatctcattggctcctttagcttcttcaattgtaatattagcaaatttaacacctttcaaaacccctttctcaaccaattttggagccaattcaataagtcttttaatagtgcaaccacttaagatcttatcaaagaaaggcacaacaagctcattttcacatgtgataaaggcaacattcacatttggtccttcccctatgtaaccttcctcatcaacccaaattgaaccaaatgctcctttctcttcagcttccatctttgaaagtacatttgggagataattcacattttttgatgttgcaaattgtggtggtttcattggtattgttgatgttatcactttaacaccttctttgcattgtgtaaagtcttcatctatgactaccgcgtagaatgctgttgttggacactctgatgatgagagcaagaagttcccggggcccgaacttaaccaatatctcaatgttcctttcttgtgatttgatgcagcggctagttgcaagagaatggttcgaagtgttgtctcgagggaatggtgaggcaacttttgctttcgaagctgatcttaggaagcggtcgagatggttgtcgagttcgtacaagtgtctaaagcaaaagaaaaagagaacatcgtgaataagtgaagagatt

SEQ ID NO: 297489 - DNA, 2203 bp, Cannabis indica
tttgtgagagtaaccttgttggtgatgagtccggaagggacctgtgtaagcagatttgggagaggctactcccggtatcctatttgtcatttggatgtagcttctgaaactttgaagaacatggtagtcccctaaaccgggaggatataaccttgtttgatcgagggaacccatgttgtagaacagttgatggtttccttcatttctaagctttgtttatgtttctaactagctataagtcagaaacacttttgacatgcatttatttttaaaactctcctttgttttgcagagaactcaaaaacacctaaaatgggattgcagaatgaacttacgggcaacattggtaagaacattactaagatcaaggccaatactagagctaagatgctttctagagtagctaaaggcaaaggaaagagcaaggaaaagagggcctctaaatcaaaagcttaaagtgttactccctcagttgccactctaacttctccttgtgctaaagaaggcttcgtgagtcttgagaaaacatctgcgggtgttcagaagacttctgcaaactaggggctcccagtcattggaaaaattatggaagttcagcccctcctacaacttctactcgcatttgacagggttttttttgggagctctgtccctgaaccttcccaaggtggcatggaggctatcatccttctagatgaaagtggggaaggctacctcttccttggaaaagtcgctcggtatctaaagcgtcccgacccccatataattctgagagagaggcaaaaaaaggctaagctagcagatgcaaggtataagtctcccaaaggtgagggagatttgaggcaggtcaagatccctgctagggaggttcaagcaaggccataactatccatgctcctagccaaccgtagcagcagtagcaacaacaacaataatagcaacaattctaacaacaataacaccagtaacagcaataactccaacaatagcagcatcaacaatagccacaaccactacccttctagccatcccttcttttactttcaactggcatttgtgccctaaagcagttgagtctgaggtctttaagaaggtagtagaggtcgacctttacctcaagagacattgtgatctgtgtccgtcgcccgaaagacatcaagaatcttgcatgcctaaaggaaggcacaaataacagatagtgacaaagggatgagccccaatcccatcatggattgactgaccatgtctagattcttggctcttatggttgagggtgatgtggctccctttgctagagacataatagatctgactgccaacaacatatgcgagttgtgagtagaaaaatgggcagttagtagcagcactgatcttgtcatgttagaacacgcctccaaataacaagctacaacaataagtcttgcaaatttgacttattgcattccttttgcagttttctccatattaacttttctttatctcagtataccagatggccctatttgtagagtggactttccaggaggttaactccatggctattgagcttgatcaacttcagggtgacaaaaggacactggcttccaaagtggaggagatcaaaattcaagccaaggacttccaaaagagggccattgaagaggctaattggatgaccgaggctaagtataaccactttgttaacaagggcagtgaatcccataagaaaaaaaaacccaacagttacagactgagttgtctgctgctaagcccaaagtggaatctctgtccaagaaaattgaagaggtcaacgatcacaatgatgcgtagattgaggtcaatggtatgaacattaggctaagggataccaatgcaaatctcaaggaatttgaggctaaatctgagattcagagggaaaaaattcacaagttggagatggatctattggtggagaaggattggcagaggaaacttgctaactatgagaaaattttgctgaaggataagaaaacctgagaatttgaaaggcttagggccttcatagttgccagaactttccactggttccacaccacttaccactaacacattaatgactccataaaggtggcaagggaagttgtagaggttgcagatgttgggttttgtgccctaaataaaacccatttcaatataatcatatttactaataaagatcagaaattacattttatgttgcatggtt

SEQ ID NO: 297490 - DNA, 2025 bp, Cannabis indica
aaaaaataaaaagtattataaaaataaaagtattacgcttaaattaaaattaaaattaataataaattttaaatattatttatatatataaatttttttttatataaataacacttaaattaaatatttttttaataaaaaataatattatttattaaataacatccaaaaagaactaattatatacaactaaaaatatacatagtcaaaataaaactaagaatataataaaatatgggtaaaaaaaaaagttgtcaaaaattaaattaagagtcctatttgtatcattttgaaaaatacaggatccattttgtcatttaacaaaacagatggtccagttggtaacttttgtaaaacacaaggtccaaaatagtatttacccaataaaatatacgtttattgtaaatgaagcatagaatttaaaattttcttttattatttgtgaataaagatctaatagtttaattatttttataattaatatttatagttacttttaatacctattaataagtgttatatttatatataattaaccaataattaaaaaaaattaaataacaataagttttacctaattcttacaccattaaataatgagcattgttattgggcatcagtgctgcctaacacctcttgacatatcgtcttacgattgattaacagtaatctctaaaaattaatatttaattctatgaaacctgacatttaattggacaaataacaatattgacacatacaaaaataatagacaccactcttaaataattatggtagtaaaaacaattatcatatgttaaggtcataattagtacataagtgagatgagtatttaagttctacttttgttaatgcaggaaacctcggctttcgctctatcatccggagtaggagcatggaacgcagttgtgttcgaaatagtgatgactttcgggctagtatacacggtgtacgcgaccgcagtagatcctaaaaagggtgacattggaattattgccccaattgccataggtttcattgtgggagccaacatattggctggtggtgcatttgacggggcctccatgaacccagccgtctcgtttgggcctgctgtcgttagttggacttgggccaaccactgggtctactggctcggcccatttgtgggcgctggcattgctgcccttgtttacgagatcgttttcatctgcccagccacacacgaacaactcccaaccacggagtactaagctgttgtagaaaatttggttgttggattttcttgatattgtttgtatttggattttgttaaatggttattccctagagaatcttcctggtcttttctttaatttttttaagtctcattttcaattgaaaaattagttgatctatgttctattcctttttgttcaacttcattttcaaatgttcacgaagtatccctactacactaaaatacgtcgatagaaaatttaattgaacaaaaggctagtggtgcatactgtctagtgagataaatggccttacgtaaatagttggtggccatattggtgtttttggacactttttcggcgctacaactgctccactaaagttaacttcggttcaaaactactataattacgacaaattttataaattaaaataactaataataactataataataagtgattgccgacttttagtgatattatttagagtaatttgttgtaaaatcccctcaattatgtttacttgcaaaaaattatacaatctcatattttagtgggaaagtcatccaaagtactatttcatttacattttaaaggttccatctgtccagcctcgttaagtcctaatttttcccacgtggcaatgacaggtcactaaaaaattatcatacgtggtcatattttacaaaataaaaattaaaataaaaataaaagctttaagagtaatttgcggcaaaacccccccaactatcaatttacttgcaaaacaccatctaaaacctttaaggtttggatggttttttgcaagtaaattgatagttggggg

SEQ ID NO: 297491 - DNA, 5105 bp, Cannabis indica
gtgggtgcacagtgcacccacaagtgaggttaacagaggcccttgttgttccttggtgcactaagagtgtgtgcacagtgcacccacaagtgaggttaacacacagtatagaagcttttgaagaaggaccgtaggggccggatgggagagtgtgaggtgtgtgtgagtggtgagtcagcctattattgtgatgacaaagcaaagcaaactaatatcaccttcattcattcattcattcatattattattattattattattattattattatttatgattatgtaatacggtctccatagggcgggaccacccgaccgttgcagcagcctgtgacgtcataaatcttcggccacaccaaaccactactccactactccatccagaccagaccagaccagaccataccagaccagaccagacccattgaacaaagctcagtaaaggattaggtttgtatttacacgtcaaattcgtcagctttggtctcccttaaaaaccacacacaaataattacctctctgttctcttctacctaacctaataacacacacaccacacccttcttcccaaaactcacaccaaactgctccaaccctccctccttatccgtactattattcaataagtacaactctttaaatttgacgtttcaatggattgatcacttttaatttttcagaaaatttgcaataaaaaataaaatccaaacaaataaatagtctactaaattatttgtatttggcccaactgttcaaatgaaccaacttttggatggagcattgaaccatcattttcatttaagaatgctgtgcctttatgcttgtttacacactcagatttactgcaactatttattattaatgtattgactttcacgggcagtgaaactgtaccaaggcttgttggtgcatatttatcagtaccctttattcaaattacgatcaaagaacattgatttgaatcatttgatgatatcgacgatgtataaagtagttaaaatgtaacaaaaatttgggcacaaaaaaagaaaagaaaaaaagaaaaggcatgtgttaaggggtccaattatttatttaagcaattgggaaagaaggtctatttatgctgtgtttgtgctcagaaatattgaggactggtttgtatttatacgagcagtagtgtttgaagaagacgcataccaaaccccacaaagtgcccttgtttgttctgaaaatggggtcccttttttttttaaccaaaatcaaatttctaaaacactcgaaacgttctttccacaatgacacctgaatggtcacgatcaataggacaataaacagagcattatgcagcaccagaccactccttcattgtcatcctctgagagtcctggccccattgattcatgcagtgagtgcagatttggaaaattggcttgctcttctttccaagtcatctctgtttagcatgagatgcagatgtaatttctctcgtgtcaagacacaaaacagagaaagagagaaagagaaagatagagagagagagacttagtgtgtgtgtgtgtgattgattaacgaaagggacatgcattaaagccataatcaaaagcatggaggagaaaaagactatagcaattgtcatagatcaatgcttttactatgtcattttctcctacgagggattttaacggattaaatgaatgaaagagatggagttgcagattacttactagtaagagttaattgggtgttcttcaaaaattaattacagtgagctaaaccaagtaaagatgacataaattcatatgtcatgttttttacgtcaatagaattaatgatagttttgagtgctcagtaaaattgcagattaaacagttttggttggtggtgtcacaagtaagaaattgagaaaaggagctttaaaaaagataataagtgaatatgtaatgtagttaagtaactcttaatcaaaagctaaaagaaattaatagcaaaactaaacccattgattcaaatgtacatgcaaaattacagacacaaagagggagagtgcattcttccattccctcgagttttcaattcccttttctacaattagtcatattcgagattcaaatctataagaaaaacccccaataaataaataaaaaaaaagagagagaagcccactataacgttaagaaagttgaaaaaaactagacaaactaccaaatgaacaaagcaagttttctgtcccaaaaatcttcaaaagcctctgataatgcagtaactttaatgcttagatatcgaaatcagagttacactgagttttgcatatctgaatcaataagaagaagcatcgaacaaagaacatcaatggctgagaataggtatgtattgccatggttccaaaccagagataaaagacctggtaaaagaaccaatgaccccaattgaggtgaaaaaaaacccattaacgccatgacgaaactgtcaaaagagggacatcattccatgccaaagatagaaaggcaggtgaagattcaaccagagaaaataaagaactgtaattatagttccataaaaggatcttagcttggctaacagcgtaatgacttagcttcactggttgaaattcacaaccttccattaaagctttccattcctttctatcttccattcgttctcttttcgttctaggatcctctggcccaactacacaaccaattcgacgaccaaacaaaaccctttcaacctgaagcctttcaggcgattcacggcttaaattaggctccaatgattcaaacacagccgtgtagtacttcaaagcgttcttgaaacgagtcataaacccaacttggttcaaactagcttcgtattcacctaaagtaacaatctttgggtttagtgatttagccaatctgagagcagtatgtacagccattggagtctcgtctaagaggttatacaattgaagcatgaaattcactgccaagacctcgtcttcttcgaccctaaagcttgactcgttaagttcactaatcggtattagaataggttcaaacacgaagttcaattcaagaagcttcgcgaactcggagagacgattaccggtggcgaccaaggacgccgccggtgttctgccgagggcaagagctggtatgccggataatctaatcttagtgggctttccggtgggccgagtcgctagggcttgtaaaagggcagcccactgaaccccttgaacgattccgaaatcaactatatggatcttactagctctttcagtggcttcgagtatggcttgattcgcagtcaaatgggcgaatttggagtacggacaagcgtcgtttaaagccttgtaagggagtgtgaaatcttcagaagaagcactttcgtaaatggcggagcagcttttctccgccggtagagaaactctgttatacagtgcttcggcgaagtgaaaggtgactctttcagtcggatctccttgctctgacactgattccttaagcttaatcaatgatttcacagctcgctctggttcggcttcagtgagtcgagcacagtcaattagggctttaaaaagcggtggcgccgattcgatttctggtgagctggtagacacgccgataacgtcgttcttccttacgctatgcgacggtggaggatttgtcgattttgagtccttcgataccactggcggagactgaggagcttggggtgggatccatggcgaaacttgagtctgctgaagtgggttagggtttttctgctgggtttcgttgaatagattaactcggttgagatccgaaggtgatgatgaagaagggatactgagtcgactcgggcaagcggcgaagggatcagcagcaccgtagagaacgaaatccgcagcattgttttgccacgcgtcacaaccagaaggaagatttgaactatccgttgaatctccaccgcccattatgctatccatccactcgtcagactcaaactcgccacctggaccggcgccgaaatctgaaaatcgaaacccagttgagtggtgatccatgtgaggaaactgaaaccctggttcacctgtatccgaaccaccagtgactagaaatggatcaggaaagccagaacccgccaacccataaccacccaaattcggagcattagacatggtgttgtggtgagtaacagtactccatggattaagagaaaagggacttagaccagtgagttgctgctgttgatggctctgttgttgttgttgctcttgctgctgtttctgctttatcacttgttgagctatcgccattaaattaccactgtccgtacacatatatgccattctccggccaaccaccgccggaaaaactctgcaatcacattaccaaaaaacagataatcagtcaaaaatgtagtagccgtagttgggagagccaaaaaaacaatttttaaattacccaagaagaaaaaactgaatctttgaagaatttaatcaaacttactctgatagaaccagctagagaaagagagagagaaaggagtgagtgtgaagaggagagagaaggggggaagacgatttcagaagtgcagctatttaaagaacaagattaagctcttcactctctcaactgggatggtagcagattattattaataaaaaagaaaaagaaaaagaaaaagaaaaaatgaaaaatcccatggaaatgaaactagatgggtcccactttctctcttcatattcataacaaaataatttaatttaacaaaaatcaatactttgaatgatgaaaacactatttatttaatattatttatgtaccctactactaatactaatagacacttttattttgtcatcaactgattcatgtattaaaaataaatacatactccaacacacgacacaatacaatttatttaacttgtttataaataaatttagacaattatctcatatattgattttttttttaatttttatttttaaatttacgatttaaatttttaaaatggttacaacggtagttataataagaatttttatattatttttttgttgcgattttagttacagtgcagttacaataaaaatttctatataaaatttcgtaaaaatataaaaaaagaaactattttaaagtgtaaaaataaaa

SEQ ID NO: 297492 - DNA, 1638 bp, Cannabis indica
ttttttttttctttgaaagggagcaataattaaaacttcacttatatgaaaatgtacgtactataaataaataaattaacaccgtttatgtctcaaactatttttgaattgtaaataactaagtataaattattgacatatgcaataatataaagacaaatattaacgtacaggtatagaatcttgtacttttctatcaaacccacaacattaattaaaatataatagatatgagctttcaataataataataatataaaaaacaaaaatcacgttataaatcaaacattttacatatatttatattgggcacgggattaaatatatttttattttattttcaatcaattttacaatacaaaaacatatttaattgattttttctctctcaatgagagctaatgctatggcggagagaaaaaaactcagagaagggttacacacagggctgggcttgattttggagaaaaaaactagaataataagcaattgatgaagcagtctttctcttctcccctcattttgagtttttctttcaaaaacgcatttaattgtactataaaaaagaaccccactgcaaaatccttttgatttaaattaaaaacaaaatttcaaattttaaaaatcacgctctcactgcaaaaaagggtttatgctcgttgcgggagagtgccttgagcaaaaacccaaaattccaatcacacattcattgtagcgaataaatatctcgttgcaaccatgactcgctcgctgaggcaagagcctattgttgaatattgtttgtcgcgtatttagattgttattttggtcatggctccttcagaattgaacgattcaagatgtttagaaaattcgagaatgagatctacaactttcattttcaattccaagtctagttttacttttaaagtcgtcgaaatttgcaattaggttctaacttgtaaaatcaagctctccaaaattgaccgtttttaccaaaatatgttaaaatcattccaaaatactccaaacacaaagcctttcaaattacaaacaaatccaaaatacattaattaaaagtttaaagagttaatttaatagtaataatgggagaaaataacacaacttaatagatctatatgcactaatcaaagaacatctattgaggaaggcctatcaagaaattcatagtgcttacttgtccttttttagtcaaaaaagaagaaggggattccaactcagccttatttcatgccccaatttgaatcaggacaattcataataatatttgctctattcaggatatgcaagggatttgtagggataggccacatgaggtggttggtgctttcatggatttttaccagaatttgcttggtaccaagatgcatcagactcagggaaagacaatgcttcaaggactcattgatcatggtcttattttaactgagcttcctaaaaattttctgcttcaaaagtatactttacccttcccttatttatattattttctttttgcatcattaatgaatttctttagatatatgtttatgcattcatagttatgtataatatgtttgtatttgaaattaaatttgaatattgcatattatagagaaattctacaatgcaacccttaaaatggatacattgatgcac

SEQ ID NO: 297493 - DNA, 2403 bp, Cannabis indica
taaagttatttactaaaaaaaaaattattaataaccgcgtataacgcagtttctacctgtttaaatatacaaatatataaacttaatcttcatataaatgagttgaggaatcacagtcctcaaggctcatacataagtgaacaactacacaattggccttatatataggaataaaattatatggagtccgttaccactttaacaaaagtttatacccttgttattgtggtttgacaccccacaacttagacttaagagcttttacatattattggttatatacaaaaaagtataactagcagtcatttcaatccacttttgatcaataaattcaactcttcgaacagtactactcttgtgtatatatatacactactcaaagccagctatataaattattatatatatatatttatatataatagtttttaataatttctaatttgtcattataatttataattatttataatattatgtgcccagtagcatcttgtgaccaaaatggaatcagaagaccaaccaatcatgattaatatatggtttttgaaaaggttcacgggtattgttaaaatatgacaaaaccccagcttattcagtcttgtgatccaaacaaaccaaaaattaatatgcacaaattaaagtttatgagtatctcgatggattgtccacttttttgttttgtcaagatgaattaggccactatttgatcatgaggaatctcaaccattgccagccttacttttcacatcacataataattttggactaaacaaaataaagagccaacacacacttggctgggactcaagtatataaataccagccataataatatgataaacacaagtacaacttcatcaaaattacatattatggcttccaccacaagacaatattcttcaaccctaatcatttctcttgtcctctccatgaacctcatggcaagtagtactagtagtccagatgagcaggccattaggcctgatcattattcaatcccaaacagtaataataataataataataataataagcagatgatcatgaacccaatgaaggtgagttgccctagagatgccttaaagctaggggtgtgtgcaaacgtgctgcatggggctgtggggacggggatagggttgcccgcggaccattgctgctcggttcttgatggccttgtggatcttgaagctgctgtgtgcctttgcacagccattaaggctaacattcttggaatcaacattaacattcccatttcactcagcttgctcatcaacacttgtggcatagacatgccatccgactttcaatgtgtgtctgcctaataacccaaattaatgttattgaggaattttatttatatttctgaatttgataagtgtgattaattaatgtttggatttttctgaatttaagtgaggctttgtgtgagcttgaacgatctatcaataatgacaacgtatgacactatatattattgggctagctcccatgctctgcagccatgcacgttgataattttatttttttggtgataatattgttgatctaagcgaattctaaataaagaaatattttgttgatataatgctgtaaatatagctatctttgaatatttagagaatgatgaaaaaaaaaaagctctatcagctctcctctatagctcaattttttacattagccacgtgcatatagtaatcttaatgtcaccaaccattttattattctttttattcctttttctttatttcaattttctctccatttacttctttgttaataaataaaaatatattttgttgggatttatggcaagacgttttatgtcgaaagggaccttcattgaagaaatgagagatgttgaggaactggacatggacatggatgagcgtattgggtctttaaaaaattatgaaatgatatccgagctggatctcagatcccaaagttacaatgggattcagtgaatttgctaagttaaataggcggtgtgttttggattgatgagttggcctgagaaagagcatgtactttggggcacattactagtgtggagagttaactgatgcaggatcctttgatggaagccaaagtggttatttgtttgaggagaagattgttgggtatacaaccaaagttccatattaattaaaaaagaaaatgatcattttagttttaggaagaaagaaaatacagagaagaaaagaagagaaaatgaattcaacttttattgataactcaaaatagagtatagtaagaagctttatatacaagctcgaagaagaagaagactaactaacaattgtaatagaagaacaagtttgtaccaaactcaccaactaaccatgataccttacaaatctaatactcccccttaaggtggagtgtatatgttacaaagcc
